(19) United States
(12) Patent Application Publication
(10) Pub. No.: US 2011/0191912 A1
(43) Pub. Date: Aug. 4, 2011

(54) Promoter, promoter control elements, and combinations, and uses thereof

(76) Inventors: Nickolai Alexandrov, Thousand Oaks, CA (US); Nestor Apuya, Culvar City, CA (US); Vyacheslav Brover, Simi Valley, CA (US); Jean-Baptiste Dumas, Paris (FR); Yiwen Fang, Los Angeles, CA (US); Ken Feldmann, Newbury Park, CA (US); Diane Jofuku, Arlington, VA (US); Edward A. Kiegle, Chester, VT (US); Bill Kimmerly, Richland, WA (US); Shing Kwok, Woodland Hills, CA (US); Peter Mascia, Thousand Oaks, CA (US); Jack Okamuro, Oak Park, CA (US); Roger Pennell, Malibu, CA (US); Richard Schneeberger, Van Noys, CA (US); Tatiana Tatarinova, Los Angeles, CA (US); Wayne Volkmuth, Foster City, CA (US)

(21) Appl. No.: 11/004,678

(22) Filed: Dec. 3, 2004

Related U.S. Application Data
(63) Continuation of application No. 10/886,468, filed on Jul. 6, 2004.
Application No. 10/886,468 is a continuation of application No. 10/653,278, filed on Sep. 3, 2003, now abandoned.
Application No. 10/653,278 is a continuation-in-part of application No. 09/775,870, filed on Feb. 1, 2001, now abandoned.
Application No. 09/775,870 is a continuation-in-part of application No. 10/372,233, filed on Feb. 25, 2003, now abandoned.
Application No. 10/372,233 is a continuation-in-part of application No. 09/924,702, filed on Aug. 9, 2001, now abandoned.
Application No. 10/372,233 is a continuation of application No. 10/158,820, filed on Jun. 3, 2002, now abandoned.
Application No. 10/158,820 is a continuation of application No. 09/938,697, filed on Aug. 24, 2001, now abandoned.
Application No. 09/938,697 is a continuation-in-part of application No. 09/754,185, filed on Jan. 5, 2001, now abandoned.
Application No. 09/754,185 is a continuation-in-part of application No. 09/774,340, filed on Jan. 31, 2001, now abandoned.
Application No. 09/774,340 is a continuation-in-part of application No. 09/776,014, filed on Feb. 1, 2001, now abandoned.
Application No. 09/776,014 is a continuation-in-part of application No. 09/775,870, filed on Feb. 1, 2001, now abandoned.
Application No. 09/775,870 is a continuation-in-part of application No. 09/842,246, filed on Apr. 26, 2001, now abandoned.
Application No. 09/938,697 is a continuation-in-part of application No. 09/845,209, filed on May 1, 2001, now abandoned.
Application No. 09/845,209 is a continuation-in-part of application No. 09/924,702, filed on Aug. 9, 2001, now abandoned.
(60) Provisional application No. 60/200,034, filed on Apr. 26, 2000.
(60) Provisional application No. 60/224,390, filed on Aug. 9, 2000.

(51) Int. Cl. A01H 5/00; C07H 21/04; C12N 15/63; C12N 5/10; C07K 14/00; C07K 16/00; C12N 15/82; C12Q 1/68

(52) U.S. Cl. 800/298; 536/23.1; 536/24.1; 435/320.1; 435/419; 530/300; 530/387.9; 435/468; 435/6.1

(57) ABSTRACT

The present invention provides DNA molecules that constitute fragments of the genome of a plant, and polypeptides encoded thereby. The DNA molecules are useful for specifying a gene product in cells, either as a promoter or as a protein coding sequence or as an UTR or as a 3′ termination sequence, and are also useful in controlling the behavior of a gene in the chromosome, in controlling the expression of a gene or as tools for genetic mapping, recognizing or isolating identical or related DNA fragments, or identification of a particular individual organism, or for clustering of a group of organisms with a common trait. One of ordinary skill in the art, having this data, can obtain cloned DNA fragments, synthetic DNA fragments or polypeptides constituting desired sequences by recombinant methodology known in the art or described herein.

[0001] This application is a Continuation of application Ser. No. 10/886,468, filed Jul. 6, 2004, which is a Continuation of application Ser. No. 10/653,278, filed on Sep. 3, 2003, which is a continuation-in-part of the following applications. The entire contents of which are hereby incorporated by reference:

| Attorney Docket No. | Filed | Application Number |
|---|---|---|
| 2750-1399P | Feb. 1, 2001 | 09/775,870 |
| 2750-1549P | Feb. 25, 2003 | 10/372,233 |
| 2750-1469P | Aug. 9, 2001 | 09/924,702 |

### Moreover,

[0002] Application Ser. No. 10/372,233 listed above is a continuation of application Ser. No. 10/158,820 (Attorney No. 2750-1528P), filed on Jun. 3, 2002, the entire contents of which are also hereby incorporated by reference. Application Ser. No. 10/158,820 (Attorney No. 2750-1528P) is a continuation of application Ser. No. 09/938,697 (Attorney No. 2750-1468P), filed on Aug. 24, 2001, the entire contents of which are hereby incorporated by reference.

[0003] Application Ser. No. 09/938,697 (Attorney No. 2750-1468P) is a continuation-in-part of the following non-provisional and provisional applications, to which the present application claims priority under 35 USC §119(e) and §120, the entire contents of which are hereby incorporated by reference:

| Attorney No | Appln No | Filed |
|---|---|---|
| 2750-1154P | 09/754,185 | Jan. 5, 2001 |
| 2750-1398P | 09/774,340 | Jan. 31, 2001 |
| 2750-1400P | 09/776,014 | Feb. 1, 2001 |
| 2750-1399P | 09/775,870 | Feb. 1, 2001 |
| 2750-1439P | 09/842,246 | Apr. 26, 2001 |
| 2750-0832P | 60/200,034 | Apr. 26, 2000 |
| 2750-1444P | 09/845,209 | May 1, 2001 |
| 2750-0889P | 60/205,233 | May 17, 2000 |
| 2750-0841P | 60/201,017 | May 1, 2000 |
| 2750-1469P | 09/924,702 | Aug. 9, 2001 |
| 2750-1114P | 60/224,390 | Aug. 9, 2000 |
| 2750-1181P | 60/228,208 | Aug. 25, 2000 |
| 2750-1168P | 60/228,052 | Aug. 25, 2000 |
| 2750-1169P | 60/228,049 | Aug. 25, 2000 |
| 2750-1170P | 60/228,132 | Aug. 25, 2000 |
| 2750-1171P | 60/228,152 | Aug. 25, 2000 |
| 2750-1172P | 60/228,135 | Aug. 25, 2000 |
| 2750-1173P | 60/228,322 | Aug. 25, 2000 |
| 2750-1174P | 60/228,156 | Aug. 25, 2000 |
| 2750-1175P | 60/228,323 | Aug. 25, 2000 |
| 2750-1176P | 60/228,133 | Aug. 25, 2000 |
| 2750-1177P | 60/228,320 | Aug. 25, 2000 |
| 2750-1178P | 60/228,159 | Aug. 25, 2000 |
| 2750-1167P | 60/228,047 | Aug. 25, 2000 |
| 2750-1180P | 60/228,202 | Aug. 25, 2000 |
| 2750-1164P | 60/228,163 | Aug. 25, 2000 |
| 2750-1182P | 60/228,153 | Aug. 25, 2000 |
| 2750-1183P | 60/228,179 | Aug. 25, 2000 |
| 2750-1184P | 60/228,180 | Aug. 25, 2000 |
| 2750-1185P | 60/228,209 | Aug. 25, 2000 |
| 2750-1187P | 60/228,177 | Aug. 25, 2000 |
| 2750-2132P | 60/227,791 | Aug. 25, 2000 |
| 2750-1189P | 60/228,207 | Aug. 25, 2000 |
| 2750-1179P | 60/228,151 | Aug. 25, 2000 |
| 2750-1144P | 60/227,770 | Aug. 25, 2000 |
| 2750-1133P | 60/228,025 | Aug. 25, 2000 |
| 2750-1134P | 60/227,781 | Aug. 25, 2000 |
| 2750-1135P | 60/227,783 | Aug. 25, 2000 |
| 2750-1136P | 60/227,731 | Aug. 25, 2000 |
| 2750-1137P | 60/227,732 | Aug. 25, 2000 |
| 2750-1138P | 60/227,729 | Aug. 25, 2000 |
| 2750-1139P | 60/228,167 | Aug. 25, 2000 |
| 2750-1140P | 60/227,734 | Aug. 25, 2000 |
| 2750-1141P | 60/227,792 | Aug. 25, 2000 |
| 2750-1166P | 60/228,098 | Aug. 25, 2000 |
| 2750-1143P | 60/227,730 | Aug. 25, 2000 |
| 2750-1190P | 60/228,048 | Aug. 25, 2000 |
| 2750-1145P | 60/227,728 | Aug. 25, 2000 |
| 2750-1146P | 60/227,773 | Aug. 25, 2000 |
| 2750-1147P | 60/228,033 | Aug. 25, 2000 |
| 2750-1148P | 60/228,024 | Aug. 25, 2000 |
| 2750-1149P | 60/227,769 | Aug. 25, 2000 |
| 2750-1150P | 60/227,780 | Aug. 25, 2000 |
| 2750-1151P | 60/227,725 | Aug. 25, 2000 |
| 2750-1152P | 60/227,774 | Aug. 25, 2000 |
| 2750-1188P | 60/227,976 | Aug. 25, 2000 |
| 2750-1165P | 60/228,046 | Aug. 25, 2000 |
| 2750-1142P | 60/227,733 | Aug. 25, 2000 |
| 2750-1218P | 60/227,929 | Aug. 25, 2000 |
| 2750-1191P | 60/228,096 | Aug. 25, 2000 |
| 2750-1220P | 60/227,931 | Aug. 25, 2000 |
| 2750-1186P | 60/228,178 | Aug. 25, 2000 |
| 2750-1222P | 60/228,061 | Aug. 25, 2000 |
| 2750-1223P | 60/228,150 | Aug. 25, 2000 |
| 2750-2133P | 60/228,041 | Aug. 25, 2000 |
| 2750-2116P | 60/227,793 | Aug. 25, 2000 |
| 2750-2117P | 60/228,031 | Aug. 25, 2000 |
| 2750-1217P | 60/228,217 | Aug. 25, 2000 |
| 2750-2119P | 60/228,027 | Aug. 25, 2000 |
| 2750-1219P | 60/228,043 | Aug. 25, 2000 |
| 2750-2121P | 60/228,026 | Aug. 25, 2000 |
| 2750-2122P | 60/228,038 | Aug. 25, 2000 |
| 2750-2123P | 60/228,036 | Aug. 25, 2000 |
| 2750-2124P | 60/227,790 | Aug. 25, 2000 |
| 2750-2125P | 60/228,039 | Aug. 25, 2000 |
| 2750-2126P | 60/228,030 | Aug. 25, 2000 |
| 2750-2127P | 60/228,032 | Aug. 25, 2000 |
| 2750-2128P | 60/228,149 | Aug. 25, 2000 |
| 2750-2129P | 60/228,040 | Aug. 25, 2000 |
| 2750-2130P | 60/227,777 | Aug. 25, 2000 |
| 2750-2131P | 60/228,037 | Aug. 25, 2000 |
| 2750-2118P | 60/228,028 | Aug. 25, 2000 |
| 2750-1201P | 60/228,055 | Aug. 25, 2000 |
| 2750-1192P | 60/227,932 | Aug. 25, 2000 |
| 2750-1193P | 60/227,936 | Aug. 25, 2000 |
| 2750-1194P | 60/228,044 | Aug. 25, 2000 |
| 2750-1195P | 60/228,216 | Aug. 25, 2000 |
| 2750-1196P | 60/228,065 | Aug. 25, 2000 |
| 2750-1197P | 60/227,975 | Aug. 25, 2000 |
| 2750-1198P | 60/228,181 | Aug. 25, 2000 |
| 2750-1221P | 60/228,187 | Aug. 25, 2000 |
| 2750-1200P | 60/228,064 | Aug. 25, 2000 |
| 2750-1216P | 60/227,954 | Aug. 25, 2000 |
| 2750-1202P | 60/228,074 | Aug. 25, 2000 |
| 2750-1203P | 60/227,939 | Aug. 25, 2000 |
| 2750-1212P | 60/228,165 | Aug. 25, 2000 |
| 2750-1213P | 60/228,221 | Aug. 25, 2000 |
| 2750-1199P | 60/228,063 | Aug. 25, 2000 |
| 2750-1214P | 60/228,240 | Aug. 25, 2000 |
| 2750-1204P | 60/227,955 | Aug. 25, 2000 |
| 2750-1211P | 60/228,161 | Aug. 25, 2000 |
| 2750-1210P | 60/228,164 | Aug. 25, 2000 |
| 2750-1209P | 60/228,054 | Aug. 25, 2000 |
| 2750-1208P | 60/228,189 | Aug. 25, 2000 |
| 2750-1207P | 60/227,982 | Aug. 25, 2000 |
| 2750-1206P | 60/227,978 | Aug. 25, 2000 |
| 2750-1205P | 60/228,053 | Aug. 25, 2000 |
| 2750-1215P | 60/227,979 | Aug. 25, 2000 |

[0004] Application Ser. No. 09/924,702 listed above claims priority under 35 USC §119(e) of the following application. The entire contents of which are hereby incorporated by reference.

| Country | Filed | Attorney No. | Application No. |
|---|---|---|---|
| United States | Aug. 9, 2000 | 2750-1114P | 60/224,390 |

[0005] The entire contents of the applications listed in the table above are expressly incorporated herein by reference.

[0006] This application contains a CDR, the entire contents of which are hereby incorporated by reference. The CDR contains the following files:

| Create Date: | File Size: | File Name: |
|---|---|---|
| 09/26/2002 09:19p | 2,366,953 | 2750-1399P Table A-1.txt |
| 09/26/2002 09:19p | 1,938,556 | 2750-1399P Table A-2.txt |
| 09/26/2002 09:19p | 74,754,025 | 2750-1399P Table B.txt |
| 09/26/2002 09:19p | 7,670,452 | 2750-1399P Table C.txt |
| 09/26/2002 06:08p | 65,168,204 | 2750-1469P.txt |
| 09/26/2002 05:46p | 4,052,876 | cdna_clusters.txt |
| 09/26/2002 05:46p | 399,505 | cDNA_GI_pos.txt |
| 09/26/2002 05:46p | 35,153 | Cluster Functions and Utilities (01).txt |
| 09/26/2002 05:46p | 40,447 | Cluster Functions and Utilities (02).txt |
| 09/26/2002 05:46p | 4,473 | Cluster Functions and Utilities (03).txt |
| 09/26/2002 05:46p | 7,820 | Cluster Functions and Utilities (04).txt |
| 09/26/2002 05:46p | 24,047 | Cluster Functions and Utilities (05).txt |
| 09/26/2002 05:46p | 18,490 | Cluster Functions and Utilities (06).txt |
| 09/26/2002 05:46p | 36,273 | Cluster functions and utilities (07).txt |
| 09/26/2002 05:46p | 33,962 | Cluster Functions and Utilities (08).txt |
| 09/26/2002 05:46p | 23,000 | Cluster functions and utilities (09).txt |
| 09/26/2002 05:46p | 2,691 | Cluster functions and utilities (10).txt |
| 09/26/2002 05:46p | 2,290 | Cluster functions and utilities (11).txt |
| 09/26/2002 05:46p | 23,740 | Cluster Funtions and Utilities (12).txt |
| 09/26/2002 05:46p | 6,642,415 | cluster_info_50.dat |
| 09/26/2002 05:46p | 2,946,892 | cluster_info_60.dat |
| 09/26/2002 05:46p | 913,656 | cluster_info_70.dat |
| 09/26/2002 05:46p | 432,906 | cluster_info_75.dat |
| 09/26/2002 05:46p | 392,675 | knock_in.710-0024-55300-US-U-00007_01.txt |
| 09/26/2002 05:46p | 831,736 | knock_out.710-0024-55300-US-U-00007.01 |
| 09/26/2002 05:46p | 5,328,883 | MATRIX.001 |
| 09/26/2002 05:46p | 5,335,846 | MATRIX.002 |
| 09/26/2002 05:46p | 5,330,456 | MATRIX.003 |
| 09/26/2002 05:46p | 5,317,696 | MATRIX.004 |
| 09/26/2002 05:46p | 605,072 | MATRIX.005 |
| 09/26/2002 05:46p | 16,635,460 | ma_clusters.710-0024-55300-US-U-00007.01 |
| 09/26/2002 05:46p | 55,307 | ma_diff Aluminum.txt |
| 09/26/2002 05:46p | 27,557 | ma_diff Axel.txt |
| 09/26/2002 05:46p | 41,505 | ma_diff Cadium .txt |
| 09/26/2002 05:46p | 53,938 | ma_diff Cauliflower .txt |
| 09/26/2002 05:46p | 98,775 | ma_diff Chloroplast.txt |
| 09/26/2002 05:46p | 141,971 | ma_diff Circadian 1-01.txt |
| 09/26/2002 05:46p | 160,542 | ma_diff Circadian 1-02.txt |
| 09/26/2002 05:46p | 127,498 | ma_diff Circadian 1-03.txt |
| 09/26/2002 05:46p | 166,158 | ma_diff Circadian 1-04.txt |
| 09/26/2002 05:46p | 56,536 | ma_diff Circadian 1-05.txt |
| 09/26/2002 05:46p | 121,178 | ma_diff Circadian 1-06.txt |
| 09/26/2002 05:46p | 133,389 | ma_diff Circadian 1-07.txt |
| 09/26/2002 05:46p | 259,096 | ma_diff Circadian 1-08.txt |
| 09/26/2002 05:46p | 228,222 | ma_diff Circadian 1-09.txt |
| 09/26/2002 05:46p | 54,526 | ma_diff Circadian 1-10.txt |
| 09/26/2002 05:46p | 134,759 | ma_diff CO2 1-1.txt |
| 09/26/2002 05:46p | 241,865 | ma_diff CO2 1-2.txt |
| 09/26/2002 05:46p | 63,264 | ma_diff CO2 1-3.txt |
| 09/26/2002 05:46p | 59,530 | ma_diff CO2 1-4.txt |
| 09/26/2002 05:46p | 372,633 | ma_diff CO2 1-5.txt |
| 09/26/2002 05:46p | 9,220 | ma_diff Disease .txt |
| 09/26/2002 05:46p | 25,114 | ma_diff H2O2 .txt |
| 09/26/2002 05:46p | 4,073 | ma_diff Iol .txt |
| 09/26/2002 05:46p | 283,026 | ma_diff Iron 1-1.txt |
| 09/26/2002 05:46p | 90,890 | ma_diff Iron 1-2.txt |
| 09/26/2002 05:46p | 51,342 | ma_diff Mitochondria-Electron Transp.txt |
| 09/26/2002 05:46p | 107,920 | ma_diff NAA (Auxin) 1-1.txt |
| 09/26/2002 05:46p | 50,267 | ma_diff NAA (Auxin) 1-2.txt |
| 09/26/2002 05:46p | 67,291 | ma_diff Nitrogen.txt |
| 09/26/2002 05:46p | 6,441 | ma_diff Phototropism 1-1.txt |
| 09/26/2002 05:46p | 22,229 | ma_diff Phototropism 1-2.txt |
| 09/26/2002 05:46p | 28,270 | ma_diff Phototropism 1-3.txt |
| 09/26/2002 05:46p | 45,620 | ma_diff Shade.txt |
| 09/26/2002 05:46p | 73,438 | ma_diff Sqn.txt |
| 09/26/2002 05:46p | 3,828 | ma_diff Sulfur.txt |
| 09/26/2002 05:46p | 67,949 | ma_diff Wounding.txt |
| 09/26/2002 05:46p | 30,836 | ma_diff Zinc.txt |
| 09/26/2002 05:46p | 4,318,956 | ma_diff.710-0024-55300-US-U-00007.01 |
| 09/26/2002 05:46p | 1,071,693 | RESULT.001 |
| 09/26/2002 05:46p | 1,072,021 | RESULT.002 |
| 09/26/2002 05:46p | 1,072,022 | RESULT.003 |
| 09/26/2002 05:46p | 1,071,371 | RESULT.004 |
| 09/26/2002 05:46p | 1,071,155 | RESULT.005 |
| 09/26/2002 05:46p | 459,530 | RESULT.006 |
| 09/26/2002 05:46p | 1,476 | Single gene functions and utilities (1).txt |
| 09/26/2002 05:46p | 2,223 | Single gene functions and utilities (2).txt |
| 09/26/2002 05:46p | 905 | Single gene functions and utilities (3).txt |
| 09/26/2002 05:46p | 1,517 | Single gene functions and utilities (4).txt |
| 09/26/2002 05:46p | 4,626 | Single gene functions and utilities (5).txt |
| 09/26/2002 05:46p | 4,887 | Single gene functions and utilities (6).txt |
| 09/26/2002 05:46p | 7,456 | Single gene functions and utilities (7).txt |
| 09/26/2002 05:46p | 9,339 | Single gene functions and utilities (8).txt |
| 09/26/2002 05:46p | 228,792 | stanford_old_new_cdna_map.txt |

### FIELD OF THE INVENTION

[0007] The present invention relates to over 100,000 isolated polynucleotides from plants that include a complete coding sequence, or a fragment thereof, that is expressed. In addition, the present invention relates to the polypeptide or protein corresponding to the coding sequence of these polynucleotides. The present invention also relates to isolated polynucleotides that represent regulatory regions of genes. The present invention also relates to isolated polynucleotides that represent untranslated regions of genes. The present invention further relates to the use of these isolated polynucleotides and polypeptides and proteins.

### BACKGROUND OF THE INVENTION

[0008] There are more than 300,000 species of plants. They show a wide diversity of forms, ranging from delicate liverworts, adapted for life in a damp habitat, to cacti, capable of surviving in the desert. The plant kingdom includes herbaceous plants, such as corn, whose life cycle is measured in months, to the giant redwood tree, which can live for thousands of years. This diversity reflects the adaptations of plants to survive in a wide range of habitats. This is seen most clearly in the flowering plants (phylum Angiospermophyta), which are the most numerous, with over 250,000 species. They are also the most widespread, being found from the tropics to the arctic.

[0009] The process of plant breeding involving man's intervention in natural breeding and selection is some 20,000 years old. It has produced remarkable advances in adapting existing species to serve new purposes. The world's economics was largely based on the successes of agriculture for most of these 20,000 years.

[0010] Plant breeding involves choosing parents, making crosses to allow recombination of gene (alleles) and searching for and selecting improved forms. Success depends on the genes/alleles available, the combinations required and the ability to create and find the correct combinations necessary to give the desired properties to the plant. Molecular genetics technologies are now capable of providing new genes, new alleles and the means of creating and selecting plants with the new, desired characteristics.

[0011] When the molecular and genetic basis for different plant characteristics are understood, a wide variety of polynucleotides, both endogenous polynucleotides and created variants, polypeptides, cells, and whole organisms, can be exploited to engineer old and new plant traits in a vast range of organisms including plants. These traits can range from the observable morphological characteristics, through adaptation to specific environments to biochemical composition and to molecules that the plants (organisms) exude. Such engineering can involve tailoring existing traits, such as increasing the production of taxol in yew trees, to combining traits from two different plants into a single organism, such as inserting the drought tolerance of a cactus into a corn plant. Molecular and genetic knowledge also allows the creation of new traits. For example, the production of chemicals and pharmaceuticals that are not native to particular species or the plant kingdom as a whole.

[0012] The application reports the inventions Applicants have discovered to build a foundation of scientific understanding of plant genomes to achieve these aims. These inventions include polynucleotide and polypeptide sequences, and data relating to where and when the genes are differentially expressed and phenotypic observations resulting from either aberrant gene activation or disruption. How these data are transformed into a scientific understanding of plant biology and the control of traits from a genetic perspective also is explained by the instant application. Applications of these discoveries to create new prototypes and products in the field of chemical, pharmaceutical, food, feed, and fiber production are described herein as well.

[0013] The achievements described in this application were possible because of the results from a cluster of technologies, a genomic engine, depicted below in Schematic 1, that allows information on each gene to be integrated to provide a more comprehensive understanding of gene structure and function and the deployment of genes and gene components to make new products.

### I. The Discoveries of the Instant Application

[0014] Applicants have isolated and identified over one hundred thousand genes, gene components and their products and thousands of promoters. Specific genes were isolated and/or characterized from arabidopsis, soybean, maize, wheat and rice. These species were selected because of their economic value and scientific importance and were deliberately chosen to include representatives of the evolutionary divergent dicotyledonous and monocotyledonous groups of the plant kingdom. The number of genes characterized in this application represents a large proportion of all the genes in these plant species.

[0015] The techniques used initially to isolate and characterize most of the genes, namely sequencing of full-length cDNAs, were deliberately chosen to provide information on complete coding sequences and on the complete sequences of their protein products.

[0016] Gene components and products the Applicants have identified include exons, introns, promoters, coding sequences, antisense sequences, terminators and other regulatory sequences. The exons are characterized by the proteins they encode and arabidopsis promoters are characterized by their position in the genomic DNA relative to where mRNA synthesis begins and in what cells and to what extent they promote mRNA synthesis. Further exploitation of molecular genetics technologies has helped the Applicants to understand the functions and characteristics of each gene and their role in a plant. Three powerful molecular genetics approaches were used to this end:
[0017] (a) Analyses of the phenotypic changes when the particular gene sequence is interrupted or activated differentially; (arabidopsis)
[0018] (b) Analyses of in what plant organs, to what extent, and in response to what environmental signals mRNA is synthesized from the gene; (arabidopsis and maize) and
[0019] (c) Analysis of the gene sequence and its relatives. (all species)

[0020] These were conducted using the genomics engine depicted in FIG. 1 that allows information on each gene to be integrated to provide a more comprehensive understanding of gene structure and function and linkage to potential products.

[0021] The species arabidopsis was used extensively in these studies for several reasons: (1) the complete genomic sequence, though poorly annotated in terms of gene recognition, was being produced and published by others and (2) genetic experiments to determine the role of the genes in planta are much quicker to complete.

[0022] The phenotypic tables, MA tables, and reference tables and sequence tables indicate the results of these analyses and thus the specific functions and characteristics that are ascribed to the genes and gene components and products.

### II. Integration of Discoveries to Provide Scientific Understanding

[0023] From the discoveries made, Applicants have deduced the biochemical activities, pathways, cellular roles, and developmental and physiological processes that can be modulated using these components. These are discussed and summarized in sections based on the gene functions characteristics from the analyses and role in determining phenotypes. These sections illustrate and emphasize that each gene, gene component or product influences biochemical activities, cells or organisms in complex ways, from which there can be many phenotypic consequences.

[0024] An illustration of how the discoveries on gene structure, function, expression and phenotypic observation can be integrated together to understand complex phenotypes is provided in FIG. 2. This sort of understanding enables conclusions to be made as to how the genes, gene components and product are useful for changing the properties of plants and other organisms. This example also illustrates how single gene changes in, for example, a metabolic pathway can cause gross phenotypic changes.

[0025] Furthermore, the development and properties of one part of plant can be interconnected with other parts. The dependence of shoot and leaf development on root cells is a classic example. Here, shoot growth and development require nutrients supplied from roots, so the protein complement of root cells can affect plant development, including flowers and seed production. Similarly, root development is dependent on the products of photosynthesis from leaves. Therefore, proteins in leaves can influence root developmental physiology and biochemistry.

[0026] Thus, the following sections describe both the functions and characteristics of the genes, gene components and products and also the multiplicity of biochemical activities, cellular functions, and the developmental and physiological processes influenced by them. The sections also describe examples of commercial products that can be realized from the inventions.

[0027] A. Analyses to Reveal Function and In Vivo Roles of Single Genes in One Plant Species

[0028] The genomics engine has focused on individual genes to reveal the multiple functions or characteristics that are associated to each gene, gene components and products of the instant invention in the living plant. For example, the biochemical activity of a protein is deduced based on its similarity to a protein of known function. In this case, the protein may be ascribed with, for example, an oxidase activity. Where and when this same protein is active can be uncovered from differential expression experiments, which show that the mRNA encoding the protein is differentially expressed in response to drought and in seeds but not roots. The gene disruption experiments reveal that absence of the same protein causes embryo lethality.

[0029] Thus, this protein is characterized as a seed protein and drought-responsive oxidase that is critical for embryo viability.

[0030] B. Analyses to Reveal Function and Roles of Single Genes in Different Species

[0031] The genomics engine has also been used to extrapolate knowledge from one species to many plant species. For example, proteins from different species, capable of performing identical or similar functions, preserve many features of amino acid sequence and structure during evolution. Complete protein sequences have been compared and contrasted within and between species to determine the functionally vital domains and signatures characteristic of each of the proteins that is the subject of this application. Thus, functions and characteristics of arabidopsis proteins have been extrapolated to proteins containing similar domains and signatures of corn, soybean, rice and wheat and by implication to all other (plant) species.

[0032] Schematic 3 provides an example. Two proteins with related structures, one from corn, a monocot, and one from arabidopsis, a dicot, have been concluded to be orthologs. The known characteristics of the arabidopsis protein (seed protein, drought responsive oxidase) can then be attributed to the corn protein.

[0033] C. Analyses Over Multiple Experiments to Reveal Gene Networks and Links Across Species

[0034] The genomics engine can identify networks or pathways of genes concerned with the same process and hence linked to the same phenotype(s). Genes specifying functions of the same pathway or developmental environmental responses are frequently co-regulated i.e. they are regulated by mechanisms that result in coincident increases or decreases for all gene members in the group. The Applicants have divided the genes of arabidopsis and maize into such co-regulated groups on the basis of their expression patterns and the function of each group has been deduced. This process has provided considerable insight into the function and role of thousands of the plant genes in diverse species included in this application.

[0035] D. Applications of Applicant's Discoveries

[0036] It will be appreciated while reading the sections that the different experimental molecular genetic approaches focused on different aspects of the pathway from gene and gene product through to the properties of tissues, organs and whole organisms growing in specific environments. For each endogenous gene, these pathways are delineated within the existing biology of the species. However, Applicants' inventions allow gene components or products to be mixed and matched to create new genes and placed in other cellular contexts and species, to exhibit new combinations of functions and characteristics not found in nature, or to enhance and modify existing ones. For instance, gene components can be used to achieve expression of a specific protein in a new cell type to introduce new biochemical activities, cellular attributes or developmental and physiological processes. Such cell-specific targeting can be achieved by combining polynucleotides encoding proteins with any one of a large array of promoters to facilitate synthesis of proteins in a selective set of plant cells. This emphasizes that each gene, component and protein can be used to cause multiple and different phenotypic effects depending on the biological context. The utilities are therefore not limited to the existing in vivo roles of the genes, gene components, and gene products.

[0037] While the genes, gene components and products disclosed herein can act alone, combinations are useful to modify or modulate different traits. Useful combinations include different polynucleotides and/or gene components or products that have (1) an effect in the same or similar developmental or biochemical pathways; (2) similar biological activities; (3) similar transcription profiles; or (4) similar physiological consequences.

[0038] Of particular interest are the transcription factors and key factors in regulatory transduction pathways, which are able to control entire pathways, segments of pathways or large groups of functionally related genes. Therefore, manipulation of such proteins, alone or in combination is especially useful for altering phenotypes or biochemical activities in plants. Because interactions exist between hormone, nutrition, and developmental pathways, combinations of genes and/or gene products from these pathways also are useful to produce more complex changes. In addition to using polynucleotides having similar transcription profiles and/or biological activities, useful combinations include polynucleotides that may exhibit different transcription profiles but which participate in common or overlapping pathways. Also, polynucleotides encoding selected enzymes can be combined in novel ways in a plant to create new metabolic pathways and hence new metabolic products.

[0039] The utilities of the various genes, gene components and products of the Application are described below in the sections entitled as follows:

### I. Organ Affecting Genes, Gene Components, Products (Including Differentiation Function)

[0040] I.A. Root Genes, Gene Components And Products
[0041] I.A.1. Root Genes, Gene Components And Products
[0042] I.A.2. Root Hair Genes, Gene Components And Products

[0043] I.B. Leaf Genes, Gene Components And Products
[0044] I.B.1. Leaf Genes, Gene Components And Products
[0045] I.B.2. Trichome Genes And Gene Components
[0046] I.B.3. Chloroplast Genes And Gene Components

[0047] I.C. Reproduction Genes, Gene Components And Products
[0048] I.C.1. Reproduction Genes, Gene Components And Products
[0049] I.C.2. Ovule Genes, Gene Components And Products
[0050] I.C.3. Seed And Fruit Development Genes, Gene Components And Products

[0051] I.D. Development Genes, Gene Components And Products
[0052] I.D.1. Imbibition and Germination Responsive Genes, Gene Components And Products
[0053] I.D.2. Early Seedling Phase Genes, Gene Components And Products
[0054] I.D.3. Size and Stature Genes, Gene Components And Products
[0055] I.D.4. Shoot-Apical Meristem Genes, Gene Components And Products
[0056] I.D.5. Vegetative-Phase Specific Responsive Genes, Gene Components And Products

### II. Hormones Responsive Genes, Gene Components And Products

[0057] II.A. Abscissic Acid Responsive Genes, Gene Components And Products

[0058] II.B. Auxin Responsive Genes, Gene Components And Products

[0059] II.C. Brassinosteroid Responsive Genes, Gene Components And Products

[0060] II.D. Cytokinin Responsive Genes, Gene Components And Products

[0061] II.E. Gibberellic Acid Responsive Genes, Gene Components And Products

### III. Metabolism Affecting Genes, Gene Components And Products

[0062] III.A. Nitrogen Responsive Genes, Gene Components And Products

[0063] III.B. Circadian Rhythm Responsive Genes, Gene Components And Products

[0064] III.C. Blue Light (Phototropism) Responsive Genes, Gene Components And Products

[0065] III.D. Co2 Responsive Genes, Gene Components And Products

[0066] III.E. Mitochondria Electron Transport Genes, Gene Components And Products

[0067] III.F. Protein Degradation Genes, Gene Components And Products

[0068] III.G. Carotenogenesis Responsive Genes, Gene Components And Products

### IV. Viability Genes, Gene Components And Products

[0069] IV.A. Viability Genes, Gene Components And Products

[0070] IV.B. Histone Deacetylase (Axel) Responsive Genes, Gene Components And Products

### V. Stress Responsive Genes, Gene Components And Products

[0071] V.A. Cold Responsive Genes, Gene Components And Products

[0072] V.B. Heat Responsive Genes, Gene Components And Products

[0073] V.C. Drought Responsive Genes, Gene Components And Products

[0074] V.D. Wounding Responsive Genes, Gene Components And Products

[0075] V.E. Methyl Jasmonate Responsive Genes, Gene Components And Products

[0076] V.F. Reactive Oxygen Responsive Genes, Gene Components And H2O2 Products

[0077] V.G. Salicylic Acid Responsive Genes, Gene Components And Products

[0078] V.H. Nitric Oxide Responsive Genes, Gene Components And Products

[0079] V.I. Osmotic Stress Responsive Genes, Gene Components And Products

[0080] V.J. Aluminum Responsive Genes, Gene Components And Products

[0081] V.K. Cadmium Responsive Genes, Gene Components And Products

[0082] V.L. Disease Responsive Genes, Gene Components And Products

[0083] V.M. Defense Responsive Genes, Gene Components And Products

[0084] V.N. Iron Responsive Genes, Gene Components And Products

[0085] V.O. Shade Responsive Genes, Gene Components And Products

[0086] V.P. Sulfur Responsive Genes, Gene Components And Products

[0087] V.Q. Zinc Responsive Genes, Gene Components And Products

### VI. Enhanced Foods

### VII. Pharmaceutical Products

### VIII. Precursors Of Industrial Scale Compounds

### IX. Promoters As Sentinels

### SUMMARY OF THE INVENTION

[0088] The present invention comprises polynucleotides, such as complete cDNA sequences and/or sequences of genomic DNA encompassing complete genes, fragments of genes, and/or regulatory elements of genes and/or regions with other functions and/or intergenic regions, hereinafter collectively referred to as Sequence-Determined DNA Fragments (SDFs) or sometimes collectively referred to as “genes or gene components”, or sometimes as “genes, gene components or products”, from different plant species, particularly corn, wheat, soybean, rice and Arabidopsis thaliana, and other plants and or mutants, variants, fragments or fusions of said SDFs and polypeptides or proteins derived therefrom. In some instances, the SDFs span the entirety of a protein-coding segment. In some instances, the entirety of an mRNA is represented. Other objects of the invention that are also represented by SDFs of the invention are control sequences, such as, but not limited to, promoters. Complements of any sequence of the invention are also considered part of the invention.

[0089] Other objects of the invention are polynucleotides comprising exon sequences, polynucleotides comprising intron sequences, polynucleotides comprising introns together with exons, intron/exon junction sequences, 5′ untranslated sequences, and 3′ untranslated sequences of the SDFs of the present invention. Polynucleotides representing the joinder of any exons described herein, in any arrangement, for example, to produce a sequence encoding any desirable amino acid sequence are within the scope of the invention.

[0090] The present invention also resides in probes useful for isolating and identifying nucleic acids that hybridize to an SDF of the invention. The probes can be of any length, but more typically are 12-2000 nucleotides in length; more typically, 15 to 200 nucleotides long; even more typically, 18 to 100 nucleotides long.

[0091] Yet another object of the invention is a method of isolating and/or identifying nucleic acids using the following steps:

[0092] (a) contacting a probe of the instant invention with a polynucleotide sample under conditions that permit hybridization and formation of a polynucleotide duplex; and

[0093] (b) detecting and/or isolating the duplex of step (a).

[0094] The conditions for hybridization can be from low to moderate to high stringency conditions. The sample can include a polynucleotide having a sequence unique in a plant genome. Probes and methods of the invention are useful, for example, without limitation, for mapping of genetic traits and/or for positional cloning of a desired fragment of genomic DNA.

[0095] Probes and methods of the invention can also be used for detecting alternatively spliced messages within a species. Probes and methods of the invention can further be used to detect or isolate related genes in other plant species using genomic DNA (gDNA) and/or cDNA libraries. In some instances, especially when longer probes and low to moderate stringency hybridization conditions are used, the probe will hybridize to a plurality of cDNA and/or gDNA sequences of a plant. This approach is useful for isolating representatives of gene families which are identifiable by possession of a common functional domain in the gene product or which have common cis-acting regulatory sequences. This approach is also useful for identifying orthologous genes from other organisms.

[0096] The present invention also resides in constructs for modulating the expression of the genes comprised of all or a fragment of an SDF. The constructs comprise all or a fragment of the expressed SDF, or of a complementary sequence. Examples of constructs include ribozymes comprising RNA encoded by an SDF or by a sequence complementary thereto, antisense constructs, constructs comprising coding regions or parts thereof, constructs comprising promoters, introns, untranslated regions, scaffold attachment regions, methylating regions, enhancing or reducing regions, DNA and chromatin conformation modifying sequences, etc. Such constructs can be constructed using viral, plasmid, bacterial artificial chromosomes (BACs), plasmid artificial chromosomes (PACs), autonomous plant plasmids, plant artificial chromosomes or other types of vectors and exist in the plant as autonomous replicating sequences or as DNA integrated into the genome. When inserted into a host cell the construct is, preferably, functionally integrated with, or operatively linked to, a heterologous polynucleotide. For instance, a coding region from an SDF might be operably linked to a promoter that is functional in a plant.

[0097] The present invention also resides in host cells, including bacterial or yeast cells or plant cells, and plants that harbor constructs such as described above. Another aspect of the invention relates to methods for modulating expression of specific genes in plants by expression of the coding sequence of the constructs, by regulation of expression of one or more endogenous genes in a plant or by suppression of expression of the polynucleotides of the invention in a plant. Methods of modulation of gene expression include without limitation (1) inserting into a host cell additional copies of a polynucleotide comprising a coding sequence; (2) modulating an endogenous promoter in a host cell; (3) inserting antisense or ribozyme constructs into a host cell and (4) inserting into a host cell a polynucleotide comprising a sequence encoding a variant, fragment, or fusion of the native polypeptides of the instant invention.

### DETAILED DESCRIPTION OF THE INVENTION

### I. Description of the Tables

[0098] As noted above, the Applicants have obtained and analyzed an extensive amount of information on a large number of genes by use of the Ceres Genomic Engine to determine. This information can be categorized into three basic types:

[0099] A. Sequence Information for the Inventions

[0100] B. Transcriptional Information for the Inventions

[0101] C. Phenotypic Information for the Inventions

[0102] I.A. Sequence Information

[0103] To harness the potential of the plant genome, Applicants began by elucidating a large number gene sequences, including the sequences of gene components and products, and analyzing the data. The list of sequences and associated data are presented in the Reference and Sequence Tables of the present application (sometimes referred to as the “REF” and “SEQ” Tables). The Reference and Sequence tables include:
[0104] cDNA sequence;
[0105] coding sequence;
[0106] 5′ & 3′ UTR;
[0107] transcription start sites;
[0108] exon and intron boundaries in genomic sequence; and
[0109] protein sequence.

[0110] The Reference and Sequence Tables also include computer-based, comparative analyses between the protein sequences of the invention and sequences with known function. Proteins with similar sequences typically exhibit similar biochemical activities. The Reference table notes:
[0111] sequences of known function that are similar to the Applicants' proteins; and
[0112] biochemical activity that is associated with Applicants' proteins.

[0113] Also, by analyzing the protein sequences, Applicants were able to group the protein sequences into groups, wherein all the sequences in the group contain a signature sequence. The groups are presented in the Protein Group Table. The signature sequences are reported in the Protein Group Table. More detailed analyses of the signature sequences are shown in the Protein Group Matrix Table.

[0114] To identify gene components and products, Applicants took a cDNA/coding sequence approach. That is, Applicants initiated their studies either by isolating cDNAs and determining their sequences experimentally, or by identifying the coding sequence from genomic sequence with the aid of predictive algorithms. The cDNA sequences and coding sequences also are referred to as “Maximum Length Sequences” in the Reference tables. The cDNA and coding sequences were given this designation to indicate these were the maximum length of coding sequences identified by Applicants.

[0115] Due to this cDNA/coding sequence focus of the present application, the Reference and Sequence Tables were organized around cDNA and coding sequences. Each of these Maximum Length Sequences was assigned a unique identifier: Ceres Sequence ID NO, which is reported in the Tables.

[0116] All data that relate to these Maximum Length Sequences are grouped together, including 5′ & 3′ UTRs; transcription start sites; exon and intron boundaries in genomic sequence; protein sequence, etc.

[0117] Below, a more detailed explanation of the organization of the Reference and Sequence Tables and how the data in the tables were generated is provided.

[0118] a. cDNA

[0119] Applicants have ascertained the sequences of mRNAs from different organisms by reverse transcription of mRNA to DNA, which was cloned and then sequenced. These complementary DNA or cDNA sequences also are referred to as Maximum Length Sequences in the Reference Tables, which contain details on each of the sequences in the Sequence Tables.

[0120] Each sequence was assigned a Pat. Appln. Sequence ID NO: and an internal Ceres Sequence ID NO: as reported in the Reference Table, the section labeled “(Ac) cDNA Sequence.” An example is shown below:

[0121] Max Len. Seq.:

[0122] (Ac) cDNA Sequence
[0123] Pat. Appln. Sequence ID NO: 174538
[0124] Ceres Sequence ID NO: 5673127

[0125] Both numbers are included in the Sequence Table to aid in tracking of information, as shown below:

<210> 174538 (Pat. Appln. Sequence ID NO:)
<211> 1846
<212> DNA (genomic)
<213> Arabidopsis thaliana
<220>
<221> misc feature
<222> (1)..(1846)
<223> Ceres Seq. ID no. 5673127
<220>
<221> misc_feature
<222> ( )..( )
<223> n is a, c, t, g, unknown, or other
<400> 174538
acaagaacaa caaaacagag gaagaagaag aagaagatga
agcttctggc tctgtttcca 60
tttctagcga tcgtgatcca actcagctgt... etc.

[0126] The Sequence and Reference Tables are divided into sections by organism: Arabidopsis thaliana, Brassica napus, Glycine max, Zea mays, Triticum aestivum; and Oryza sativa.

[0127] b. Coding Sequence

[0128] The coding sequence portion of the cDNA was identified by using computer-based algorithms and comparative biology. The sequence of each coding sequence of the cDNA is reported in the “PolyP Sequence” section of the Reference Tables, which are also divided into sections by organism. An example shown below for the peptides that relate to the cDNA sequence above

### PolyP Sequence

[0129] Pat. Appln. Sequence ID NO 174539
[0130] Ceres Sequence ID NO 5673128
[0131] Loc. Sequence ID NO 174538: @ 1 nt.
[0132] Loc. Sig. P. Sequence ID NO 174539: @ 37 aa.
   The polypeptide sequence can be found in the Sequence Tables by either the Pat. Appln. Sequence ID NO or by the Ceres Sequence ID NO: as shown below:

<210> 174539 (Pat. Appln. Sequence ID NO)
<211> 443
<212> PRT
<213> Arabidopsis thaliana
<220>
<221> peptide
<222> (1)..(443)
<223> Ceres Seq. ID no. 5673128
<220>
<221> misc feature
<222> ( )..( )
<223> xaa is any aa, unknown or other
<400> 174539
Thr Arg Thr Thr Lys Gln Arg Lys Lys Lys Lys Lys
1 5 10 15
Met Lys Leu Leu Ala Leu Phe Pro Phe
25
Leu Ala Ile... etc.

[0133] The PolyP section also indicates where the coding region begins in the Maximum Length Sequence. More than one coding region may be indicated for a single polypeptide due to multiple potential translation start codons. Coding sequences were identified also by analyzing genomic sequence by predictive algorithms, without the actual cloning of a cDNA molecule from a mRNA. By default, the cDNA sequence was considered the same as the coding sequence, when Maximum Length Sequence was spliced together from a genomic annotation.

[0134] c. 5′ and 3′ UTR

[0135] The 5′ UTR can be identified as any sequence 5′ of the initiating codon of the coding sequence in the cDNA sequence. Similarly, the 3′ UTR is any sequence 3′ of the terminating codon of the coding sequence.

[0136] d. Transcription Start Sites

[0137] Applicants cloned a number of cDNAs that encompassed the same coding sequence but comprised 5′ UTRs of different lengths. These different lengths revealed the multiple transcription start sites of the gene that corresponded to the cDNA. These multiple transcription start sites are reported in the “Sequence # w. TSS” section” of the Reference Tables.

[0138] e. Exons & Introns

[0139] Alignment of the cDNA sequences and coding portions to genomic sequence permitted Applicants to pinpoint the exon/intron boundaries. These boundaries are identified in the Reference Table under the “Pub gDNA” section. That section reports the gi number of the public BAC sequence that contains the introns and exons of interest. An example is shown below:

[0140] Max Len. Seq.:

[0141] Pub gDNA:
[0142] gi No: 1000000005
[0143] Gen. seq. in cDNA:
   [0144] 115777 . . . 115448 by Method #1
   [0145] 115105 . . . 114911 by Method #1
   [0146] 114822 . . . 114700 by Method #1
   [0147] 114588 . . . 114386 by Method #1
   [0148] 114295 . . . 113851 by Method #1
   [0149] 115777 . . . 115448 by Method #2
   [0150] 115105 . . . 114911 by Method #2
   [0151] 114822 . . . 114700 by Method #2
   [0152] 114588 . . . 114386 by Method #2
   [0153] 114295 . . . 113851 by Method #2
   [0154] 115813 . . . 115448 by Method #3
   [0155] 115105 . . . 114911 by Method #3
   [0156] 114822 . . . 114700 by Method #3
   [0157] 114588 . . . 114386 by Method #3
   [0158] 114295 . . . 113337 by Method #3

[0159] (Ac) cDNA Sequence

[0160] All the gi numbers were assigned by Genbank to track the public genomic sequences except:

[0161] gi 1000000001

[0162] gi 1000000002

[0163] gi 1000000003

[0164] gi 1000000004; and

[0165] gi 1000000005.

[0166] These gi numbers were assigned by Applicants to the five Arabidopsis chromosome sequences that were published by the Institute of Genome Research (TIGR). Gi 1000000001 corresponds to chromosome 1, Gi 1000000002 to chromosome 2, etc.

[0167] The method of annotation is indicated as well as any similar public annotations.

[0168] f. Promoters & Terminators

[0169] Promoter sequences are 5′ of the translational start site in a gene; more typically, 5′ of the transcriptional start site or sites. Terminator sequences are 3′ of the translational terminator codon; more typically, 3′ of the end of the 3′ UTR.

[0170] For even more specifics of the Reference and Sequence Tables, see the section below titled “Brief Description of the Tables.”

[0171] I.B. Transcriptional (Differential Expression) Information—Introduction to Differential Expression Data & Analyses

[0172] A major way that a cell controls its response to internal or external stimuli is by regulating the rate of transcription of specific genes. For example, the differentiation of cells during organogenensis into forms characteristic of the organ is associated with the selective activation and repression of large numbers of genes. Thus, specific organs, tissues and cells are functionally distinct due to the different populations of mRNAs and protein products they possess. Internal signals program the selective activation and repression programs. For example, internally synthesized hormones produce such signals. The level of hormone can be raised by increasing the level of transcription of genes encoding proteins concerned with hormone synthesis.

[0173] To measure how a cell reacts to internal and/or external stimuli, individual mRNA levels can be measured and used as an indicator for the extent of transcription of the gene. Cells can be exposed to a stimulus, and mRNA can be isolated and assayed at different time points after stimulation. The mRNA from the stimulated cells can be compared to control cells that were not stimulated. The mRNA levels of particular Maximum Length Sequences that are higher in the stimulated cell versus the control indicate a stimulus-specific response of the cell. The same is true of mRNA levels that are lower in stimulated cells versus the control condition. Similar studies can be performed with cells taken from an organism with a defined mutation in their genome as compared with cells without the mutation. Altered mRNA levels in the mutated cells indicate how the mutation causes transcriptional changes. These transcriptional changes are associated with the phenotype that the mutated cells exhibit that is different from the phenotype exhibited by the control cells.

[0174] Applicants have utilized microarray techniques to measure the levels of mRNAs in cells from mutant plants, stimulated plants, and/or selected from specific organs. The differential expression of various genes in the samples versus controls are listed in the MA_diff Tables. Applicants have analyzed the differential data to identify genes whose mRNA transcription levels are positively correlated. From these analyses, Applicants were able to group different genes together whose transcription patterns are correlated. The results of the analyses are reported in the MA_clust Tables.

[0175] a. Experimental Detail

[0176] A microarray is a small solid support, usually the size of a microscope slide, onto which a number of polynucleotides have been spotted onto or synthesized in distinct positions on the slide (also referred to as a chip). Typically, the polynucleotides are spotted in a grid formation. The polynucleotides can either be Maximum Length Sequences or shorter synthetic oligonucleotides, whose sequence is complementary to specific Maximum Length Sequence entities. A typical chip format is as follows:

| | | |
|---|---|---|
| Oligo #1 | Oligo #2 | Oligo #3 |
| Oligo #4 | Oligo #5 | Oligo #6 |
| Oligo #7 | Oligo #8 | Oligo #9 |

[0177] For Applicants' experiments, samples were hybridized to the chips using the “two-color” microarray procedure. A fluorescent dye was used to label cDNA reverse-transcribed from mRNA isolated from cells that had been stimulated, mutated, or collected from a specific organ or developmental stage. A second fluorescent dye of another color was used to label cDNA prepared from control cells.

[0178] The two differentially-labeled cDNAs were mixed together. Microarray chips were incubated with this mixture. For Applicants' experiments the two dyes that are used are Cy3, which fluoresces in the red color range, and Cy5, which fluoresces in the green/blue color range. Thus, if:

[0179] cDNA#1 binds to Oligo #1;

[0180] cDNA#1 from the sample is labeled red;

[0181] cDNA#1 from the control is labeled green, and

[0182] cDNA#1 is in both the sample and control,

then cDNA#1 from both the sample and control will bind to Oligo#1 on the chip. If the sample has 10 times more cDNA#1 than the control, then 10 times more of the cDNA#1 would be hybridized to Oligo#1. Thus, the spot on the chip with Oligo#1 spot would look red.

| | | |
|---|---|---|
| | Oligo #2 | Oligo #3 |
| Oligo #4 | Oligo #5 | Oligo #6 |
| Oligo #7 | Oligo #8 | Oligo #9 |

If the situation were reversed, the spot would appear green. If the sample has approximately the same amount of cDNA#1 as the control, then the Oligo#1 spot on the chip would look yellow. These color differentials are measured quantitatively and used to deduce the relative concentration of mRNAs from individual genes in particular samples.

[0183] b. MA_Diff Data Table

[0184] To generate data, Applicants labeled and hybridized the sample and control mRNA in duplicate experiments. One chip was exposed to a mixture of cDNAs from both a sample and control, where the sample cDNA was labeled with Cy3, and the control was labeled with Cy5 dye. For the second labeling and chip hybridization experiments, the fluorescent labels were reversed; that is, the Cy5 dye for the sample, and the Cy3 dye for the control.

[0185] Whether Cy5 or Cy3 was used to label the sample, the fluorescence produced by the sample was divided by the fluorescence of the control. A cDNA was determined to be differentially expressed in response to the stimulus in question if a statistically-significantly ration difference in the sample versus the control was measured by both chip hybridization experiments.

[0186] The MA_diff tables show which cDNA were significantly up-regulated as designated by a “+” and which were significantly down-regulated as designated by a “−” for each pair of chips using the same sample and control.

[0187] I.C. Phenotypic Information

[0188] One means of determining the phenotypic effect of a gene is either to insert extra active copies of the gene or coding sequence, or to disrupt an existing copy of the gene in a cell or organism and measure the effects of the genetic change on one or more phenotypic characters or traits. “Knock-in” is used herein to refer to insertion of additional active copies of a gene or coding sequence. “Knock-out” refers to a plant where an endogenous gene(s) is disrupted. Applicants have used both methods of addition or disruption to determine the phenotypic effects of gene or gene components or products, and have thereby discovered the function of the genes and their utilities.

[0189] 1. Knock-In Results

[0190] The coding sequence of a desired protein can be functionally linked to a heterologous promoter to facilitate expression. Here, Applicants have operably linked a number of coding sequences to either one of the promoters listed below:

| | Specific Promoter | Plant Line |
|---|---|---|
| GFP Pattern | activity | Descriptor |
| Root epidermis/mostly toward the lower | Specific to the root basal | Root basal |
| region of root (more intense than CS9094) | region. | |
| Root-endodermis/cortex (initials sharp); | Specific to the root | Root/Petiole/Flowers |
| shoot-mesophyll of one leaf, sharp guard cell | endodermis-cortex | |
| marking. New leaf petioles near tip of | region, leaf petiole, and | |
| primary inflorescence; floral stems; in | flowers. | |
| flowers at base of sepal, anther stems, and | | |
| pistil | | |
| Broad root exp. (some dermal, some cortical, | Specific to root and stem. | Root/Stem1 |
| some vascular); shoot apex. Faintly in | | |
| petiole; stem | | |
| High expression in stem, excluded from 1st | Specific to stem and root. | Root/Stem2 |
| true leaves/High in root. Faint expression in | | |
| stem | | |
| Shoot meristem/whole root region; little bit | Specific to roots, shoot | Root/Stem/Leaves/Flowers |
| on cotyledons. Base of leaves(axillary | meristem, base of leaves | |
| meristem?); base of sepals; inflorescence | and flowers. | |
| meristem; small amount in unfertilized pistil. | | |
| root tip vascular initials; vascular system | Specific to vascular | Vascular/Ovule/Young |
| throughout plant; Bud petal vasculature and | systems. | Seed/Embryo |
| pistil septum; Flower petal vascualture; | | |
| Flower pistil septum; Pre fertilization ovules; | | |
| Post fertilization ovule at chalazal end; | | |
| Developing seed (young, maturing siliques); | | |
| Seed coat and young embryos. GFP not | | |
| observed in mature embryos. | | |
| Flower, sepal/vascular tissue of root, stem, | Specific to flowers, seed | Flowers/Seed/Vasculature/ |
| and cotyledons. Stems of new flowers; | and vasculature. | Embryo |
| vasculature or petals, anthers, sepals, and | | |
| pistil/silique; Vasculature throughtout | | |
| seedling: root, hypocotyl, petioles, stem, | | |
| cotyledons, first true leaves; Rosette | | |
| vasculature; Cauline leaf vasculature; Bud | | |
| pedicel vasculature; Flower vasculature: | | |
| (sepals, petals, filaments, pistil); Bud | | |
| vasculature (sepal, petal, filament, pistil); | | |
| Funiculus in both flower and bud; Some | | |
| possible seed coat expression; Silique | | |
| funiculus; Very faint fluorescence in mature | | |
| embryo (auto fluorescence perhaps); | | |
| Root expression - primarily in cortex (upper | Specific to root. | Roots2 |
| refion of the root). No shoot expression | | |
| Root expression - less intense in whole root | Specific to root and shoot | Root/SAM |
| of young seedling. Shoot apical meristem; | apical meristem. | |
| organ primordia in SAM region. | | |
| Root epidermis/tip; shoot epidermis/vascular; | Specific to seed and to | Seed/Epidermis/Ovary/ |
| leaf epidermis; expression in developing | epidermal layers of roots, | Fruit |
| seed/ovule - mature embryo; Primary and | shoots and leaves. | |
| lateral root cortex; Very strong in root cap; | | |
| Base of flower bud and epidermis of carpels; | | |
| Base of flower, epidermis of filaments, | | |
| epidermis of carpels; Trichomes; Weak | | |
| (hardly detectable) gfp expression in | | |
| vasculature throughout seedling; Strong | | |
| expression in trichomes; POST-fertilization | | |
| SEED only; GFP strength increases as | | |
| silique matures; Weak at suspensor end of | | |
| the embryo; GFP observed in seed coat; Root | | |
| and post fertilization seed specific gfp | | |
| expression; Expression in seed coat. | | |
| Young root dermis; dermal/cortical?/vascular | Specific to roots, shoots, | Roots/Shoots/Ovule |
| in older root; general (epidermal?) shoot | and ovules. | |
| expression; ovules. some in sepals; | | |
| vasculature of stem | | |
| Vascular tissue of root; Meristem tissues: | Specific to root structural | Vasculature/Meristem |
| axillary meristems, floral meristems, base of | leaf vascular region and | |
| flowers/sepals; Weak expression in | to floral buds and axillary | |
| hypocotyl, petiole and cotyledon | meristem | |
| vasculature.. | | |

[0191] The chimeric constructs were transformed into Arabidopsis thaliana. The resulting transformed lines were screened to determine what phenotypes were changed due to introduced transgene. The phenotype changes, relative to the control, are reported in the Knock-in tables.

[0192] 2. Knock-Out Results

[0193] Knock-out plants in Arabidopsis thaliana were created by inserting a polynucleotide tag into the genome. The location of the tag was identified using primers to the tag sequence and isolation of the plant genomic sequence that flanks the tag using a variation of the polymerase chain reaction. The plants were generated using the procedure described in Feldmann et al., (1987) Molec. Gen. Genet. 208: 1-9; Feldmann (1991) Plant Journal, 1:71-83 and Forsthoefel et al., (1992) Aust. J. Plant Physiol. 19:353-366. On average, the population of plants that was screened had ˜1.5 to 2 tags. Generally, the number of tags ranged from 1 to greater than 5.

[0194] The polynucleotide tags were classified as either incorporated within a gene, or between two genes. The data in the Knock-out Table indicates which plants have a tag(s) causing a disruption in a gene, or a disruption between genes.

[0195] a. Disruption in a Gene

[0196] For the sake of this analysis, the tag was considered to be causing a disruption in a gene when the tag was located:

[0197] 1) less than 501 upstream of the transcriptional start site;

[0198] 2) less than 701 upstream of the translational initiation codon;

[0199] 3) between the translational initiation and termination codons of the gene,

[0200] 4) less than 301 downstream of the translational stop codon; or

[0201] 5) less than 151 downstream of a transcriptional termination site.

[0202] By this definition, a tag can be inserted in two genes. For example, if two genes have only 700 nucleotides between the translational termination codon of one gene and the translational initiation codon of the other gene, the tag can be inserted into the terminator of one gene and the promoter of the other gene according to the definition above.

[0203] Genomic annotations by the method OCKHAM-OCDNA identify the transcriptional start and stop site of a gene.

[0204] b. Disruption Between Genes

[0205] When a tag causes a disruption between two genes, either or both genes can be affected. Typically, a tag can affect a gene if it disrupts the genome at a location 3000 nt downstream to the start codon of a gene. More typically, insertions found 1000-2000 nt upstream (5′), or 750-1000 nt downstream (3′) could be expected to disrupt expression.

[0206] c. More than One Insert

[0207] A plant can have multiple tags. If a mutant phenotype is observed, then it can be attributed to any one or all of the tags.

[0208] I.D. Brief Description of the Figures and Individual Tables

### Figures

[0209] 1. FIG. 1 illustrates the Genomics Engine used by Applicants and depicts how gene sequences were determined using five different types of technologies.

[0210] 2. FIG. 2 illustrates how genes are activated by internal stimuli and protein is produced from them.

[0211] 3. FIG. 3 illustrates the integration of data across species to link gene products and phenotypes.

[0212] 4. FIG. 4 illustrates the regions found in a typical MLS.

[0213] 5. FIG. 5 is a graph illustrating how the genes, gene components and products were classified as either early or late responders following a specific treatment.

[0214] 6. FIG. 6 shows expression pattern of a cell wall synthesis gene, cDNAID 1595707, during fruit development.

[0215] 7. FIG. 7 shows the different regions of a typical gene.

### Tables

### 1. Reference and Sequence Tables

[0216] The sequences of exemplary SDFs and polypeptides corresponding to the coding sequences of the instant invention are described in the Reference and Sequence Tables (sometimes referred to as the REF and SEQ Tables. The Reference Table refers to a number of “Maximum Length Sequences” or “MLS.” Each MLS corresponds to the longest cDNA obtained, either by cloning or by the prediction from genomic sequence. The sequence of the MLS is the cDNA sequence as described in the Av subsection of the Reference Table.

[0217] The Reference Table includes the following information relating to each MLS:

| | |
|---|---|
| I. | cDNA Sequence |

| | |
|---|---|
| A. | 5′ UTR |
| B. | Coding Sequence |
| C. | 3′ UTR |

| | |
|---|---|
| II. | Genomic Sequence |

| | |
|---|---|
| A. | Exons |
| B. | Introns |
| C. | Promoters |

| | |
|---|---|
| III. | Link of cDNA Sequences to Clone IDs |
| IV. | Multiple Transcription Start Sites |
| V. | Polypeptide Sequences |

| | |
|---|---|
| A. | Signal Peptide |
| B. | Domains |
| C. | Related Polypeptides |

| | |
|---|---|
| VI. | Related Polynucleotide Sequences |

[0218] I. cDNA Sequence

[0219] The Reference Table indicates which sequence in the Sequence Table represents the sequence of each MLS. The MLS sequence can comprise 5′ and 3′ UTR as well as coding sequences. In addition, specific cDNA clone numbers also are included in the Reference Table when the MLS sequence relates to a specific cDNA clone.

[0220] A. 5′ UTR

[0221] The location of the 5′ UTR can be determined by comparing the most 5′ MLS sequence with the corresponding genomic sequence as indicated in the Reference Table. The sequence that matches, beginning at any of the transcriptional start sites and ending at the last nucleotide before any of the translational start sites corresponds to the 5′ UTR.

[0222] B. Coding Region

[0223] The coding region is the sequence in any open reading frame found in the MLS. Coding regions of interest are indicated in the PolyP SEQ subsection of the Reference Table.

[0224] C. 3′ UTR

[0225] The location of the 3′ UTR can be determined by comparing the most 3′ MLS sequence with the corresponding genomic sequence as indicated in the Reference Table. The sequence that matches, beginning at the translational stop site and ending at the last nucleotide of the MLS corresponds to the 3′ UTR.

[0226] II. Genomic Sequence

[0227] Further, the Reference Table indicates the specific “gi” number of the genomic sequence if the sequence resides in a public databank. For each genomic sequence, Reference tables indicate which regions are included in the MLS. These regions can include the 5′ and 3′ UTRs as well as the coding sequence of the MLS. See, for example, the scheme depicted in FIG. 4.

[0228] The Reference Table reports the first and last base of each region that are included in an MLS sequence. An example is shown below:

[0229] gi No. 47000:

[0230] 37102 . . . 37497

[0231] 37593 . . . 37925

[0232] The numbers indicate that the MLS contains the following sequences from two regions of gi No. 47000; a first region including bases 37102-37497, and a second region including bases 37593-37925.

[0233] A. Exon Sequences

[0234] The location of the exons can be determined by comparing the sequence of the regions from the genomic sequences with the corresponding MLS sequence as indicated by the Reference Table.

[0235] i. Initial Exon

[0236] To determine the location of the initial exon, information from the

[0237] (1) polypeptide sequence section;

[0238] (2) cDNA polynucleotide section; and

[0239] (3) the genomic sequence section

[0240] of the Reference Table is used. First, the polypeptide section will indicate where the translational start site is located in the MLS sequence. The MLS sequence can be matched to the genomic sequence that corresponds to the MLS. Based on the match between the MLS and corresponding genomic sequences, the location of the translational start site can be determined in one of the regions of the genomic sequence. The location of this translational start site is the start of the first exon.

[0241] Generally, the last base of the exon of the corresponding genomic region, in which the translational start site was located, will represent the end of the initial exon. In some cases, the initial exon will end with a stop codon, when the initial exon is the only exon.

[0242] In the case when sequences representing the MLS are in the positive strand of the corresponding genomic sequence, the last base will be a larger number than the first base. When the sequences representing the MLS are in the negative strand of the corresponding genomic sequence, then the last base will be a smaller number than the first base.

[0243] ii. Internal Exons

[0244] Except for the regions that comprise the 5′ and 3′ UTRs, initial exon, and terminal exon, the remaining genomic regions that match the MLS sequence are the internal exons. Specifically, the bases defining the boundaries of the remaining regions also define the intron/exon junctions of the internal exons.

[0245] iii. Terminal Exon

[0246] As with the initial exon, the location of the terminal exon is determined with information from the

[0247] (1) polypeptide sequence section;

[0248] (2) cDNA polynucleotide section; and

[0249] (3) the genomic sequence section

[0250] of the Reference Table. The polypeptide section will indicate where the stop codon is located in the MLS sequence. The MLS sequence can be matched to the corresponding genomic sequence. Based on the match between MLS and corresponding genomic sequences, the location of the stop codon can be determined in one of the regions of the genomic sequence. The location of this stop codon is the end of the terminal exon. Generally, the first base of the exon of the corresponding genomic region that matches the cDNA sequence, in which the stop codon was located, will represent the beginning of the terminal exon. In some cases, the translational start site will represent the start of the terminal exon, which will be the only exon.

[0251] In the case when the MLS sequences are in the positive strand of the corresponding genomic sequence, the last base will be a larger number than the first base. When the MLS sequences are in the negative strand of the corresponding genomic sequence, then the last base will be a smaller number than the first base.

[0252] B. Intron Sequences

[0253] In addition, the introns corresponding to the MLS are defined by identifying the genomic sequence located between the regions where the genomic sequence comprises exons. Thus, introns are defined as starting one base downstream of a genomic region comprising an exon, and end one base upstream from a genomic region comprising an exon.

[0254] C. Promoter Sequences

[0255] As indicated below, promoter sequences corresponding to the MLS are defined as sequences upstream of the first exon; more usually, as sequences upstream of the first of multiple transcription start sites; even more usually as sequences about 2,000 nucleotides upstream of the first of multiple transcription start sites.

[0256] III. Link of cDNA Sequences to Clone IDs

[0257] As noted above, the Reference Table identifies the cDNA clone(s) that relate to each MLS. The MLS sequence can be longer than the sequences included in the cDNA clones. In such a case, the Reference Table indicates the region of the MLS that is included in the clone. If either the 5′ or 3′ termini of the cDNA clone sequence is the same as the MLS sequence, no mention will be made.

[0258] IV. Multiple Transcription Start Sites

[0259] Initiation of transcription can occur at a number of sites of the gene. The Reference Table indicates the possible multiple transcription sites for each gene. In the Reference Table, the location of the transcription start sites can be either a positive or negative number.

[0260] The positions indicated by positive numbers refer to the transcription start sites as located in the MLS sequence. The negative numbers indicate the transcription start site within the genomic sequence that corresponds to the MLS.

[0261] To determine the location of the transcription start sites with the negative numbers, the MLS sequence is aligned with the corresponding genomic sequence. In the instances when a public genomic sequence is referenced, the relevant corresponding genomic sequence can be found by direct reference to the nucleotide sequence indicated by the “gi” number shown in the public genomic DNA section of the Reference Table. When the position is a negative number, the transcription start site is located in the corresponding genomic sequence upstream of the base that matches the beginning of the MLS sequence in the alignment. The negative number is relative to the first base of the MLS sequence which matches the genomic sequence corresponding to the relevant “gi” number.

[0262] In the instances when no public genomic DNA is referenced, the relevant nucleotide sequence for alignment is the nucleotide sequence associated with the amino acid sequence designated by “gi” number of the later PolyP SEQ subsection.

[0263] V. Polypeptide Sequences

[0264] The PolyP SEQ subsection lists SEQ ID NOs and Ceres SEQ ID NO for polypeptide sequences corresponding to the coding sequence of the MLS sequence and the location of the translational start site with the coding sequence of the MLS sequence.

[0265] The MLS sequence can have multiple translational start sites and can be capable of producing more than one polypeptide sequence.

[0266] A. Signal Peptide

[0267] The Reference tables also indicate in subsection (B) the cleavage site of the putative signal peptide of the polypeptide corresponding to the coding sequence of the MLS sequence. Typically, signal peptide coding sequences comprise a sequence encoding the first residue of the polypeptide to the cleavage site residue.

[0268] B. Domains

[0269] Subsection (C) provides information regarding identified domains (where present) within the polypeptide and (where present) a name for the polypeptide domain.

[0270] C. Related Polypeptides

[0271] Subsection (Dp) provides (where present) information concerning amino acid sequences that are found to be related and have some percentage of sequence identity to the polypeptide sequences of the Reference and Sequence Tables. These related sequences are identified by a “gi” number.

[0272] VI. Related Polynucleotide Sequences

[0273] Subsection (Dn) provides polynucleotide sequences (where present) that are related to and have some percentage of sequence identity to the MLS or corresponding genomic sequence.

| Abbreviation | Description |
|---|---|
| Max Len. Seq. | Maximum Length Sequence |
| rel to | Related to |
| Clone Ids | Clone ID numbers |
| Pub gDNA | Public Genomic DNA |
| gi No. | gi number |
| Gen. Seq. in Cdna | Genomic Sequence in cDNA |
| | (Each region for a single gene prediction is |
| | listed on a separate line. |
| | In the case of multiple gene predictions, the |
| | group of regions relating to a single prediction |
| | are separated by a blank line) |
| (Ac) cDNA SEQ | cDNA sequence |
| Pat. Appln. SEQ ID NO | Patent Application SEQ ID NO: |
| Ceres SEQ ID | Ceres SEQ ID NO: |
| NO: 1673877 | |
| SEQ # w. TSS | Location within the cDNA sequence, SEQ ID |
| | NO:, of Transcription Start Sites which are |
| | listed below |
| Clone ID #: # -> # | Clone ID comprises bases # to # of the cDNA |
| | Sequence |
| PolyP SEQ | Polypeptide Sequence |
| Pat. Appln. SEQ ID NO: | Patent Application SEQ ID NO: |
| Ceres SEQ ID NO | Ceres SEQ ID NO: |
| Loc. SEQ ID NO: @ nt. | Location of translational start site in cDNA of |
| | SEQ ID NO: at nucleotide number |
| (C) Pred. PP Nom. & | Nomination and Annotation of Domains within |
| Annot. | Predicted Polypeptide(s) |
| (Title) | Name of Domain |
| Loc. SEQ ID | Location of the domain within the polypeptide |
| NO #: # -> # aa. | of SEQ ID NO: from # to # amino acid |
| | residues. |
| (Dp) Rel. AA SEQ | Related Amino Acid Sequences |
| Align. NO | Alignment number |
| gi No | Gi number |
| Desp. | Description |
| % Idnt. | Percent identity |
| Align. Len. | Alignment Length |
| Loc. SEQ ID | Location within SEQ ID NO: from # to # |
| NO: # -> # aa | amino acid residue. |

### 2. Protein Group Table

[0274] This table indicates groups of proteins that share a signature sequence (also referred to as a consensus sequence). The Protein group also referred to as the Ortholog group is named by the peptide ID with which all members were compared. Each group contains sequences that were included at the 10⁻⁵⁰, 10⁻³⁰, and 10⁻¹⁰ p-value cutoffs. For each group, the peptide ID and at which cutoff the peptide was included into the group. The same peptide ID may be included in the group three times as peptide ID 50, peptide ID 30 and peptide ID 10. The data indicates that peptide ID was included in the group when the threshold was either 10⁻⁵⁰, 10⁻³⁰, or 10⁻¹⁰. All the peptide IDs that are followed by “50” were included in the protein group when the e-value cutoff was 10⁻⁵⁰. All the peptide IDs that are followed by either “30” or “50” were included in the protein group when the threshold e-value was 10⁻³⁰. All the peptide IDs that are followed by “10”, “30” or “50” were included in the protein group when 10⁻¹⁰ was used as the e-value cutoff. At the end of each protein group is a list of the consensus sequence that proteins share at the 10⁻⁵⁰, 10⁻³⁰, or 10⁻¹⁰. The consensus sequence contains both lower-case and upper-case letters. The upper-case letters represent the standard one-letter amino acid abbreviations. The lower case letters represent classes of amino acids:
[0275] “t” refers to tiny amino acids, which are specifically alanine, glycine, serine and threonine.
[0276] “p” refers to polar amino acids, which are specifically, asparagine and glutamine
[0277] “n” refers to negatively charged amino acids, which are specifically, aspartic acid and glutamic acid
[0278] “+” refers to positively charged residues, which are specifically, lysine, arginine, and histidine
[0279] “r” refers to aromatic residues, which are specifically, phenylalanine, tyrosine, and tryptophan,
[0280] “a” refers to aliphatic residues, which are specifically, isoleucine, valine, leucine, and methonine

### 3. Protein Group_Matrix Table

[0281] In addition to each consensus sequence, Applicants have generated a scoring matrix to provide further description of the consensus sequence. The first row of each matrix indicates the residue position in the consensus sequence. The matrix reports number of occurrences of all the amino acids that were found in the group members for every residue position of the signature sequence. The matrix also indicates for each residue position, how many different organisms were found to have a polypeptide in the group that included a residue at the relevant position. The last line of the matrix indicates all the amino acids that were found at each position of the consensus.

### 4. MA_diff Table

[0282] The MA_diff Table presents the results of the differential expression experiments for the mRNAs, as reported by their corresponding cDNA ID number, that were differentially transcribed under a particular set of conditions as compared to a control sample. The cDNA ID numbers correspond to those utilized in the Reference and Sequence Tables. Increases in mRNA abundance levels in experimental plants versus the controls are denoted with the plus sign (+). Likewise, reductions in mRNA abundance levels in the experimental plants are denoted with the minus (−) sign.

[0283] The Table is organized according to each set of experimental conditions, which are denoted by the term “Expt ID:” followed by a particular number. The table below links each Expt ID with a short description of the experiment and the parameters.

[0284] For each experiment ID a method of the normalization is specified. “Method: 2” represents normalization by median the goal of the method is to adjust the ratios by a factor so that the median of the ratio distribution is 1. Method 3 is the normalization procedure conducted by Aglilent Technologies, Inc. Palo Alto, Calif., USA.

[0285] The MA_diff Table also specifies the specific parameters and the experiment number (e.g. 107871) used in compiling the data. The experiment numbers are referenced in the appropriate utility/functions sections herein. The background threshold was set to “BKG_Threshold=X” to reduce the effect of the background on the signal.

[0286] Finally, the Table includes reference to an “Organism_ID” number. This number refers to the cDNA spotted on the chip were similar to Arabidopsis thaliana (3769) sequences or whether the oligo used for the chips were similar to Zea mays (311987) sequences.

### 5. MA_diff (Experiment) Table

[0287] The following Table summarizes the experimental procedures utilized for the differential expression experiments, each experiment being identified by a unique “Expt ID” number.

| Exam- | Experiment | | | | | |
|---|---|---|---|---|---|---|
| ple No. | short name | genome | EXPT_ID | Value | PARAMETER | UNITS |
| 3ii | 3642-1 | Arabidopsis | 108512 | 3746-1 | Plant Line | Hours |
| 3n | Arab_0.001%_MeJA_1 | Arabidopsis | 108568 | Aerial | Tissue | Tissue |
| | | | | 0.001%_MeJA | Treatment | Compound |
| | | | | 1 | Timepoint | Hours |
| 3n | Arab_0.001%_MeJA_1 | Arabidopsis | 108569 | Aerial | Tissue | Tissue |
| | | | | 6 | Timepoint | Hours |
| | | | | 0.001%_MeJA | Treatment | Compound |
| 3j | Arab_0.1uM_Epi- | Arabidopsis | 108580 | Aerial | Tissue | Tissue |
| | Brass_1 | | | | | |
| | | | | 1 | Timepoint | Hours |
| | | | | 0.1uM_Brassino_Steroid | Treatment | Compound |
| 3j | Arab_0.1uM_Epi- | Arabidopsis | 108581 | Aerial | Tissue | Tissue |
| | Brass_1 | | | | | |
| | | | | 6 | Timepoint | Hours |
| | | | | 0.1uM_Brassino_Steroid | Treatment | Compound |
| 3g | Arab_100uM_ABA_1 | Arabidopsis | 108560 | Aerial | Tissue | Tissue |
| | | | | 1 | Timepoint | Hours |
| | | | | 100uM_ABA | Treatment | Compound |
| 3g | Arab_100uM_ABA_1 | Arabidopsis | 108561 | Aerial | Tissue | Tissue |
| | | | | 100uM_ABA | Treatment | Compound |
| | | | | 6 | Timepoint | Hours |
| 3I | Arab_100uM_BA_1 | Arabidopsis | 108566 | Aerial | Tissue | Tissue |
| | | | | 1 | Timepoint | Hours |
| | | | | 100uM_BA | Treatment | Compound |
| 3I | Arab_100uM_BA_1 | Arabidopsis | 108567 | Aerial | Tissue | Tissue |
| | | | | 100uM_BA | Treatment | Compound |
| | | | | 6 | Timepoint | Hours |
| 3k | Arab_100uM_GA3_1 | Arabidopsis | 108562 | Aerial | Tissue | Tissue |
| | | | | 1 | Timepoint | Hours |
| | | | | 100 uM GA3 | Treatment | Compound |
| 3k | Arab_100uM_GA3_1 | Arabidopsis | 108563 | Aerial | Tissue | Tissue |
| | | | | 100 uM GA3 | Treatment | Compound |
| | | | | 6 | Timepoint | Hours |
| 3h | Arab_100uM_NAA_1 | Arabidopsis | 108564 | Aerial | Tissue | Tissue |
| | | | | 1 | Timepoint | Hours |
| | | | | 100uM_NAA | Treatment | Compound |
| 3h | Arab_100uM_NAA_1 | Arabidopsis | 108565 | Aerial | Tissue | Tissue |
| | | | | 100uM_NAA | Treatment | Compound |
| | | | | 6 | Timepoint | Hours |
| 3r | Arab_20%_PEG_1 | Arabidopsis | 108570 | Aerial | Tissue | Tissue |
| | | | | 1 | Timepoint | Hours |
| | | | | 20% PEG | Treatment | Compound |
| 3r | Arab_20%_PEG_1 | Arabidopsis | 108571 | Aerial | Tissue | Tissue |
| | | | | 20% PEG | Treatment | Compound |
| | | | | 6 | Timepoint | Hours |
| 3o | Arab_2mM_SA_1 | Arabidopsis | 108586 | Aerial | Tissue | Tissue |
| | | | | 2mM_SA | Treatment | Compound |
| | | | | 1 | Timepoint | Hours |
| 3o | Arab_2mM_SA_1 | Arabidopsis | 108587 | Aerial | Tissue | Tissue |
| | | | | 6 | Timepoint | Hours |
| | | | | 2mM_SA | Treatment | Compound |
| 3u | Arab_5mM_H2O2_1 | Arabidopsis | 108582 | Aerial | Tissue | Tissue |
| | | | | 1 | Timepoint | Hours |
| | | | | 5mM_H2O2 | Treatment | Compound |
| 3u | Arab_5mM_H2O2_1 | Arabidopsis | 108583 | Aerial | Tissue | Tissue |
| | | | | 5mM_H2O2 | Treatment | Compound |
| | | | | 6 | Timepoint | Hours |
| 3v | Arab_5mM_NaNP_1 | Arabidopsis | 108584 | Aerial | Tissue | Tissue |
| | | | | 1 | Timepoint | Hours |
| | | | | 5mM_NaNP | Treatment | Compound |
| 3v | Arab_5mM_NaNP_1 | Arabidopsis | 108585 | Aerial | Tissue | Tissue |
| | | | | 5mM_NaNP | Treatment | Compound |
| | | | | 6 | Timepoint | Hours |
| 3t | Arab_Cold_1 | Arabidopsis | 108578 | Aerial | Tissue | Tissue |
| | | | | Cold | Treatment | Compound |
| | | | | 1 | Timepoint | Hours |
| 3t | Arab_Cold_1 | Arabidopsis | 108579 | Aerial | Tissue | Tissue |
| | | | | 6 | Timepoint | Hours |
| | | | | Cold | Treatment | Compound |
| 3g | Arab_Drought_1 | Arabidopsis | 108572 | Aerial | Tissue | Tissue |
| | | | | 1 | Timepoint | Hours |
| | | | | Drought | Treatment | Compound |
| 3g | Arab_Drought_1 | Arabidopsis | 108573 | Aerial | Tissue | Tissue |
| | | | | Drought | Treatment | Compound |
| | | | | 6 | Timepoint | Hours |
| 3s | Arab_Heat_1 | Arabidopsis | 108576 | Aerial | Tissue | Tissue |
| | | | | 1 | Timepoint | Hours |
| | | | | Heat (42 deg | Treatment | Compound |
| | | | | C.) | | |
| 3s | Arab_Heat_1 | Arabidopsis | 108577 | Aerial | Tissue | Tissue |
| | | | | Heat (42 deg | Treatment | Compound |
| | | | | C.) | | |
| | | | | 6 | Timepoint | Hours |
| 3aa | Arab_Ler- | Arabidopsis | 108595 | Ler_pi | Plant Line | Hours |
| (ovule) | pi_ovule_1 | | | | | |
| | | | | Ovule | Tissue | Tissue |
| 3b | Arab_Ler- | Arabidopsis | 108594 | Ler_rhl | Plant Line | Hours |
| | rhl_root_1 | | | | | |
| | | | | Root | Tissue | Tissue |
| 3l | Arab_NO3_H- | Arabidopsis | 108592 | Aerial | Tissue | Tissue |
| | to-L_1 | | | | | |
| | | | | Low Nitrogen | Treatment | Compound |
| | | | | 12 | Timepoint | Hours |
| 3l | Arab_NO3_H- | Arabidopsis | 108593 | Aerial | Tissue | Tissue |
| | to-L_1 | | | | | |
| | | | | 24 | Timepoint | Hours |
| | | | | Low Nitrogen | Treatment | Compound |
| 3l | Arab_NO3_L- | Arabidopsis | 108588 | Aerial | Tissue | Tissue |
| | to-H_1 | | | | | |
| | | | | 2 | Timepoint | Hours |
| | | | | Nitrogen | Treatment | Compound |
| 3l | Arab_NO3_L- | Arabidopsis | 108589 | Aerial | Tissue | Tissue |
| | to-H_1 | | | | | |
| | | | | Nitrogen | Treatment | Compound |
| | | | | 6 | Timepoint | Hours |
| 3l | Arab_NO3_L- | Arabidopsis | 108590 | Aerial | Tissue | Tissue |
| | to-H_1 | | | | | |
| | | | | 9 | Timepoint | Hours |
| | | | | Nitrogen | Treatment | Compound |
| 3l | Arab_NO3_L- | Arabidopsis | 108591 | Aerial | Tissue | Tissue |
| | to-H_1 | | | | | |
| | | | | Nitrogen | Treatment | Compound |
| | | | | 12 | Timepoint | Hours |
| 3p | Arab_Wounding_1 | Arabidopsis | 108574 | Aerial | Tissue | Tissue |
| | | | | 1 | Timepoint | Hours |
| | | | | Wounding | Treatment | Compound |
| 3p | Arab_Wounding_1 | Arabidopsis | 108575 | Aerial | Tissue | Tissue |
| | | | | Wounding | Treatment | Compound |
| | | | | 6 | Timepoint | Hours |
| 3o | Columbia/CS3726 | Arabidopsis | 108475 | Columbia | species | Hours |
| | flower SA | | | | | |
| | | | | SA | Treatment | Compound |
| | | | | 5 weeks | Timepoint | Hours |
| 3o | Columbia/CS3726 | Arabidopsis | 108476 | CS3726 | species | Hours |
| | flower SA | | | | | |
| | | | | 5 weeks | Timepoint | Hours |
| | | | | SA | Treatment | Compound |
| 3p | Corn_0.001Percent_MeJA | Zea Mays | 108555 | Aerial | Tissue | Tissue |
| | | | | 24 | Timepoint | Hours |
| | | | | 0.001%_MeJA | Treatment | Compound |
| 3j | Corn_0.1uM_Brassino_Steroid | Zea Mays | 108557 | 24 | Timepoint | Hours |
| | | | | Aerial | Tissue | Tissue |
| | | | | 0.1uM_Brassino_Steroid | Treatment | Compound |
| 3g | Corn_100uM_ABA | Zea Mays | 108513 | Aerial | Tissue | Tissue |
| | | | | ABA | Treatment | Compound |
| | | | | 6 | Timepoint | Hours |
| 3g | Corn_100uM_ABA | Zea Mays | 108597 | Aerial | Tissue | Tissue |
| | | | | 24 | Timepoint | Hours |
| | | | | 100uM_ABA | Treatment | Compound |
| 3i | Corn_100uM_BA | Zea Mays | 108517 | Aerial | Tissue | Tissue |
| | | | | 6 | Timepoint | Hours |
| | | | | BA | Treatment | Compound |
| 3k | Corn_100uM_GA3 | Zea Mays | 108519 | Aerial | Tissue | Tissue |
| | | | | 100 uM | Treatment | Compound |
| | | | | Giberillic | | |
| | | | | Acid | | |
| | | | | 1 | Timepoint | Hours |
| 3k | Corn_100uM_GA3 | Zea Mays | 108520 | Aerial | Tissue | Tissue |
| | | | | 6 | Timepoint | Hours |
| | | | | 100 uM | Treatment | Compound |
| | | | | Giberillic | | |
| | | | | Acid | | |
| 3k | Corn_100uM_GA3 | Zea Mays | 108521 | Aerial | Tissue | Tissue |
| | | | | 100 uM | Treatment | Compound |
| | | | | Giberillic | | |
| | | | | Acid | | |
| | | | | 12 | Timepoint | Hours |
| 3h | Corn_100uM_NAA | Zea Mays | 108516 | Aerial | Tissue | Tissue |
| | | | | NAA | Treatment | Compound |
| | | | | 6 | Timepoint | Hours |
| 3h | Corn_100uM_NAA | Zea Mays | 108554 | Aerial | Tissue | Tissue |
| | | | | 24 | Timepoint | Hours |
| | | | | NAA | Treatment | Compound |
| 3hh | Corn_1400- | Zea Mays | 108598 | Shoot apices | Tissue | Tissue |
| | 6/S-17 | | | | | |
| 3r | Corn_150mM_NaCl | Zea Mays | 108541 | Aerial | Tissue | Tissue |
| | | | | 1 | Timepoint | Hours |
| | | | | 150mM_NaCl | Treatment | Compound |
| 3r | Corn_150mM_NaCl | Zea Mays | 108542 | Aerial | Tissue | Tissue |
| | | | | 150mM_NaCl | Treatment | Compound |
| | | | | 6 | Timepoint | Hours |
| 3r | Corn_150mM_NaCl | Zea Mays | 108553 | Aerial | Tissue | Tissue |
| | | | | 24 | Timepoint | Hours |
| | | | | 150mM_NaCl | Treatment | Compound |
| 3r | Corn_20%_PEG | Zea Mays | 108539 | Aerial | Tissue | Tissue |
| | | | | 1 | Timepoint | Hours |
| | | | | 20% PEG | Treatment | Compound |
| 3r | Corn_20%_PEG | Zea Mays | 108540 | Aerial | Tissue | Tissue |
| | | | | 20% PEG | Treatment | Compound |
| | | | | 6 | Timepoint | Hours |
| 3o | Corn_2mM_SA | Zea Mays | 108515 | Aerial | Tissue | Tissue |
| | | | | SA | Treatment | Compound |
| | | | | 12 | Timepoint | Hours |
| 3o | Corn_2mM_SA | Zea Mays | 108552 | Aerial | Tissue | Tissue |
| | | | | SA | Treatment | Compound |
| | | | | 24 | Timepoint | Hours |
| 3u | Corn_5mM_H2O2 | Zea Mays | 108537 | Aerial | Tissue | Tissue |
| | | | | H2O2 | Treatment | Compound |
| | | | | 1 | Timepoint | Hours |
| 3u | Corn_5mM_H2O2 | Zea Mays | 108538 | Aerial | Tissue | Tissue |
| | | | | 6 | Timepoint | Hours |
| | | | | H2O2 | Treatment | Compound |
| 3u | Corn_5mM_H2O2 | Zea Mays | 108558 | Aerial | Tissue | Tissue |
| | | | | 24 | Timepoint | Hours |
| | | | | H2O2 | Treatment | Compound |
| 3v | Corn_5mM_NO | Zea Mays | 108526 | Aerial | Tissue | Tissue |
| | | | | NO | Treatment | Compound |
| | | | | 1 | Timepoint | Hours |
| 3v | Corn_5mM_NO | Zea Mays | 108527 | Aerial | Tissue | Tissue |
| | | | | 6 | Timepoint | Hours |
| | | | | NO | Treatment | Compound |
| 3v | Corn_5mM_NO | Zea Mays | 108559 | Aerial | Tissue | Tissue |
| | | | | 12 | Timepoint | Hours |
| | | | | NO | Treatment | Compound |
| 3t | Corn_Cold | Zea Mays | 108533 | Aerial | Tissue | Tissue |
| | | | | 1 | Timepoint | Hours |
| | | | | Cold | Treatment | Compound |
| 3t | Corn_Cold | Zea Mays | 108534 | Aerial | Tissue | Tissue |
| | | | | Cold | Treatment | Compound |
| | | | | 6 | Timepoint | Hours |
| 3q | Corn_Drought | Zea Mays | 108502 | Drought | Treatment | Compound |
| | | | | 1 | Timepoint | Hours |
| 3q | Corn_Drought | Zea Mays | 108503 | Drought | Treatment | Compound |
| | | | | 6 | Timepoint | Hours |
| 3q | Corn_Drought | Zea Mays | 108504 | Drought | Treatment | Compound |
| | | | | 12 | Timepoint | Hours |
| 3q | Corn_Drought | Zea Mays | 108556 | Drought | Treatment | Compound |
| | | | | 24 | Timepoint | Hours |
| 3s | Corn_Heat | Zea Mays | 108522 | Aerial | Tissue | Tissue |
| | | | | 1 | Timepoint | Hours |
| | | | | Heat (42 deg | Treatment | Compound |
| | | | | C.) | | |
| 3s | Corn_Heat | Zea Mays | 108523 | Aerial | Tissue | Tissue |
| | | | | 6 | Timepoint | Hours |
| | | | | Heat (42 deg | Treatment | Compound |
| | | | | C.) | | |
| 3gg | Corn_Imbibed | Zea Mays | 108518 | Imbibed | Treatment | Compound |
| | Seeds | | | | | |
| | | | | 4 | Age | days old |
| | | | | Roots | Tissue | Tissue |
| 3gg | Corn_Imbibed | Zea Mays | 108528 | Imbibed | Treatment | Compound |
| | Seeds | | | | | |
| | | | | Aerial | Tissue | Tissue |
| | | | | 5 | Age | days old |
| 3gg | Corn_Imbibed | Zea Mays | 108529 | Imbibed | Treatment | Compound |
| | Seeds | | | | | |
| | | | | 5 | Age | days old |
| | | | | Root | Tissue | Tissue |
| 3gg | Corn_Imbibed | Zea Mays | 108530 | Imbibed | Treatment | Compound |
| | Seeds | | | | | |
| | | | | Aerial | Tissue | Tissue |
| | | | | 6 | Age | days old |
| 3gg | Corn_Imbibed | Zea Mays | 108531 | Imbibed | Treatment | Compound |
| | Seeds | | | | | |
| | | | | 6 | Age | days old |
| | | | | root | Tissue | Tissue |
| 3gg | Corn_Imbibed | Zea Mays | 108545 | Imbibed | Treatment | Compound |
| | Seeds | | | | | |
| | | | | Aerial | Tissue | Tissue |
| | | | | 3 | Age | days old |
| 3gg | Corn_Imbibed | Zea Mays | 108546 | Imbibed | Treatment | Compound |
| | Seeds | | | | | |
| | | | | 3 | Age | days old |
| | | | | Root | Tissue | Tissue |
| 3gg | Corn_Imbibed | Zea Mays | 108547 | Imbibed | Treatment | Compound |
| | Seeds | | | | | |
| | | | | Aerial | Tissue | Tissue |
| | | | | 4 | Age | days old |
| 3gg | Corn_Imbibed_Embryo_Endosperm | Zea Mays | 108543 | 2 | Age | days old |
| | | | | Imbibed | Treatment | Compound |
| | | | | Embryo | Tissue | Tissue |
| 3gg | Corn_Imbibed_Embryo_Endosperm | Zea Mays | 108544 | 2 | Age | days old |
| | | | | Endosperm | Tissue | Tissue |
| | | | | Imbibed | Treatment | Compound |
| 3ee | Corn_Meristem | Zea Mays | 108535 | Root | Tissue | Tissue |
| | | | | Meristem | | |
| | | | | 192 | Timepoint | Hours |
| 3ee | Corn_Meristem | Zea Mays | 108536 | Shoot | Tissue | Tissue |
| | | | | Meristem | | |
| | | | | 192 | Timepoint | Hours |
| 3n | Corn_Nitrogen_H_to_L | Zea Mays | 108532 | Roots | Tissue | Tissue |
| | | | | Low Nitrogen | Treatment | Compound |
| | | | | 16 | Timepoint | Hours |
| 3n | Corn_Nitrogen_H_to_L | Zea Mays | 108548 | Root | Tissue | Tissue |
| | | | | Low Nitrogen | Treatment | Compound |
| | | | | 4 | Timepoint | Hours |
| 3m | Corn_Nitrogen_L_to_H | Zea Mays | 108549 | Aerial | Tissue | Tissue |
| | | | | 0.166 | Timepoint | Hours |
| | | | | Nitrogen | Treatment | Compound |
| 3m | Corn_Nitrogen_L_to_H | Zea Mays | 108550 | Aerial | Tissue | Tissue |
| | | | | Nitrogen | Treatment | Compound |
| | | | | 1.5 | Timepoint | Hours |
| 3m | Corn_Nitrogen_L_to_H | Zea Mays | 108551 | Aerial | Tissue | Tissue |
| | | | | 3 | Timepoint | Hours |
| | | | | Nitrogen | Treatment | Compound |
| 3ff | Corn_RT1 | Zea Mays | 108599 | Unknown | Plant Line | Hours |
| | | | | Root | Tissue | Tissue |
| 3p | Corn_Wounding | Zea Mays | 108524 | Aerial | Tissue | Tissue |
| | | | | Wounding | Treatment | Compound |
| | | | | 1 | Timepoint | Hours |
| 3p | Corn_Wounding | Zea Mays | 108525 | Aerial | Tissue | Tissue |
| | | | | 6 | Timepoint | Hours |
| | | | | Wounding | Treatment | Compound |
| 3g | Drought_Flowers | Arabidopsis | 108473 | Flowers | Tissue | Tissue |
| | | | | 7 d | Timepoint | Hours |
| | | | | Drought | Treatment | Compound |
| 3g | Drought_Flowers | Arabidopsis | 108474 | Flowers | Tissue | Tissue |
| | | | | Drought | Treatment | Compound |
| | | | | 8 d (1 d- | Timepoint | Hours |
| | | | | post_re- | | |
| | | | | watering) | | |
| 3k | GA Treated | Arabidopsis | 108484 | 1 | Timepoint | Hours |
| | | | | 1 | Timepoint | Hours |
| 3k | GA Treated | Arabidopsis | 108485 | 6 | Timepoint | Hours |
| | | | | 6 | Timepoint | Hours |
| 3k | GA Treated | Arabidopsis | 108486 | 12 | Timepoint | Hours |
| | | | | 12 | Timepoint | Hours |
| 3e | Germinating | Arabidopsis | 108461 | Day 1 | Timepoint | Hours |
| | Seeds | | | | | |
| 3e | Germinating | Arabidopsis | 108462 | Day 2 | Timepoint | Hours |
| | Seeds | | | | | |
| 3e | Germinating | Arabidopsis | 108463 | Day 3 | Timepoint | Hours |
| | Seeds | | | | | |
| 3e | Germinating | Arabidopsis | 108464 | Day 4 | Timepoint | Hours |
| | Seeds | | | | | |
| 3bb | Herbicide V3.1 | Arabidopsis | 108465 | Round up | Treatment | Compound |
| | | | | 12 | Timepoint | Hours |
| 3bb | Herbicide V3.1 | Arabidopsis | 108466 | Trimec | Treatment | Compound |
| | | | | 12 | Timepoint | Hours |
| 3bb | Herbicide V3.1 | Arabidopsis | 108467 | Finale | Treatment | Compound |
| | | | | 12 | Timepoint | Hours |
| 3bb | Herbicide V3.1 | Arabidopsis | 108468 | Glean | Treatment | Compound |
| | | | | 12 | Timepoint | Hours |
| 3bb | Herbicide_v2 | Arabidopsis | 107871 | Finale | Treatment | Compound |
| | | | | 4 | Timepoint | Hours |
| 3bb | Herbicide_v2 | Arabidopsis | 107876 | Finale | Treatment | Compound |
| | | | | 12 | Timepoint | Hours |
| 3bb | Herbicide_v2 | Arabidopsis | 107881 | Glean | Treatment | Compound |
| | | | | 4 | Timepoint | Hours |
| 3bb | Herbicide_v2 | Arabidopsis | 107886 | Trimec | Treatment | Compound |
| | | | | 4 | Timepoint | Hours |
| 3bb | Herbicide_v2 | Arabidopsis | 107891 | Trimec | Treatment | Compound |
| | | | | 12 | Timepoint | Hours |
| 3bb | Herbicide_v2 | Arabidopsis | 107896 | Round-up | Treatment | Compound |
| | | | | 4 | Timepoint | Hours |
| 3d | Trichome | Arabidopsis | 108452 | Hairy | Tissue | Tissue |
| | Inflorescences | | | Influorescence | | |
| | expt | | | #1 | | |
| 3o | SA treatment_1 | Arabidopsis | 108471 | Columbia | Species | Hours |
| | hour | | | | | |
| | | | | 1 | Timepoint | Hours |
| | | | | SA | Treatment | Compound |
| 3o | SA treatment_1 | Arabidopsis | 108472 | CS3726 | Species | Hours |
| | hour | | | | | |
| | | | | 1 | Timepoint | Hours |
| | | | | SA | Treatment | Compound |
| 3o | SA treatment_4 | Arabidopsis | 108469 | columbia | Species | Hours |
| | hour | | | | | |
| | | | | 4 | Timepoint | Hours |
| | | | | SA | Treatment | Compound |
| 3o | SA treatment_4 | Arabidopsis | 108470 | CS3726 | Species | Hours |
| | hour | | | | | |
| | | | | SA | Treatment | Compound |
| | | | | 4 | Timepoint | Hours |
| 3o | SA | Arabidopsis | 107953 | 50 | Probe | % of |
| | treatment_AJ | | | | Amount | Standard |
| | | | | | | Amount |
| | | | | SA | Treatment | Compound |
| | | | | 24 | Timepoint | Hours |
| | | | | Clontech | Probe Type | Probe |
| | | | | | | method |
| 3o | SA | Arabidopsis | 107960 | 50 | Probe | % of |
| | treatment_AJ | | | | Amount | Standard |
| | | | | | | Amount |
| | | | | SA | Treatment | Compound |
| | | | | 24 | Timepoint | Hours |
| | | | | Operon | Probe Type | Probe |
| | | | | | | method |
| 3o | SA_treatment | Arabidopsis | 108443 | SA | Treatment | Compound |
| | 24 hour | | | | | |
| | | | | 24 | Timepoint | Hours |
| 3o | SA_treatment 6 | Arabidopsis | 108440 | SA treatment | Treatment | Compound |
| | hour | | | 6 hour | | |
| | | | | CS3726 | species | Hours |
| 3o | SA_treatment 6 | Arabidopsis | 108441 | SA treatment | Treatment | Compound |
| | hour | | | 6 hour | | |
| | | | | Columbia | species | Hours |
| 3l | Nitrogen High | Arabidopsis | 108454 | 10 min | Timepoint | Hours |
| | transition to | | | | | |
| | Low | | | | | |
| 3l | Nitrogen High | Arabidopsis | 108455 | 1 hr | Timepoint | Hours |
| | transition to | | | | | |
| | Low | | | | | |
| 3j | BR_Shoot | Arabidopsis | 108478 | dwf4-1 | Plant Line | Hours |
| | Apices Expt | | | | | |
| 3j | BR_Shoot | Arabidopsis | 108479 | AOD4-4 | Plant Line | Hours |
| | Apices Expt | | | | | |
| 3j | BR_Shoot | Arabidopsis | 108480 | Ws-2 | Plant Line | Hours |
| | Apices Expt | | | | | |
| | | | | BL | Treatment | Compound |
| 3j | BR_Shoot | Arabidopsis | 108481 | Ws-2 | Plant Line | Hours |
| | Apices Expt | | | | | |
| | | | | BRZ | Treatment | Compound |
| 3jj | Tissue Specific | Arabidopsis | 108429 | green flower | Tissue | Tissue |
| | Expression | | | | | |
| | | | | operon | Probe Type | Probe |
| | | | | | | method |
| | | | | 50 | Probe | % of |
| | | | | | Amount | Standard |
| | | | | | | Amount |
| 3jj | Tissue Specific | Arabidopsis | 108430 | white flower | Tissue | Tissue |
| | Expression | | | | | |
| | | | | 50 | Probe | % of |
| | | | | | Amount | Standard |
| | | | | | | Amount |
| | | | | operon | Probe Type | Probe |
| | | | | | | method |
| 3jj | Tissue Specific | Arabidopsis | 108431 | flowers (bud) | Tissue | Tissue |
| | Expression | | | | | |
| | | | | operon | Probe Type | Probe |
| | | | | | | method |
| | | | | 50 | Probe | % of |
| | | | | | Amount | Standard |
| | | | | | | Amount |
| 3c | Tissue Specific | Arabidopsis | 108436 | 5-10 mm | Tissue | Tissue |
| | Expression | | | siliques | | |
| | | | | 33 | Probe | % of |
| | | | | | Amount | Standard |
| | | | | | | Amount |
| | | | | operon | Probe Type | Probe |
| | | | | | | method |
| 3c | Tissue Specific | Arabidopsis | 108437 | <5 mm | Tissue | Tissue |
| | Expression | | | siliques | | |
| | | | | operon | Probe Type | Probe |
| | | | | | | method |
| | | | | 33 | Probe | % of |
| | | | | | Amount | Standard |
| | | | | | | Amount |
| 3c | Tissue Specific | Arabidopsis | 108438 | 5 wk siliques | Tissue | Tissue |
| | Expression | | | | | |
| | | | | 33 | Probe | % of |
| | | | | | Amount | Standard |
| | | | | | | Amount |
| | | | | operon | Probe Type | Probe |
| | | | | | | method |
| 3a | Tissue Specific | Arabidopsis | 108439 | Roots (2 wk) | Tissue | Tissue |
| | Expression | | | | | |
| | | | | operon | Probe Type | Probe |
| | | | | | | method |
| | | | | 33 | Probe | % of |
| | | | | | Amount | Standard |
| | | | | | | Amount |
| 3c | Tissue Specific | Arabidopsis | 108497 | 3 week | Tissue | Tissue |
| | Expression | | | Rossette | | |
| | | | | leaves | | |
| | | | | 100 | Probe | % of |
| | | | | | Amount | Standard |
| | | | | | | Amount |
| | | | | operon | Probe Type | Probe |
| | | | | | | method |
| 3c | Tissue Specific | Arabidopsis | 108498 | 3-week stems | Tissue | Tissue |
| | Expression | | | | | |
| | | | | operon | Probe Type | Probe |
| | | | | | | method |
| | | | | 100 | Probe | % of |
| | | | | | Amount | Standard |
| | | | | | | Amount |
| 3dd | U.A.E. | Arabidopsis | 108451 | 13B12 | Plant Line | Hours |
| | Knockout | | | | | |
| 3q | Ws Arabidopsis | Arabidopsis | 108477 | stems and | Tissue | Tissue |
| | Drought 2 days | | | leaves | | |
| | | | | 2 days | Timepoint | Hours |
| 3q | Ws Arabidopsis | Arabidopsis | 108482 | 4 days | Timepoint | Hours |
| | Drought 4 days | | | | | |
| 3q | Ws Arabidopsis | Arabidopsis | 108483 | 6 days | Timepoint | Hours |
| | Drought 6 days | | | | | |
| 3cc | ap2-floral buds | Arabidopsis | 108501 | ap2 (Ler.) | Plant Line | Hours |
| | | | | floral buds | Tissue | Tissue |
| 3m | nitrogen-seed | Arabidopsis | 108487 | 0.5 | Timepoint | Hours |
| | set | | | | | |
| 3m | nitrogen-seed | Arabidopsis | 108488 | 2 | Timepoint | Hours |
| | set | | | | | |
| 3m | nitrogen-seed | Arabidopsis | 108489 | 4 | Timepoint | Hours |
| | set | | | | | |
| 3b | rhl mutant2 | Arabidopsis | 108433 | mutant | Tissue | Tissue |
| 3ee | root tips | Arabidopsis | 108434 | root tips | Tissue | Tissue |
| 3f | stm mutants | Arabidopsis | 108435 | stem | Tissue | Tissue |
| | Aluminum | | SMD | | | |
| | | | 7304, | | | |
| | | | SMD 7305 | | | |
| | Axel | | SMD | | | |
| | | | 6654, | | | |
| | | | SMD 6655 | | | |
| | Cadium | | SMD | | | |
| | | | 7427, | | | |
| | | | SMD 7428 | | | |
| | Cauliflower | | SMD | | | |
| | | | 5329, | | | |
| | | | SMD 5330 | | | |
| | Chloroplast | | SMD | | | |
| | | | 8093, | | | |
| | | | SMD 8094 | | | |
| | Circadian | | SMD | | | |
| | | | 2344, | | | |
| | | | SMD | | | |
| | | | 2359, | | | |
| | | | SMD | | | |
| | | | 2361, | | | |
| | | | SMD | | | |
| | | | 2362, | | | |
| | | | SMD | | | |
| | | | 2363, | | | |
| | | | SMD | | | |
| | | | 2364, | | | |
| | | | SMD | | | |
| | | | 2365, | | | |
| | | | SMD | | | |
| | | | 2366, | | | |
| | | | SMD | | | |
| | | | 2367, | | | |
| | | | SMD | | | |
| | | | 2368, | | | |
| | | | SMD 3242 | | | |
| | CO2 | | SMD7561, | | | |
| | | | SMD | | | |
| | | | 7562, | | | |
| | | | SMD | | | |
| | | | 7261, | | | |
| | | | SMD | | | |
| | | | 7263, | | | |
| | | | SMD | | | |
| | | | 3710, | | | |
| | | | SMD | | | |
| | | | 4649, | | | |
| | | | SMD 4650 | | | |
| | Disease | | SMD | | | |
| | | | 7342, | | | |
| | | | SMD 7343 | | | |
| | reactive oxygen | | SMD | | | |
| | | | 7523 | | | |
| | Iron | | SMD | | | |
| | | | 7114, | | | |
| | | | SMD | | | |
| | | | 7115, | | | |
| | | | SMD 7125 | | | |
| | defense | | SMD | | | |
| | | | 8031, | | | |
| | | | SMD 8032 | | | |
| | Mitchondria- | | SMD | | | |
| | Electron | | 8061, | | | |
| | Transport | | SMD 8063 | | | |
| | NAA | | SMD | | | |
| | | | 3743, | | | |
| | | | SMD | | | |
| | | | 3749, | | | |
| | | | SMD | | | |
| | | | 6338, | | | |
| | | | SMD 6339 | | | |
| | Nitrogen | | SMD | | | |
| | | | 3787, | | | |
| | | | SMD 3789 | | | |
| | Phototropism | | SMD | | | |
| | | | 4188, | | | |
| | | | SMD | | | |
| | | | 6617, | | | |
| | | | SMD 6619 | | | |
| | Shade | | SMD | | | |
| | | | 8130, | | | |
| | | | SMD 7230 | | | |
| | Sqn | | SMD | | | |
| | | | 7133, | | | |
| | | | SMD 7137 | | | |
| | Sulfur | | SMD | | | |
| | | | 8034, | | | |
| | | | SMD 8035 | | | |
| | Wounding | | SMD | | | |
| | | | 3714, | | | |
| | | | SMD 3715 | | | |
| | Zinc | | SMD | | | |
| | | | 7310, | | | |
| | | | SMD 7311 | | | |

### 6. MA_Clusters Table

[0288] Microarray data was clustered using one of two methods: “complete linkage” or “nearest neighbor” analysis. These clustering methods are described in more detail elsewhere herein. The results of the clustering analysis are presented in the MA_clust table. The table is organized as follows:

[0289] “METHOD” refers to a method number which clustering method used.

[0290] “CL_METHOD_TYPE=TRUE” refers to complete linkage method.

[0291] “NN_METHOD_TYPE=TRUE” refers to the nearest neighbor method.

[0292] “FULL_NN_METHOD_TYPE=TRUE” refers to the nearest neighbor method, where no size limitation was placed on the cluster.

[0293] “PARAMETERS” refers to the parameters utilized for the analysis. The nature of these is also described in more detail elsewhere herein.

[0294] “ORGANISM” refers to the cDNA spotted on the chip were similar to Arabidopsis thaliana (3769) sequences or whether the oligo used for the chips were similar to Zea mays (311987) sequences.

[0295] Each cluster or group of cDNA is identified by a “Group #”, following which are the individual cDNA_Ids that are a member of that Group

### 7. Knock-In Table

[0296] The Knock-In Table presents the results of knock-in experiments wherein plants are grown from tissues transformed with a marker gene-containing insert and phenotypes are ascertained from the transformed plants. Each section of the Table relating to information on a new transformant begins with a heading “Knock-in phenotype in gene (cDNA_id):” followed by a number which represents the Ceres internal code for a proprietary cDNA sequence. The described transformant was prepared by procedures described herein, wherein the identified Ceres proprietary cDNA_id (corresponding to the cDNA_id in the Reference and Sequence Tables) was interrupted by the marker gene-containing insert. The following information is presented for each section.
[0297] Parent plants used in cross—presents the id numbers of the parent plants which were crossed to produce the F1 generation plant for which a phenotype is described. The parent plant with the promoter is described by a plant line descriptor.
[0298] Clone ID—presents the clone number of the Ceres proprietary clone which was the source of the cDNA_id.
[0299] Phenotype ID—represents an internal identification code.
[0300] Unique FI plant ID—represents the internal code for the F1 plant for which a phenotype is described.
[0301] Assay—presents the type of growth analyzed (e.g. soil gross morphology), followed by the assay name which corresponds to the type/location of the tissue that was observed, the name of the assay conducted for which the result provided the identified phenotype.
[0302] Phenotype—describes the phenotype noted for the F1 generation transformant.
[0303] Notes—may provide additional information on the described phenotype for the transform ant.

[0304] Each knock-in representing a transformant with an interruption in the identified cDNA id may be correlated with more than one identified phenotype.

### 8. Knock-Out Table

[0305] The Knock-Out Table presents the results of knock-out experiments wherein plants are grown from tissues transformed with a marker gene-containing insert wherein phenotypes are ascertained from the transformed plants. Each section of the Table relating to information on a new transformant begins with a heading “tail id:” representing an internal code. The following information is presented for each section.
[0306] br—provides another internal code for the experiment.
[0307] Phenotype_id—provides an identification number for the particular phenotype identified for the transformant.
[0308] assay—identifies the assay procedure utilized in the experiment to identify a phenotype for the transformant.
[0309] phenotype—represents an internatl identification code.
[0310] ratio—represents a segregation ratio.
[0311] notes—lists any notes relevant to the identified phenotype.
[0312] Knock-out in-genes—Identifies the genes in which the tag has inserted
   [0313] 6) the less than 501 upstream of the transcriptional start site;
   [0314] 7) less than 701 upstream of the translational initiation codon;
   [0315] 8) between the translational initiation and termination codons of the gene,
   [0316] 9) less than 301 downstream of the translational stop codon; or
   [0317] 10) less than 151 downstream of a transcriptional termination site or a gene.
[0318] In this table the gene is identified by its cDNA ID number, the Ceres SEQ ID that is indicated in the (Ac) portion of the Reference tables. For each cDNA_id, the following information is provided:
   [0319] the cDNA-id number.
   [0320] in parenthesis, the cluster number of which the identified cDNA is a member.
   [0321] the “gDNA_Insert pos” representing the position of the insert in the corresponding gDNA sequence
   [0322] the gi number refers to the TIGR chromosome sequences for Arabidopsis.
[0323] Knock-out out of-genes: Identifies the Ceres cDNA proprietary sequences (noted by cDNA_id which are the same as those identified in the Reference and Sequence Tables) which are closest in position to the insert, both upstream and downstream from the insert. For each cDNA_id, the following information is provided:
   [0324] In the first parentheses, R indicates that the gene is to the right of the tag, L indicates that the gene is to right of the tag as the sequences is read left to right
   [0325] the cDNA_id number
   [0326] in next parentheses, the cluster number of which the identified cDNA is a member.
   [0327] the distance (in number of nucleotides) of the insert is upstream of the start of the gene annotation as described in the Reference Tables or downstream at the end the gene annotation.
   [0328] the “gDNA_Insert pos” representing the position of the insert in the corresponding gDNA sequence
   [0329] the gi number refers to the TIGR chromosome sequences for Arabidopsis.

### 9. Protein Domain Table

[0330] The Protein Domain table provides details concerning the protein domains noted in the Reference Table. The majority of the protein domain descriptions given in the Protein Domain Table are obtained from Prosite (available on the internet), and Pfam (available on the internet). Each description in The Table begins with the pfam and Prosite identifying numbers, the full name of the domain, and a detailed description, including biological and in vivo implications/functions for the domain, references which further describe such implications/functions, and references that describe tests/assays to measure the implications/functions.

### 10. Single Gene Functions & Utilities Table

[0331] The Single Gene Functions & Utilities Table describes particular utilities/functions of interest for individual genes. The Table identifies the cDNA_ID of interest, correlates to that cDNA the relevant phenotype, protein domain and microarray/differential expression data. The final column of the Table identifies the utilities/functions of particular interest for the identified cDNA.

### 11. Cluster Functions & Utilities Table

[0332] The Cluster Functions & Utilities Table describes particular utilities/functions of interest for identified clusters of genes. The Table provides the following information:

[0333] Record #—an internal identifier.

[0334] Group—identifies the group of clusters of interest, wherein each group is identified with the same utilities/funcions as set forth in the right-hand most column.

[0335] cDNA—identifies the cDNA of interest with the noted utility/function.

[0336] cDNA_Cluster—identifies the cDNA Cluster ID of interest.

[0337] Gi No—refers to the public genomic sequence that matches to the cDNA

[0338] NR Hit—refers to the most relevant protein domain for the cDNA of interest.

[0339] Pfam and Pfam Desc—provide the protein domain name.

[0340] Notes/Annotations—provides some notes relevant to the data/information analysis.

[0341] Utilities/Functions—this rightmost column identifies utilities/functions of particular interest for the group of cDNAs and clusters.

12. cDNA_Clusters Table

[0342] The cDNA_Clusters Table correlates the Ceres cDNA_ID nos. (in numerical order) with the relevant cDNA cluster which contains each cDNA_ID.

### 13. Stanford_old_new_cDNA_map Table

[0343] During the course of the experiments reported herein, some of the cDNA sequences were assigned new Ceres internal cDNA_id numbers. The cDNA_map Table provides a list of the original “old” cDNA_ids and correlates those id numbers with any new cDNA_id which may have been assigned. Thus, any “old” and “new” cDNA ids which are on the same line in the Table are, in fact, the same sequence.

14. gb_Only_Peptides Table

[0344] In the Protein Group table, a number of proteins encoded by Genbank predictions are included. These proteins were referenced with a peptide ID number. The peptide ID number is linked to the amino acid sequence of the Genbank prediction in this table.

### 15. Stanford_Old_New_cDNA Table

[0345] During the course of the experiments reported herein, some of the cDNA sequences utilized in the Stanford Microarray differential expression analysis experiments were assigned new Ceres internal cDNA_id numbers. The Stanford_old_new_cDNA Table provides a list of the original “old” cDNA_ids and correlates those id numbers with any new cDNA_id which may have been assigned. Thus, any “old” and “new” cDNA ids which are on the same line in the Table are, in fact, the same sequence.

### 16. Enhanced_Amino Table

[0346] This table lists the peptide IDs of polypeptides with enhanced amino acid content. The table list the peptide ID following with the single letter code of the amino acid that is enhanced. The table also includes a frequency that the amino acid occurred. The frequency was calculated by dividing the total number of the desired amino acid indicated in the column by the number of residues in the peptide. For example, if amino acid A, occurred 50 times in a polypeptide that is 100 amino acid long, the frequency would be 50 divided by 100 or 0.5.

### 17. Stanford_old_new_cDNA_map Table

[0347] During the course of the experiments reported herein, some of the cDNA sequences were assigned new Ceres internal cDNA_id numbers. The docket_{—}80090_{—}101_cDNA_map provides a list of the original “old” cDNA_ids in the Reference and Sequence tables and correlates those id numbers with any new cDNA_id which may have been assigned and utilized in the remaining tables. Thus, any “old” and “new” cDNA ids which are on the same line in the Table are, in fact, the same sequence.

### II. How the Inventions Reveal how Genes, Gene Components and Products Function

[0348] The different experimental molecular genetic approaches focused on different aspects of genes, gene components, and gene products of the inventions. The variety of the data demonstrates the multiple functions and characteristics of single genes, gene components, and products. The data also explain the pathways and networks in which individual genes and products participate and interact. As a result, the circumstances or conditions are now known when these genes and networks are active. These new understandings of biology are relevant for many plant species. The following section describes the process by which Applicants analyzed the inventions generated by the Ceres Genomic Engine:

[0349] II.A. Experimental Results Reveal Many Facets of a Single Gene

[0350] The experimental results are used to dissect the function of individual components and products of the genes. For example, the biochemical activity of the encoded protein could be surmised from sequence analyses, and promoter specificity could be identified through transcriptional analyses. Generally, the data presented herein can be used to functionally annotate either the protein sequence and/or the regulatory sequence that control transcription and translation.

[0351] II.A.1. Functions of Coding Sequences Revealed by the Ceres Genomic Engine

[0352] II.A.1.a. Sequence Similarity to Proteins of Known Function can be Used to Associate Biochemical Activities and Molecular Interaction to the Proteins of the Invention

[0353] The protein sequences of the invention were analyzed to determine if they shared any sequence characteristics with proteins of known activity. Proteins can be grouped together based on sequence similarity, either localized or throughout the length of the proteins. Typically, such groups of proteins exhibit common biochemical activities or interact with similar molecules.

[0354] II.A.1.a.1. Presence of Amino Acid Motifs Indicates Biological Function

[0355] Localized protein sequence similarity, also referred to as amino acid motifs, have been attributed to enzyme or protein functions. A library of motifs, important for function, have been documented in PROSITE, a public database available on the internet. This library includes descriptions of the motifs and their functions. The zinc finger motif is one such entry in PROSITE, which reports that the zinc finger domain of DNA-binding proteins is typically defined by a 25-30 amino acid motif containing specific cysteine or histidine residues that are involved in the tetrahedral coordination of a zinc ion. Any protein comprising a sequence similar to the zinc finger amino acid motif will have similar functional activity (specific binding of DNA).

[0356] Protein sequences of the invention have been compared to a library of amino acid motifs in the pFAM database, which is linked to the PROSITE database. If any of Applicants' protein sequences exhibit similarity to these amino acid motifs or domains, the Reference Table notes the name and location of the motif in the “Pred. PP Nom. & Annot” section of the Reference tables. A description of any biochemical activities that are associated to these domains, and therefore associated with Applicants' proteins, is included in the Protein Domain table.

[0357] For example, polypeptide, CERES Sequence ID NO: 1545823 is associated with zinc finger motif as follows in the Reference Table:

[0358] (C) Pred. PP Nom. & Annot.
[0359] Zinc finger, C3HC4 type (RING finger)
[0360] Loc. Sequence ID NO 133059: 58->106 aa.

[0361] II.A.1.a.2. Related Amino Acid Sequences Share Similar Biological Functions

[0362] It is apparent, when studying protein sequence families, that some regions have been better conserved than others during evolution. These regions are generally important for the function of a protein and/or for the maintenance of its three-dimensional structure.

[0363] The Reference Table reports in section “(Dp) Rel. AA Sequence” when a protein shares amino acid similarity with a protein of known activity. The section reports the gi number of the protein of known activity, a brief description of the activity, and the location where it shares sequence similarity to Applicants' polypeptide sequence.

[0364] Using this analysis, biochemical activity of the known protein is associated with Applicants' proteins. An example for the polypeptide described above is as follows:

[0365] (Dp) Rel. AA Sequence
[0366] Align. NO 524716
[0367] gi No 2502079
[0368] Desp.: (AF022391) immediate early protein; ICP0 [Feline herpesvirus 1]
[0369] % Idnt.: 33.7
[0370] Align. Len.: 87
[0371] Loc. Sequence ID NO 133059: 52->137 aa.

[0372] II.A.1.b. Differential Expression Results Explain in which Cellular Responses the Proteins of the Invention are Involved

[0373] Differential expression results show when the coding sequence is transcribed, and therefore when the activity of the protein is deployed by the cell. Similar coding sequences can have very different physiological consequences because the sequences are expressed at different times or places, rather than because of any differences in protein activity. Therefore, modified levels (increased or decreased) of expression as compared to a control provide an indication of the function of a corresponding gene, gene components, and gene products.

[0374] These experiments can determine which are genes “over-expressed” under a given stimulus. Such over-expressed genes give rise to higher transcript levels in a plant or cell that is stimulated as compared to the transcript levels of the same genes in a control organism or cell. Similarly, differential expression experiments can reveal “under-expressed” genes.

[0375] To increase the cellular response to a stimulus, additional copies of the coding sequences of a gene that is over-expressed are inserted into a cell. Increasing transcript levels of an over-expressed gene can either heighten or prolong the particular cellular response. A similar enhancement can occur when transcription of an under-expressed gene is inhibited. In contrast, the cellular response will be shortened or less severe when the over-expressed genes are inhibited or when expression of the under-expressed genes are increased.

[0376] In addition to analyzing the levels of transcription, the data were also analyzed to gain insight into the changes in transcription over time. That is, while the plants in the experiments were reacting to either an external or internal stimulus, a differential experiment takes a snapshot of the transcription levels in the cells at one specific time. However, a number of snap-shots can be taken at different time points during an external stimulus regime, or at different stages of development during an internal stimulus. These results show how the plant changes transcription levels over time, and therefore protein levels in response to specific stimuli to produce phenotypic changes. These results show that a protein can be implicated in a single, but more likely, in a number of cellular responses.

[0377] II.A.1.b.I. The Transcript Levels of a Protein Over Time in Response to a Stimuli are Revealed by Transcriptional Analyses Over Many Experiments

[0378] Applicants produced data from plants at different times after a specific stimulus. These results show whether the expression level of a gene spikes at a key moment during the cellular response, or whether the transcript level remains constant. Thus, coding sequences not only can be determined to be over- or under-expressed, but also can be classified by the initial timing and duration of differential expression. This understanding of timing can be used to increase or decrease any desired cellular response.

[0379] Generally, Applicants have assayed plants at 2 to 4 different time points after exposing the plants to the desired stimuli. From these experiments, “early” and “late” responders were identified. These labels are applied to either the regulatory sequences driving transcription of the gene as well as to the protein encoded by the gene.

[0380] The example in FIG. 5 illustrates how the genes, gene components and products were classified as either early or late responders following a specific treatment. The mRNAs from plants exposed to drought conditions were isolated 1 hour and 6 hours after exposure to drought conditions. These mRNAs were tested utilizing microarray techniques. The graph I FIG. 5 illuminates possible transcription profiles over the time course, plotting all the (+) data points as +1 and all the (−) data points as −1 (the value for each time point was determined using a pair of microarray chips as described above).

[0381] Data acquired from this type of time course experiment are useful to understand how one may increase or decrease the speed of the cellular response. Inserting into a cell extra copies of the coding sequence of early responders in order to over-express the specific gene can trigger a faster cellular response. Alternatively, coding sequences of late responders that are over-expressed can be placed under the control of promoters of early responders as another means to increase the cellular response.

[0382] Inserting anti-sense or sense mRNA suppression constructs of the early responders that are over-expressed can retard action of the late responders, thereby delaying the desired cellular response. In another embodiment, extra copies of the promoters of both early and late responders can be added to inhibit expression of both types of over-expressed genes.

[0383] The experiments described herein can be grouped together to determine the time course of the transcript levels of different coding sequences in response to different stimuli. Examples of different groups are as follows (the examples include the IDs for both corn and Arabidopsis experiments):
[0384] NAA (EXPT IDs 108564, 108565, 108516, 108554)
[0385] BA (EXPT IDs 108566, 108567, 108517)
[0386] GA (EXPT IDs 108562, 108563, 108519, 108520, 108521, 108484, 108485, 108486)
[0387] BR (EXPT IDs 108580, 108581, 108557, 108478, 108479, 108480, 108481)
[0388] ABA (EXPT IDs 108560, 108561, 108513, 108597)
[0389] Drought (EXPT IDs 108572, 108573, 108502, 108503, 108504, 108556, 108482, 108483, 108473, 108474, 108477)
[0390] Cold (EXPT IDs 108578, 108579, 108533, 108534)
[0391] Heat (EXPT IDs 108576, 108577, 108522, 108523)
[0392] Osmotic stress (EXPT IDs 108570, 108571, 108541, 108542, 108553, 108539, 108540)
[0393] Reactive Oxygen (EXPT IDs 108582, 108583, 108537, 108538, 108558)
[0394] NO (EXPT IDs 108584, 108585, 108526, 108527, 108559)
[0395] Wounding (EXPT IDs 108574, 108575, 108524, 108525)
[0396] SA (EXPT IDs 108586, 108587, 108515, 108552, 108471, 108472, 108469, 108470, 107953, 107960, 108443, 108440, 108441, 108475, 108476)
[0397] MeJA (EXPT IDs 108568, 108569)
[0398] Finale (EXPT IDs 108467, 107871, 107876)
[0399] Trimec (EXPT IDs 108466, 107886, 107891)
[0400] Round-up (EXPT IDs 108465, 107896)
[0401] Glean (EXPT IDs 108468, 107881)

[0402] II.A.1.b.2. The Transcript Levels of a Protein Over Different Developmental Stages can be Identified by Transcriptional Analyses Over Many Experiments

[0403] Differential expression data were produced for different development stages of various organs and tissues. Measurement of transcript levels can divulge whether specific genes give rise to spikes of transcription at specific times during development, or whether transcription levels remain constant. This understanding can be used to increase speed of development, or to arrest development at a specific stage.

[0404] Like the time-course experiments, the developmental stage data can classify genes as being transcribed at early or late stages of development. Generally, Applicants assayed different organs or tissues at 2-4 different stages.

[0405] Inhibiting under-expressed genes at either early or late stages can trigger faster development times. The overall development time also can be increased by this means to allow organs and tissue to grow to a larger size or to allow more organs or tissues to be produced. Alternatively, coding sequences of late stage genes that are under-expressed can be placed under the control of promoters of early stage genes to increase heighten development.

[0406] Inserting extra copies of the coding sequence early stage genes that are under-expressed can retard action of the late-stage genes and delay the desired development.

[0407] Fruit development of Arabidopsis is one example that can be studied. Siliques of varying sizes, which are representative of different stages, were assayed by microarray techniques. Specifically, mRNA was isolated from siliques between 0-5 mm, between 5-10 mm and >10 mm in length. The graph of FIG. 6 shows expression pattern of a cell wall synthesis gene, cDNAID 1595707, during fruit development.

[0408] The developmental course shows that the gene encoding a cell wall synthesis protein is up-regulated when the fruit is 0-5 mm but returns to normal levels at 5-10 mm and >10 mm. Increase of cell wall synthesis can lead to larger cells and/or greater number of cells. This type of increase can boost fruit yield. The coding sequence of the cell wall synthesis protein under the control of a strong early stage promoter would increase fruit size or number.

[0409] A pectinesterase gene was also differentially expressed during fruit development, cDNA ID 1396123. Pectinesterase catalyzes the hydrolysis of pectin into pectate and methanol. This biochemical activity plays an important role in cell wall metabolism during fruit ripening. To shorten the time for fruit ripening, extra copies of this gene with its endogenous promoter can be inserted into a desired plant. With its native promoter, the extra copies of the gene will be expressed at the normal time, to promote extra pectinesterase at the optimal stage of fruit development thereby shortening ripening time.

[0410] A number of Applicant's experiments can be grouped together to study changes of transcript levels over a number development stages. Below are examples of groups of experiments:
[0411] a Root, Root Tip, and rhl mutant (EXPT IDs 108594, 108433, 108599, 108434, 108439)
[0412] Flowers Drought Exposed Flowers, SA Treated Flowers (EXPT IDs 108473, 108474, 108429, 108430, 108431, 108475, 108476, 108501)
[0413] BR Shoot Apices, Leaves, Stm (EXPT IDs 108478, 108479, 108480, 108481, 108598, 108535, 108536, 108435)
[0414] Leaf and Stm (EXPT IDs 108477, 108512, 108497, 108498, 108598, 108478, 108479, 108480, 108481, 108598, 108535, 108536, 108435)
[0415] Imbibded & Germinating Seeds 1, 2, 3, And 4 Days (EXPT IDs 108461, 108462, 108463, 108464, 108528, 108529, 108530, 108531, 108545, 108546, 108547, 108518, 108529, 108543, 108544)
[0416] Tissue Specific Expression (3 week rosette leaves, Tissue Specific Expression (3 week stems), Tissue Specific Expression (2 week roots) (EXPT IDs 108497, 108498, 108439)
[0417] Tissue Specific Expression (3 week rosette leaves), Germinating Seeds (EXPT IDs 108497, 108461)
[0418] Tissue Specific Expression (3 week rosette leaves, stm mutants, BR_Shoot Apices Expt, root tips, Tissue Specific Expression (2 week roots) (EXPT IDs 108497, 108435, 108480, 108434, 108439)
[0419] BR_Shoot Apices Expt, root tips, Tissue Specific Expression (flower buds) (EXPT IDs 108480, 108434, 108431)
[0420] Arab_Ler-pi_ovule_{—}1, ap2-floral buds, Tissue Specific Expression (flower buds), Tissue Specific Expression (<5 mm siliques) (EXPT IDs 108595, 108501, 108431, 108437)
[0421] Tissue Specific Expression (2 week roots), rhl mutant2, BR_Shoot Apices Expt, Trichome Inflorescences (EXPT IDs 108439, 108433, 108480, 108452)

[0422] II.A.1.b.3. Proteins that are Common in a Number of Similar Responses can be Identified by Transcriptional Analyses Over a Number of Experiments

[0423] The differential expression experiments also reveal the genes, and therefore the coding sequence, that are common to a number of cellular responses. By identifying the genes that are differentially expressed in a number of similar responses, the genes at the nexus of a range of responses are discovered. For example, genes that are differentially expressed in all the stress responses are at the hub of many of the stress response pathways.

[0424] These types of nexus genes, proteins, and pathways are differentially expressed in many or majority of the responses or developmental conditions of interest. Typically, a nexus gene, protein, or pathway is differentially expressed in generally the same direction in many or majority of all the desired experiments. By doing so, the nexus gene can be responsible for triggering the same or similar set of pathways or networks for various cellular responses. This type of gene is useful in modulating pleiotropic effects or triggering or inhibiting a general class of responses.

[0425] When nexus genes are differentially expressed in a set of responses, but in different directions, these data indicate that a nexus gene is responsible for creating the specificity in a response by triggering the same pathway but to a different degree. Placing such nexus genes under a constitutive promoter to express the proteins at a more constant level can remove the fluctuations. For example, a plant that is better drought adapted, but not cold adapted can be modified to be tolerant to both conditions by placing under the control of a constitutive promoter a nexus gene that is up-regulated in drought but down regulated in cold.

[0426] Applicants' experiments can be grouped together to identify such nexus genes. Examples of these groups are as follows:
[0427] Herbicide Response
   [0428] Trimec, Finale, Glean, Round-up (EXPT IDs 108467, 107871, 107876, 108468, 107881, 108465, 107896, 108466, 107886, 107891)
[0429] Stress Response
   [0430] Drought, Cold, Heat, Osmotic Stress (EXPT IDs 108578, 108579, 108533, 108534, 108572, 108573, 108502, 108503, 108504, 108556, 108482, 108483, 108473, 108474, 108477, 108576, 108577, 108522, 108523, 108570, 108571, 108541, 108542, 108553, 108539, 108540)
   [0431] Drought, Cold, Heat, PEG, Trimec, Finale, Glean, Round-up (EXPT IDs 108578, 108579, 108533, 108534, 108572, 108573, 108502, 108503, 108504, 108556, 108482, 108483, 108473, 108474, 108477, 108576, 108577, 108522, 108523, 108570, 108571, 108541, 108542, 108553, 108539, 108540)
   [0432] Wounding, SA, MeJA, Reactive Oxygen, NO (EXPT IDs 108568, 108569, 108555, 108584, 108585, 108526, 108527, 108559, 108582, 108583, 108537, 108538, 108558, 108586, 108587, 108515, 108552, 108471, 108472, 108469, 108470, 107953, 107960, 108443, 108440, 108441, 108475, 108476, 108574, 108575, 108524, 108525)
[0433] Hormone Responses
   [0434] NAA, BA, BR, GA, TRIMEC (EXPT IDs 108566, 108567, 108517, 108580, 108581, 108557, 108478, 108479, 108480, 108481, 108562, 108563, 108519, 108520, 108521, 108484, 108485, 108486, 108564, 108565, 108516, 108554, 108466, 107886, 107891)
   [0435] NAA, Trimec (EXPT IDs 108566, 108567, 108517, 108580, 108581, 108557, 108478, 108479, 108480, 108481, 108562, 108563, 108519, 108520, 108521, 108484, 108485, 108486, 108564, 108565, 108516, 108554, 108466, 107886, 107891)

[0436] II.A.1.b.4. Proteins that are Common to Disparate Responses can be Identified by Transcriptional Analyses Over a Number of Experiments

[0437] Phenotypes and traits result from complex interactions between cellular pathways and networks. Which pathways are linked by expression of common genes to specify particular traits can be discerned by identifying the genes that show differential expression of seemingly disparate responses or developmental stages. For example, hormone fluxes in a plant can direct cell patterning and organ development. Genes that are differentially expressed both in the hormone experiments and organ development experiments would be of particular interest to control plant development.

[0438] Examples of Such Pathway Interactions Include:
[0439] (i) The Interaction Between Stress Tolerance Pathways And Metabolism Pathways;
[0440] (ii) Interaction Between Hormone Responses And Developmental Changes In The Plant;
[0441] (iii) Interactions Between Nutrient Uptake And Developmental Changes;
[0442] (iv) Mediation Of Stress Response By Hormone Responses; And
[0443] (v) Interactions Between Stress Response And Development.
   Applicant's experiments can be grouped together to identify proteins that participate in interacting pathways or networks. Specific groups of experiments include, for example:

[0444] (i) Stress & Metabolism
[0445] Germinating Seeds (Day 1), Arab_{—}0.1uM_Epi-Brass_{—}1, Arab_NO3_H-to-L_{—}1, Arab_{—}100uM_GA3_{—}1 (EXPT IDs 108461, 108580, 108592, 108562)

[0446] (ii) Hormones & Development
[0447] NAA, BA & Root Tips (EXPT IDs 108566, 108567, 108517, 108564, 108565, 108516, 108554, 108434, 108466, 107886, 107891)
[0448] NAA, Roots & Root Tips (EXPT IDs 108564, 108565, 108516, 108554, 108599, 108434, 108439, 108466, 107886, 107891)
[0449] NAA, BA, Roots And/Or Root Tips (EXPT IDs 108564, 108565, 108516, 108554, 108599, 108434, 108439, 108466, 107886, 107891, 108566, 108567, 108517)
[0450] NAA, BA And Leaf (EXPT IDs 108566, 108567, 108517, 108518, 108529, 108512, 108497, 108498, 108598, 108564, 108565, 108516, 108554, 108466, 107886, 107891)
[0451] NAA, BA, Leaves, Roots And/Or Root Tips (EXPT IDs 108566, 108567, 108517, 108518, 108529, 108512, 108497, 108498, 108598, 108564, 108565, 108516, 108554, 108466, 107886, 107891, 108599, 108434, 108439)
[0452] ABA & Siliques (Of Any Size) (EXPT IDs 108560, 108561, 108513, 108597, 108436, 108437, 108438)
[0453] GA, Imbibed & Germinating Seeds, ABA & Siliques (Of Any Size) (EXPT IDs 108560, 108561, 108513, 108597, 108562, 108563, 108519, 108520, 108521, 108484, 108485, 108486, 108461, 108462, 108463, 108464, 108528, 108529, 108530, 108531, 108545, 108546, 108547, 108518, 108529, 108543, 108544, 108436, 108437, 108438)
[0454] Tissue Specific Expression (3 week rosette leaves), Arab_{—}0.1uM_Epi-Brass_{—}1, Arab_{—}100uM_GA3_{—}1, Germinating Seeds (Day 1), (EXPT IDs 108461, 108497, 108580, 108562, 108461)

[0455] (iii) Nutrient Uptake And Development
[0456] Any Or All Nitrogen Experiments With Siliques (Of Any Size) (EXPT IDs 108592, 108593, 108588, 108589, 108590, 108591, 108532, 108548, 108549, 108550, 108551, 108454, 108455, 108487, 108488, 108489, 108436, 108437, 108438)
[0457] Any Or All Nitrogen Experiments With Roots Or Root Tips (EXPT IDs 108518, 108529, 108592, 108593, 108588, 108589, 108590, 108591, 108532, 108548, 108549, 108550, 108551, 108454, 108455, 108487, 108488, 108489, 108594, 108433, 108599, 108434, 108439)

[0458] (iv) Stress & Hormones
[0459] ABA, Drought (EXPT IDs 108560, 108561, 108513, 108597, 108572, 108573, 108502, 108503, 108504, 108556, 108482, 108483, 108473, 108474, 108477)
[0460] ABA, Drought, Cold, Heat, & Wounding (EXPT IDs 108560, 108561, 108513, 108597, 108578, 108579, 108533, 108534, 108572, 108573, 108502, 108503, 108504, 108556, 108482, 108483, 108473, 108474, 108477, 108576, 108577, 108522, 108523, 108574, 108575, 108524, 108525)
[0461] Tissue Specific Expression (3 week rosette leaves), Arab_{—}100uM_ABA_{—}1, Ws Arabidopsis Drought 2 days, Ws Arabidopsis Drought 4 days (EXPT IDs 108497, 108560, 108477, 108482)

[0462] (v) Stress & Hormones Stress & Hormones
[0463] Nitrogen High transition to Low, Arab_NO3_H-to-L_{—}1, Tissue Specific Expression (<5 mm siliques), Tissue Specific Expression (5-10 mm siliques) (EXPT IDs 108455, 108592, 108437, 108436)

[0464] II.A.1.c. Observations of Phenotypic Changes Show What Physiological Consequences Applicants' Proteins can Produce

[0465] Another direct means of determining the physiological consequences of a protein is to make aberrant decreases or increases of its expression level in a cell. To this end, Applicants have produced plants where specific genes have been disrupted, or produced plants that include an extra expressed copy of the gene. The plants were then planted under various conditions to determine if any visible physiological changes are caused. These changes then are attributed to the changes in protein levels.

[0466] II.A.2. Differential Expression Results Explain which External or Internal Stimuli Trigger the Regulatory Sequences

[0467] Transcriptional studies can reveal the time and place that genes are expressed. Typically, regulatory sequences, such as promoters, introns, UTRs, etc., control when and in which cells transcription occurs. Differential studies can explain the temporal- and location-specific regulatory sequences that control transcription.

[0468] Using the experiments that are provided herein, one skilled in the art can choose a promoter or any other regulatory sequence that is capable of facilitating the desired pattern of transcription. For example, if a promoter is needed to give rise to increased levels of transcription in response to Auxin, but little expression in response to cytokinin, then the promoters of cDNAs that were up-regulated in the Auxin experiments, but down-regulated the cytokinin experiments would be of interest.

[0469] Time Course Experiments—Time Sensitive

[0470] Evaluation of time-course data as described above is also useful to identify time-specific promoters. Promoters or regulatory sequences, like the coding sequences, can be classified as early or late responding according to the microarray data. Promoters that facilitate expression of early or late genes are useful to direct expression of heterologous coding sequences to modulate the cellular response. In the drought data, promoters from “early” responding genes can be selected to activate expression of any desired coding sequence. Thus, a coding sequence for a salt-tolerance protein that is not typically expressed early in response to drought could be linked to an “early” responding promoter to increase salt tolerance within one hour after exposure to drought conditions.

[0471] Developmental Experiments—Time Sensitive

[0472] Another class of time-sensitive promoters and other regulatory sequence can be identified from the experiments examining different developmental stages. These regulatory sequences can drive transcription of heterologous sequence at particular times during development. For example, expression of stress-responsive genes during fruit development can protect any gain in fruit yield.

[0473] Common to Many Pathways—Cause General Effects

[0474] Promoters and other regulatory sequence associated with cDNAs that are differentially expressed in a number of similar responses can be used to cause general effects. These types of regulatory sequences can be used to inhibit or increase expression of a desired coding sequence in a number circumstances. For example, protein that is capable of acting as an insecticide can be placed under the control a general “stress” promoter to increase expression, not only when the plant is wounded, but under other stress attack.

[0475] II.B. Experimental Results Also Reveal Pathways or Networks of Genes

[0476] II.B.1. Genes Whose Transcription are Well Coordinated Generally Act Together to Produce Proteins that Participate in the Same Pathway or Network

[0477] Patrick Brown, one of the pioneers of microarray chip technology, demonstrated that differential expression experiments can identify groups of genes that encode proteins that participate the same pathway or network. The work focused on phosphate accumulation and metabolism genes in yeast and was published in the paper Ogawa et al., Mol Biol Cell (2000) December; 11(12):4309-21. The authors identified by microarray analysis 22 genes whose transcription was regulated by phosphate concentration. Promoter analysis of these genes showed that 21 of them contained a sequence in their promoters that is recognized by a transcriptional activator that is regulated by phosphate. Further, phenotypic studies were completed by mutational analysis of many of these 22 genes in yeast. The mutants were shown to be either severely deficient in accumulation of inorganic polyphosphate (polyP) and P(i), or associated with normal catabolism of polyP in the yeast vacuole. This publication proves that genes with correlated transcriptional profiles do indeed participate in the same pathway or network.

[0478] II.B.1.a. Calculating the Correlation Coefficient Between Pairs of Genes Based on the Differential Expression Data

[0479] The differential expression data obtained over many experiments reveal the global pattern of transcription of a gene. Transcription patterns, also referred to as profiles, of two different genes can be compared. From this comparison, a correlation coefficient can be calculated as a measure of the strength of the relationship between the two profiles.

[0480] Transcription profiles can be compared by plotting as a point, the differential expression of gene1 on the x-axis and gene 2 on the y-axis on one experiment. If all the pairs lie on a regression line the relationship and correlation between the two genes are strong. The correlation coefficient can be calculated using a number of methods. In the present case, the Spearman method was utilized.

[0481] The correlation coefficient can vary from −1 to 1. The coefficient indicates the strength of the relationship between two mRNA transcripts of any set of data that is examined. A zero coefficient indicates that no correlation exists between the transcription profiles of two genes in the samples examined.

[0482] Biologically, a high correlation coefficient indicates that a gene(s) triggers the activation or repression of the correlated genes, or have related functional roles. Thus, illumination of the activity of one gene can indicate the activities of the genes with highly correlated transcription profiles. This implication is true whether the activity is a biochemical activity, molecular interaction, cellular response, or physiological consequence.

[0483] II.B.1.b. The Complete Linkage Analyses of Differential Identity Genes with Similar Pattern of Transcription

[0484] The complete linkage analysis can build groups (or “clusters”) of genes whose transcription patterns are highly correlated or co-regulated.

[0485] Because genes with related functions are frequently expressed in similar patterns, utilities or roles can be ascribed for genes (without observation of transformed plants) based on their temporal association with other genes of known function (a “guilt-by-association” analysis). Ogawa et al. has used correlated mRNA transcription profiles to identify the function of proteins of unknown function.

[0486] The complete linkage analysis utilizes the correlation coefficients that are calculated for each pair of genes tested in the microarray experiments. A cluster is first seeded with any arbitrary transcript tested on the chip. The seed transcript, for this illustration, is designated mRNA#0. Next, a minimum threshold is chosen for all acceptable correlation coefficients. In this case, the threshold used was 0.75. A list of potential cluster members is compiled by choosing mRNA transcripts that have a correlation coefficient with mRNA#0 that is greater than the threshold. No limit is placed on the number of mRNAs that can be added to a cluster so long as the correlation coefficient meets the threshold limit criterion.

[0487] For this example, assume that four mRNAs were added to the cluster, mRNA_{—}1 to mRNA_{—}4. Once the potential cluster members are identified, the cDNA IDs of each member is added to the potential list in order its correlation coefficient to mRNA#1, the largest correlation coefficient first. For this example, let's suppose four mRNAs 1-4 are potential members, they would be ordered as follows:

| | Correlation Coefficient |
|---|---|
| MRNA# | with mRNA#0 |
| MRNA#1 | 0.9 |
| MRNA#2 | 0.8 |
| MRNA#3 | 0.78 |
| MRNA#4 | 0.75 |

[0488] A potential member is accepted into the group, if its correlation coefficients with all other potential members are all greater than the threshold. Thus, for mRNA#1 to remain in the group the correlation coefficient between mRNA#1 and mRNA#2 must be greater than 0.75; and mRNA#1 and #3>0.75; and mRNA#1 and mRNA#4>0.75. Potential cluster members are removed only after reviewing the correlation coefficients in a specific order where mRNAs are reviewed in the order that they appear on the list.

[0489] Consequently, review of the correlation coefficients does not begin with any random pair, such as mRNA#3 and mRNA#4. The review begins between mRNA#1 and mRNA#2, which are the top two on the list.

[0490] If correlation coefficient between mRNA#1 and mRNA#2 is less than the threshold, then mRNA#2 is removed from the cluster. mRNA#2 is removed because its correlation coefficient with mRNA#0 is 0.8 which is less than 0.9, the correlation coefficient of mRNA#1 and mRNA#0.

[0491] This illustrates the rule that if the correlation coefficient is less than the threshold, then only one of the pair not accepted as a cluster member, specifically, the one with the lower coefficient to the seed mRNA#0.

[0492] This process of iterative reviewing of correlation coefficients between potential members continues until all pairs are reviewed. In this case, the coefficient between mRNA#1 and mRNA#3 would be reviewed because these are the two highest ones on the list besides mRNA#1 and #2. The next pair to be reviewed would be mRNA#1 and #4, etc.

[0493] Applicants have analyzed the data using several sets of parameters for the complete linkage analysis as shown in the table below:

| | Correlation Coefficient | Max number of | |
|---|---|---|---|
| Method | Threshold | members in a cluster | Organism |
| CL_METHOD_TYPE = | 0.9 | MAX_SIZE = 15 | Arabidopsis |
| TRUE | | | |
| CL_METHOD_TYPE = | 0.75 | MAX_SIZE = 30000 | Arabidopsis |
| TRUE | | | |
| CL_METHOD_TYPE = | 0.70 | MAX_SIZE = 30000 | Arabidopsis |
| TRUE | | | |
| CL_METHOD_TYPE = | 0.9 | MAX_SIZE = 15 | Zea |
| TRUE | | | |
| CL_METHOD_TYPE = | 0.75 | MAX_SIZE = 30000 | Zea |
| TRUE | | | |
| CL_METHOD_TYPE = | 0.70 | MAX_SIZE = 30000 | Zea |
| TRUE | | | |
| CL_METHOD_TYPE = | 0.9 | MAX_SIZE = 15 | Arabidopsis |
| TRUE | | | |
| CL_METHOD_TYPE = | 0.75 | MAX_SIZE = 30000 | Arabidopsis |
| TRUE | | | |
| CL_METHOD_TYPE = | 0.70 | MAX_SIZE = 30000 | Arabidopsis |
| TRUE | | | |
| CL_METHOD_TYPE = | 0.9 | MAX_SIZE = 15 | Zea |
| TRUE | | | |
| CL_METHOD_TYPE = | 0.75 | MAX_SIZE = 30000 | Zea |
| TRUE | | | |
| CL_METHOD_TYPE = | 0.70 | MAX_SIZE = 30000 | Zea |
| TRUE | | | |

[0494] The results of these cluster analyses are reported in the MA_clust table.

[0495] II.B.1.c. The Nearest Neighbor Analyses of Differential Group Genes with Correlated but Dissimilar Transcription Profiles

[0496] The nearest neighbor analysis differs from the complete linkage algorithm by not requiring all members to meet the correlation threshold with each other. Thus, a member of a nearest neighbor cluster need only be closely correlated to one other member of the cluster. It is not even required that all members be closely correlated to the seed mRNA transcript.

[0497] In a complete linkage cluster all the transcription profile of all members are correlated to a greater or lesser extent. In contrast, a cluster deduced by the nearest neighbor analysis may include members with differing transcription profiles. However, nearest neighbor brings to light clusters of interacting genes. In the nearest neighbor analysis, the seed mRNA may not have a very high correlation coefficient with the last mRNA added to the cluster.

[0498] The nearest neighbor analysis, like the complete linkage analysis, is initiated by seeding each cluster with a mRNA_{—}0. The cluster size is determined by setting a threshold coefficient and setting a limit on the number of members that can be added to the cluster.

[0499] The cluster is expanded in an iterative fashion determining which mRNA has the highest correlation coefficient with mRNA_{—}0. The additional member is labeled mRNA_{—}1. Next, a list of potential candidates is generated by finding the mRNA that has the highest correlation to mRNA_{—}0 (besides mRNA_{—}1) and finding the mRNA that has the highest coefficient with mRNA_{—}1. Whichever of the candidates has the highest correlation coefficient is added to the cluster. Then, a list of three potential candidates is generated similarly.

[0500] Addition of members continues until either (1) all the correlation coefficients of potential members is lower than the threshold or (2) number of members in the cluster meets the size limitation.

[0501] Applicants have analyzed the data using several sets of parameters for the nearest neighbor analysis as shown in the table below:

| | Correlation | Max number of | |
|---|---|---|---|
| | Coefficient | members in a | |
| Method | Threshold | cluster | Organism |
| NN_METHOD_TYPE = TRUE | 0.5 | MAX_HITS = 15 | Arabidopsis |
| FULL_NN_METHOD_TYPE = | 0.8 | NONE | Arabidopsis |
| TRUE | | | |
| FULL_NN_METHOD_TYPE = | 0.6 | NONE | Arabidopsis |
| TRUE | | | |
| NN_METHOD_TYPE = TRUE | 0.5 | MAX_HITS = 15 | Zea |
| FULL_NN_METHOD_TYPE = | 0.8 | NONE | Zea |
| TRUE | | | |
| FULL_NN_METHOD_TYPE = | 0.6 | NONE | Zea |
| TRUE | | | |
| NN_METHOD_TYPE = TRUE | 0.5 | MAX_HITS = 15 | Arabidopsis |
| FULL_NN_METHOD_TYPE = | 0.8 | NONE | Arabidopsis |
| TRUE | | | |
| FULL_NN_METHOD_TYPE = | 0.6 | NONE | Arabidopsis |
| TRUE | | | |
| NN_METHOD_TYPE = TRUE | 0.5 | MAX_HITS = 15 | Zea |
| FULL_NN_METHOD_TYPE = | 0.8 | NONE | Zea |
| TRUE | | | |
| FULL_NN_METHOD_TYPE = | 0.6 | NONE | Zea |
| TRUE | | | |

[0502] The results of these cluster analyses are reported in the MA_clust table.

[0503] II.C. Experimental Results Reveal the Functions and Characteristics of Genes, Pathways and Networks

[0504] II.C.1. Linking Biochemical or Metabolic Activities of One Protein in a Cluster to the Other Proteins in the Same Microarray Cluster

[0505] As shown in the Ogawa et al., Mol Biol Cell (2000), genes whose transcription profiles cluster together as being strongly correlated typically take part in the same pathway or network. Thus, the activity of one gene in the cluster can be associated to the other genes in the cluster with highly correlated transcription profiles. This association is true whether the activity is a biochemical activity, molecular interaction, cellular response or physiological consequence.

[0506] One example of this is cluster 420 of the report (shown below). In this cluster, a protein encoded by cDNA ID 1025791 did not match to any pFAM domain. However, through the microarray data, the gene that encodes that protein had a transcription profile that was correlated with other genes that encode ribosomal proteins. Thus, the activity of the ribosomal genes can be associated with the protein with no pFAM match. All the proteins in the same cluster would be associated with mRNA translation and protein synthesis.

[chemical structure]

[chemical structure]

[chemical structure]

[chemical structure]

[chemical structure]

[chemical structure]

[chemical structure]

[chemical structure]

[chemical structure]

[chemical structure]

[chemical structure]

[chemical structure]

[chemical structure]

[chemical structure]

[chemical structure]

[chemical structure]

[chemical structure]

[chemical structure]

[chemical structure]

[chemical structure]

[chemical structure]

[chemical structure]

[0507] II.C.2 Using Differential Expression Data to Determine when the Genes and Pathways are Active

[0508] The differential expression data can be used to associate the cellular response that results when the clusters of genes are transcribed. For the complete linkage clusters, the genes in the cluster will produce similar transcription profiles. The experiments where the genes in the cluster are differentially expressed as compared to the control define the cellular responses that all the genes of the cluster are capable of modulating.

[0509] For example, for the cluster shown above, the mRNA levels for the genes were significantly different in the nitrogen response experiments. Thus, the data shows that this cluster of genes is associated with protein synthesis in response to nutrient uptake.

[0510] II.C.3. Using Phenotype Data to Determine when Genes and Pathways are Active

[0511] The phenotypic data can be used to demonstrate the physiological consequences of that result when a cluster of genes is active. Whether the clusters were generated by the complete linkage or the nearest neighbor analyses, if a single gene in the cluster has been implicated in phenotypic changes, then any one or combination of the other genes in the cluster can also modulate the same or similar phenotypic changes.

[0512] Utilities of Particular Interest

[0513] The following sections describe utilities/functions for the genes, gene components and products of the invention. The sequences of the invention, as discussed above, can be recognized as a particular type of gene (e.g. root gene, leaf gene, etc.) by means of particular terms utilized in the Knock-in and Knock-out Tables and by the results of the differential expression experiments. Combined analysis of those data also identify genes with utilities/functions of particular interest. The Single Gene Functions and Utilities Table correlates that data and specific genes with those utilities/functions of particular interest.

[0514] Utilities of Particular Interest for Clustered Sequences

[0515] As discussed further herein, the genes, gene components and products of the invention have been clustered together into groups. This enables one to understand the function/utility of one member of the cluster based upon knowledge about one or more other members of the cluster. In addition, this enables an understanding of some utilities/functions of a cluster that would be of particular interest. The Cluster Functions and Utilities Table lists some of the clusters of the invention and notes the functions/utilities that are of particular interest for each of the clusters. Of course, these functions/utilities are of particular interest for each member of each particular cluster.

[0516] II.D. Experimental Results Provide an Understanding of Genes, Pathways and Networks in Many Plant Species

[0517] By analyzing the constant and variable properties of groups of similar sequences, it is possible to derive a structural and functional signature for a protein family, which distinguishes its members from all other proteins. This approach has allowed the Applicants to assign proteins into functional groups and identify orthologous proteins both within and between species. A pertinent analogy to be considered is the use of fingerprints by the police for identification purposes. A fingerprint is generally sufficient to identify a given individual. Similarly, a protein signature can be used to assign a newly sequenced protein to a specific family of proteins and thus to formulate hypotheses about its function.

[0518] Proteins can be grouped together because they share a single motif or many motifs. Typically, proteins that share a series of motifs share greater functional equivalence. Usually, signature sequences comprise more than one motif in a particular order from N-terminus to C-terminus.

[0519] A list of these groups can be found in the Protein Group Table. The sequences were grouped together using the iterative protein sequence local alignment software, PSI-BLAST. This software begins by aligning a number sequences where the probability that the alignment occurred by chance is set by a threshold e-value. In the Applicants' case, the threshold e-value was set at 10⁻⁵⁰, 10⁻³⁰, and 10⁻¹⁰. The algorithm generates a consensus sequence from the sequences that were aligned together. The consensus sequence was then used to find sequences that matched to it with a probability that was less than the set threshold. The algorithm performs the iterative tasks of aligning and generating a consensus sequence any number of times. Generally, Applicants performed one iteration for the 10⁻¹⁰ e-value threshold, two iterations for the 10⁻³⁰ threshold, and three iterations for the 10⁻⁵⁰ threshold.

[0520] Each group can contain sequences from one of more organisms. The groups included both Ceres polypeptides and public polypeptide sequences. The Ceres polypeptides are identified by their Ceres Sequence ID NO as listed in the Reference Table.

[0521] Each group contains sequences that were included at the 10⁻⁵⁰, 10⁻³⁰, and 10⁻¹⁰ e-value cutoffs. For each group, the peptide ID and at which cutoff the peptide was included into the group. The same peptide ID may be included in the group three times as peptide ID 50, peptide ID 30 and peptide ID 10. The data indicates that peptide ID was included in the group when the threshold was either 10⁻⁵⁰, 10⁻³⁰, or 10⁻¹⁰. All the peptide IDs that are followed by “50” were included in the protein group when the e-value cutoff was 10⁻⁵⁰. All the peptide IDs that are followed by either “30” or “50” were included in the protein group when the threshold e-value was 10⁻³⁰. All the peptide IDs that are followed by “10”, “30” or “50” were included in the protein group when 10⁻¹⁰ was used as the e-value cutoff.

[0522] II.D.1. Conserved Sequences Between Proteins of Different Species Give Rise to a Signature Sequence

[0523] The signature sequence for each group of proteins, also referred to as the consensus sequence. The signature sequence comprises the amino acids that are conserved throughout all the proteins in a particular protein group. The data are shown in the Protein Group table.

[0524] Not all the polypeptides in a group are the same length. Thus, some members of the group may not contain the entire signature sequence. However, throughout the length of any member protein, its sequence will match the signature sequence.

[0525] The consensus sequence contains both lower-case and upper-case letters. The upper-case letters represent the standard one-letter amino acid abbreviations. The lower case letters represent classes of amino acids:
[0526] “t” refers to tiny amino acids, which are specifically alanine, glycine, serine and threonine.
[0527] “p” refers to polar amino acids, which are specifically, asparagine and glutamine
[0528] “n” refers to negatively charged amino acids, which are specifically, aspartic acid and glutamic acid
[0529] “+” refers to positively charged residues, which are specifically, lysine, arginine, and histidine
[0530] “r” refers to aromatic residues, which are specifically, phenylalanine, tyrosine, and tryptophan,
[0531] “a” refers to aliphatic residues, which are specifically, isoleucine, valine, leucine, and methonine

[0532] In addition to each consensus sequence, Applicants have generated a scoring matrix to provide further description of the consensus sequence. The matrix reports the identity and number of occurrences of all the amino acids that were found in the group members for every residue position of the signature sequence. The matrix also indicates for each residue position, how many different organisms were found to have a polypeptide in the group that included a residue at the relevant position. These results are reported in the Protein Group Matrix table.

[0533] Functional equivalents share similar (1) structural characteristics; (2) biochemical activities and molecular interactions; (3) cellular responses or activities; or (4) phenotypic effects.

[0534] II.D.2. Linking Signature Sequences to Conservation of Structural Characteristics

[0535] Proteins with related functions show similar three-dimensional structures but may not show extensive amino acid sequence similarity. Typically, proteins need only share a single motif or low similarity in multiple domains to exhibit similar structural features, such as alpha helix, beta sheet, charge residues, stretches of hydrophobicity, etc. Conserved structural features have been implicated in ligand binding by receptor proteins, binding to a class of substrates, polynucleotide binding, or protein-protein interactions.

[0536] Based on the signature sequences and the Matrix Tables described herein, a number of motifs can be discerned. Motifs are identified as regions in the signature sequence which are constant in a majority of the members of the group. Example motifs can be found among Applicant's data which are shared in the range of 75% to 95% of group members

[0537] Typically, a region of the consensus sequence is constant if, at each position of the region, the preferred amino acid is chosen from a single class of amino acids; even more typically, the preferred amino acid is a single amino acid. The region can contain a number of positions where an amino acid can be chosen. However, these variable positions are usually less than 15% of the total number of residues in the region; more usually, less than 10%; even more usually, less than 5%.

[0538] Generally, a domain is considered to be well defined if the consensus sequence is constructed from sequences from at least 2 organisms; more preferably, at least 3 organisms; even more preferably four organisms or greater.

[0539] Primary domains are best identified from the data presented for the 10⁻¹⁰ probability criteria. Using this parameter, the largest number of proteins is associated into a group. Consequently, the signature sequence exhibits the greatest amount of variability. The conserved regions, the domains or motifs of the signature contrast against the variable regions. These variable regions become obvious when sequences from more proteins are compared.

[0540] Signature sequences revealed in the 10⁻³⁰ and 10⁻⁵⁰ e-value classes show more conservation in the domains, and can even display a degree of conservation in what is considered the variable regions in the 10⁻¹⁰ analyses. These more extensively-conserved domains can reflect higher similarity in function—completely orthologous functions. Proteins that share a number of conserved domains, in the same relative order from N terminus to C terminus, are even more likely to be completely orthologous. Nevertheless, because of the natural divergence that occurs in non-conserved regions during evolution and species differentiation, orthologs can be proteins with only the domains conserved and therefore be present in the 10⁻³⁰ and 10⁻¹⁰ p value classes of the Ortholog Table.

[0541] II.D.3. Linking Signature Sequences to Conservation of Biochemical Activities and Molecular Interactions

[0542] Proteins that possess the same defined domains or motifs are likely to carry out the same biochemical activity or interact with a similar class of target molecule, e.g., DNA, RNA, proteins, etc. Thus, the pFAM domains listed in the Reference Tables are routinely used as predictors of these properties. Substrates and products for the specific reactions can vary from protein to protein. Where the substrates, ligands, or other molecules bound are identical the affinities may differ between the proteins. Typically, the affinities exhibited by different functional equivalents varies no more than 50%; more typically, no more than 25%; even more typically, no more than 10%; or even less.

[0543] Proteins with very similar biochemical activities or molecular interactions will share similar structural properties, such as substrate grooves, as well as sequence similarity in more than one motif. Usually, the proteins will share at least two motifs of the signature sequence; more usually, three motifs; even more usually four motifs or greater. Typically, the proteins exhibit 70% sequence identity in the shared motifs; more typically, 80% sequence identity; even more typically, 90% sequence identity or greater. These proteins also often share sequence similarity in the variable regions between the constant motif regions. Further, the shared motifs will be in the same order from amino- to carboxyl-termini. The length of the variable regions between the motifs in these proteins, generally, is similar. Specifically, the number of residues between the shared motifs in these proteins varies by less than 25%; more usually, does not vary by less than 20%; even more usually, less than 15%; even more usually less than 10% or even less.

[0544] II.D.4. Linking Signature Sequences to Conservation of Cellular Responses or Activities

[0545] Proteins that exhibit similar cellular response or activities will possess the structural and conserved domain/motifs as described in the Biochemical Activities and Molecular Interactions above.

[0546] Proteins can play a larger role in cellular response than just their biochemical activities or molecular interactions suggest. A protein can initiate gene transcription, which is specific to the drought response of a cell. Other cellular responses and activities include: stress responses, hormonal responses, growth and differential of a cell, cell to cell interactions, etc.

[0547] The cellular role or activities of protein can be deduced by transcriptional analyses or phenotypic analyses as well as by determining the biochemical activities and molecular interactions of the protein. For example, transcriptional analyses can indicate that transcription of gene A is greatly increased during flower development. Such data would implicate protein A encoded by gene A, in the process of flower development. Proteins that shared sequence similarity in more than one motif would also act as functional equivalents for protein A during flower development.

[0548] II.D.5. Linking Signature Sequences to Conservation of Phenotypic Effects

[0549] Typically, proteins that are grouped together under the most stringent parameters, e-value≦10⁻⁵, are likely orthologs and therefore, when present in the same or equivalent cells can cause similar phenotypic consequences. These proteins have very high sequence similarity. Typically, if one of the members of a group is an Arabidopsis protein, then the corn ortholog can rescue an Arabidopsis mutant plant that does not produce the Arabidopsis protein. The mutant plant would be rescued as the parental “wild-type” phenotype by expression of a coding sequence of the corn protein of the same orthologous group when present in the appropriate cell types of the plant.

[0550] Preferably, these functional equivalents have sequence motif identity throughout much of the length of the protein. However, proteins that share very high similarity between a number, usually more than two; even more usually, more than three motifs can act as functional equivalents to produce similar phenotypic effects.

[0551] A gene can have coding sequence similarity, i.e., is a homologous. The coding sequence can be sufficient to act as a functional equivalent, although the gene as a whole is not an ortholog. For example, two similar dwf4 coding sequences were found in the Arabidopsis genome. However, this pair of coding sequences had different promoters and hence different roles in Plantae. But when one of the pair was placed under the control of its mates' promoter, the phenotypic effects were similar to the effects produced by its mate coding sequence. Therefore, the coding sequence, but not the genes are orthologous.

### III. Description of the Genes, Gene Components and Products, Together with their Use and Application

[0552] As described herein, the results of Applicant's experiments provide an understanding of the function and phenotypic implications of the genes, gene components and products of the present invention. Bioinformatic analysis provides such information. The sections of the present application containing the bioinformatic analysis, together with the Sequence and Reference Tables, teach those skilled in the art how to use the genes, gene components and products of the present invention to provide plants with novel characteristics. Similarly, differential expression analysis provides additional such information and the sections of the present application on that analysis; together with the MA_Diff Tables and MA_Cluster Tables, describe the functions of the genes, gene components and products of the present invention which are understood from the results of the differential expression experiments. The same is true with respect to the phenotype data, wherein the results of the Knock-in and Knock-out experiments and the sections of the present application on those experiments provide the skilled artisan with further description of the functions of the genes, gene components and products of the present invention.

[0553] As a result, one reading each of these sections of the present application as an independent report will understand the function of the genes, gene components and products of the present invention. But those sections and descriptions can also be read in combination, in an integrated manner, to gain further insight into the functions and uses for the genes, gene components and products of the present invention. Such an integrated analysis does not require extending beyond the teachings of the present application, but rather combining and integrating the teachings depending upon the particular purpose of the reader.

[0554] Some sections of the present application describe the function of genes, gene components and products of the present invention with reference to the type of plant tissue (e.g. root genes, leaf genes, etc.), while other sections describe the function of the genes, gene components and products with respect to responses under certain conditions (e.g. Auxin-responsive genes, heat-responsive genes, etc.). Thus, if one desires to utilize a gene understood from the application to be a particular tissue-type of gene, then the condition-specific responsiveness of that gene can be understood from the differential expression tables, and very specific characteristics of actions of that gene in a transformed plant will be understood by recognizing the overlap or intersection of the gene functions as understood from the two different types of information. Thus, for example, if one desires to transform a plant with a root gene for enhancing root growth and performance, one can know the useful root genes from the results reported in the knock-in and knock-out tables. A review of the differential expression data may then show that a specific root gene is also over-expressed in response to heat and osmotic stress. The function of that gene is then described in (1) the section of the present application that discusses root genes, (2) the section of the present application that discusses heat-responsive genes, and (3) the section of the application that discusses osmotic stress-responsive genes. The function(s) which are commonly described in those three sections will then be particularly characteristic of a plant transformed with that gene. This type of integrated analysis of data can be viewed from the following schematic that summarizes, for one particular gene, the function of that gene as understood from the phenotype and differential expression experiments.

| Gene function known | Gene function known | Gene function known |
|---|---|---|
| from phenotype | from first differential | from second differential |
| experiments | expression experiment | expression experiment |
| Function A | Function A | Function A |
| Function B | | |
| | Function C | Function C |
| | Function D | |
| | | Function E |
| Function F | Function F | Function F |
| Function G | Function G | |
| | | Function H |
| Function I | | Function I |
| | Function J | |

[0555] In the above example, one skilled in the art will understand that a plant transformed with this particular gene will particularly exhibit functions A and F because those are the functions which are understood in common from the three different experiments.

[0556] Similar analyses can be conducted on various genes of the present invention, by which one skilled in the art can effectively modulate plant functions depending upon the particular use or conditions envisioned for the plant.

[0557] III.A. Organ-Affecting Genes, Gene Components, Products (Including Differentiation and Function)

[0558] III.A.1. Root Genes, Gene Components and Products

[0559] The economic values of roots arise not only from harvested adventitious roots or tubers, but also from the ability of roots to funnel nutrients to support growth of all plants and increase their vegetative material, seeds, fruits, etc. Roots have four main functions. First, they anchor the plant in the soil. Second, they facilitate and regulate the molecular signals and molecular traffic between the plant, soil, and soil fauna. Third, the root provides a plant with nutrients gained from the soil or growth medium. Fourth, they condition local soil chemical and physical properties.

[0560] III.A.1.a. Identification of Root Genes

[0561] Root genes identified herein are defined as genes, gene components and products capable of modulating one or more processes in or functions of the root as described below. They are active or potentially active to a greater extent in roots than in most other organs of the plant. These genes and gene products can regulate many plant traits from yield to stress tolerance. That single genes usually affect the development and function of roots and whole plants is a consequence of biological cellular complexity and the role roots play in supporting the growth of whole plants. Examples of such root genes and gene products are shown in the Reference and Sequence Reference and Sequence Tables and sequences encoding polypeptides of the Protein Group and Protein Group Matrix tables or fragments thereof, the Knock-In and Knock-Out Tables, and the MA-diff Tables. The function of many of the protein products gained from comparisons with proteins of known functions, are also given in the REF Tables.

[0562] Root Genes Identified by Phenotypic Observations

[0563] Root genes are active or potentially active to a greater extent in roots than in some other organs/tissue of the plant. Some of the root genes herein were discovered and characterized from a much larger set of genes in experiments designed to find genes that cause phenotypic changes in root morphology. Such morphological changes include primary and lateral root number, size and length, as well as phenotypic changes of other parts of that plant associated with changes in root morphology.

[0564] In these experiments, root genes were identified by either (1) ectopic expression of a cDNA in a plant or (2) mutagenesis of the plant genome. The plants were then cultivated under standardized conditions and any phenotypic differences recorded between the modified plants as compared with the parent plant. The gene(s) causing the changes were deduced from the cDNA inserted or disrupted gene. Phenotypic differences were observed in:

[0565] Primary Roots And Root System
[0566] Size, Including Length And Girth
[0567] Number
[0568] Branching
[0569] Root Waving/Curling Characteristics
[0570] Gravitropism Changes
[0571] Agravitropic

[0572] Lateral Roots
[0573] Size, Including Length And Girth
[0574] Number
[0575] Branching

[0576] Results from screening for these phenotypic changes are reported in the Knock-in and Knock-out Tables. Therefore, any sequence reported in those Tables with one of the above-noted observations is considered a “root gene”. A “root gene” is also a sequence which, in the Ortholog Tables or in the MA-clust Tables, is grouped/clustered together with at least one sequence that is identified as such by means of the Knock-in and Knock-out Tables.

[0577] Root Genes Identified by Differential Expression

[0578] Root genes were also identified by measuring the relative levels of mRNA products in the root versus the aerial portion of a plant. Specifically, mRNA was isolated from roots and root tips of Arabidopsis plants and compared to mRNA isolated from the aerial portion of the plants utilizing microarray procedures. The MA_diff Table(s) reports the transcript levels of the experiment (see EXPT ID: 108594, 108433, 108599, 108434, 108439). For transcripts that had higher levels in the samples than the control, a “+” is shown. A “−” is shown for when transcript levels were reduced in root tips as compared to the control. For more experimental detail see the Example section below.

[0579] Roots genes are those sequences that showed differential expression as compared to controls, namely those sequences identified in the MA_diff tables with a “+” or “−” indication.

[0580] Roots Genes Identified by Cluster Analyses of Differential Expression

[0581] Roots Genes Identified by Correlation to Genes that are Differentially Expressed

[0582] As described above, the transcription profiles of genes that act together are well correlated. Applicants not only have identified the genes that are differentially expressed in the microarray experiments, but also have identified the genes that act in concert with them. The MA_clust table indicates groups of genes that have well correlated transcription profiles and therefore participate in the same pathway or network.

[0583] A pathway or network of Roots genes is any group in the MA_clust that comprises a cDNA ID that also appears in Expt ID 108594, 108433, 108599, 108434, 108439 of the MA_diff table(s).

[0584] Roots Genes Identified by Correlation to Genes that Cause Physiological Consequences

[0585] Additionally, the differential expression data and the phenotypic observations can be merged to identify pathways or networks of Roots genes. A group in the MA_clust is considered a Roots pathway or network if the group comprises a cDNA ID that also appears in Knock-in or Knock-out tables that causes one or more of the phenotypes described in section above.

[0586] Roots Genes Identified by Amino Acid Sequence Similarity

[0587] Roots genes from other plant species typically encode polypeptides that share amino acid similarity to the sequences encoded by corn and Arabidopsis Roots genes. Groups of Roots genes are identified in the Protein Group table. In this table, any protein group that comprises a peptide ID that corresponds to a cDNA ID member of a Roots pathway or network is a group of proteins that also exhibits Roots functions/utilities.

[0588] Examples of phenotypes, biochemical activities, and transcription profiles that can be modulated by these genes and gene products are described above and below.

[0589] III.A.1.b. Use of Root Genes to Modulate Phenotypes

[0590] The root genes of the instant invention are capable of modulating one or more processes of root structure and/or function including (1) development; (2) interaction with the soil and soil contents; and (3) transport in the plant.

[0591] Root genes and gene products can be used to alter or modulate one or more of the following phenotypes.

[0592] 1.) Development

[0593] Roots arise from meristem cells that are protected by a root cap during root elongation, but as the root grows out, the cap cells abscise and the remaining cells differentiate to the tip. Depending on the plant species, some surface cells of roots can develop into root hairs. Some roots persist for the life of the plant; others gradually shorten as the ends slowly die back; some may cease to function due to external influences. The root genes and gene products of this invention are useful to modulate any one or all of these growth and development processes generally, as in root density and root growth; including rate, timing, direction and size.

[0594] Root genes and gene products are useful to modulate either the growth and development or other processes in one or more of the following types of roots, including primary, lateral, and adventitious.

[0595] Root genes and gene products are useful to modulate cellular changes in cell size, cell division, rate direction and/or number, cell elongation, cell differentiation, lignified cell walls, epidermal cells, such as trichoblasts, and root apical meristem cells (growth and initiation).

[0596] Parts of roots (i.e. root architecture) can be modulated by these genes root and gene products to affect root architecture in, for example, the epidermis cortex (including the epidermis, hypodermis, endodermis, casparian strips, suberized secondary walls, parenchyma, and aerenchyma), stele (including vaculature, xylem, phloem, and pericycle), vasculature, xylem, phloem, root cap, root apical meristem, elongating region, and symmetry.

[0597] The polynucleotides and polypeptides of this invention can be used to control the responses to internal plant and root programs as well as to environmental stimuli in the seminal system, nodal system, hormone systems (including Auxin and cytokinin), root cap abscission, root senescence, gravitropism, coordination of root growth and development with that of other organs (including leaves, flowers, seeds, fruits, stems, and changes in soil environment (including water, minerals, ph, and microfauna and flora).

[0598] 2.) Interaction with Soil and Soil Contents

[0599] Roots are sites of intense chemical and biological activities and as a result can strongly modify the soil they contact. Roots coat themselves with surfactants and mucilage to facilitate these activities. Specifically, roots are responsible for nutrient uptake by mobilizing and assimilating water, organic and inorganic compounds, ions and attracting and interacting with beneficial microfauna and flora. Roots also help to mitigate the effects of toxic chemicals, pathogens and stress. Examples of root properties and activities that the genes and gene products of this invention are useful to modulate are root surfactants and mucilage (including mucilage composition, secretion rate and time, surfactant); nutrient uptake of water, nitrate and other sources of nitrogen, phosphate, potassium, and micronutrients (e.g. iron, copper, etc.); microbes and nematodes associations (such as bacteria including nitrogen-fixing bacteria, mycorrhizae, and nodule-forming and other nematodes); oxygen (including transpiration); detoxification of iron, aluminum, cadium, mercury, salt, and other heavy metals and toxins); pathogen interactions/control (including chemical repellents (includes glucosinolates (GSL), which release pathogen-controlling isothiocyanates); and changes in soil properties, (such as Ph, mineral depletion, and rhizosheath).

[0600] 3) Transport of Materials in Plants

[0601] Uptake of nutrients by roots produces a “source-sink” effect in a plant. The greater the source of nutrients, the larger “sinks,” such as stems, leaves, flowers, seeds, fruits, etc. can grow. Thus, root genes and gene products are useful to modulate the vigor and yield of the plant overall as well as distinct cells, organs, or tissues. The root genes and gene products are, therefore, useful to modulate vigor (including plant nutrition, growth rate (such as whole plant, including height, flowering time, etc.), seedling, coleoptile elongation, young leaves, stems, flowers, seeds, fruit, and yield (including biomass (such as fresh and dry weight during any time in plant life, including maturation and senescence), root/tuber yield (such as number, size, weight, harvest index, content and composition, (i.e. amino acid, jasmonate, oil, protein and starch), number of flowers, seed yield, number, size, weight, harvest index, content and composition (e.g. amino acid, jasmonate, oil, protein and starch), and fruit yield (such as number, size, weight, harvest index, post harvest quality, content and composition, (e.g. amino acid, jasmonate, oil, protein and starch).

[0602] Additional Uses of Plants with Modified Roots

[0603] Plants with roots modified in one or more of the properties described above are used to provide:
[0604] A. Higher vigor and yield of plants and harvested products due to pathogen resistance from conditioning the soil with plant-derived chemicals and/or more tolerance to stresses such as drought, flooding and anoxia.
[0605] B. Better Animal (Including Human) Nutrition
[0606] C. Improved Dietary Mineral Nutrition
[0607] D. Better Plant Survival
   [0608] (a) Decreased Lodging
   [0609] (b) More Efficient Transport
   [0610] (c) More Efficient Physiology
   [0611] (d) More Efficient Metabolism
[0612] E. Better Resistance To Plant Density Effects
[0613] F. Increased Yield Of Valuable Molecules
[0614] G. More Efficient Root Nodulation
[0615] H. Better Access To Rhizobia Spray Application, For Anaerobic Soils
[0616] I. Easier Crop Harvesting And Ground Tillage
[0617] J. Decreased Soil Erosion

[0618] To regulate any of the phenotype(s) above, activities of one or more of the root genes or gene products is modulated and tested by screening for the desired trait. Specifically, the gene, mRNA levels, or protein levels can be altered in a plant utilizing the procedures described herein and the phenotypes can be assayed. As an example, a plant can be transformed according to Bechtold and Pelletier (1998, Methods. Mol. Biol. 82:259-266) and/or screened for variants as in Winkler et al. (1998) Plant Physiol 118: 743-50 and visually inspected for the desired phenotype or metabolically and/or functionally assayed according to Dolan et al. (1993, Development 119: 71-84), Dolan et al. (1997, Development 124: 1789-98), Crawford and Glass (1998, Trends Plant Science 3: 389-95), Wang et al. (1998, PNAS USA 95: 15134-39), Gaxiola et al. (1998, PNAS USA 95: 4046-50), Apse et al. (1999, Science 285: 1256-58), Fisher and Long (1992, Nature 357: 655-60), Schneider et al. (1998, Genes Devel 12: 2013-21) and Hirsch (1999, Curr Opin Plant Biol. 2: 320-326).

[0619] III.A.1.c. Use of Root Genes to Modulate Biochemical Activities

[0620] The activities of one or more of the root genes can be modulated to change biochemical or metabolic activities and/or pathways such as those noted below. Such biological activities can be measured according to the citations included in the Table below:

| | BIOCHEMICAL OR | |
|---|---|---|
| | METABOLIC ACTIVITIES | CITATIONS INCLUDING |
| PROCESS | AND/OR PATHWAYS | ASSAYS |
| Association Of Root | Cell-Cell Recognition | Gage et al. (1996) J Bacteriol |
| Morphology With Nitrogen | Cell Wall Degradation | 178: 7159-66 |
| Fixing Bacteria | | |
| Primary Root, Lateral | Cell Division/Elongation | Schneider et al. (1998) Genes |
| Root, And Root Hair | Cell Differentiation | Devel 12: 2013-21 |
| Initiation | Cell Expansion | Casimiro et al. (2001). Plant |
| Spacing | Auxin Mediated Response | Cell 13: 843-852. |
| Elongation | Pathways | Rogg et al. (2001). Plant |
| Branching | | Cell 13: 465-480. |
| | | Gaedeke et al. (2001). |
| | | EMBO J. 20: 1875-1887. |
| | | Neuteboom et al. (1999). |
| | | Plant Mol. Biol. 39: 273-287. |
| | | Schindelman et al. (2001). |
| | | Genes and Dev. 15: 1115-1127. |
| | | Rashotte et al. (2001) Plant |
| | | Cell 13: 1683-1697. |
| | | Zhang et al. (2000). J Exp |
| | | Bot 51: 51-59. |
| | | Zhang et al. (1998) Science |
| | | 279: 407-409. |
| Metabolism | Organic Molecule Export | Moody et al. (1988) |
| | | Phytochemistry 27: 2857-61. |
| | Ion Export | Uozumi et al. (2000) Plant |
| | | Physiol 122: 1249-59 |
| | | Frachisse et al. (2000) Plant J |
| | | 21: 361-71 |
| | Nutrient Uptake | Frachisse et al. (2000) Plant J |
| | | 21: 361-71 |
| | | Uozumio et al. (2000) Plant |
| | | Physiol 122: 1249-59 |
| | | Williamson et al. (2001). |
| | | Plant Physiol. 126: 875-882. |
| | | Zhang et al. (2000). J Exp |
| | | Bot 51: 51-59. |
| | | Zhang et al. (1998). Science |
| | | 279: 407-409. |
| | | Coruzzi et al. (2001). Plant |
| | | Physiol. 125: 61-64. |
| Root Gravitropism And | Reactive Oxygen Species | Joo et al. (2001) Plant |
| Waving | (ROS) Such As Superoxide | Physiol. 126: 1055-60. |
| | Anions And H2O2 | Vitha et al. (2000). Plant |
| | Production | Physiol. 122: 453-461. |
| | Auxin Transport Pathways | Tasaka et al. (2001) Int Rev |
| | Flavonoid Inhibition Of | Cytol 206: 135-54. |
| | Auxin Transport Function | Brown et al. (2001) Plant |
| | Changes In Root Cap Ph | Physiol 126: 524-35. |
| | Starch Synthesis And | Fasano et al. (2001) Plant |
| | Storage | Cell 13: 907-22. |
| | Cell Differentiation | MacCleery et al. (1999). |
| | Cell Elongation | Plant Physiol 120: 183-92 |
| | | Blancaflor et al. (1998). |
| | | Plant Physiol 116: 213-22 |
| | | Schneider et al. (1998) Genes |
| | | Devel 12: 2013-21 |

[0621] Other biological activities that can be modulated by the root genes and gene products are listed in the Reference tables. Assays for detecting such biological activities are described in the Protein Domain table.

[0622] III.A.1.d. Use of Root Genes to Modulate Transcription Levels of Plant Genes

[0623] Many genes are “up regulated” or “down regulated” because they belong to networks or cascades of genes. Thus some root genes are capable of regulating many other gene activities via these networks and hence complex phenotypes. Examples of transcription profiles of root genes are described in the Table below with associated biological activities. “Up-regulated” profiles are those where the concentrations of the mRNA in total mRNA are higher in roots as compared to aerial parts of a plant; and vice-versa for “down-regulated” profiles.

| | | | EXAMPLES OF |
|---|---|---|---|
| TRANSCRIPT | | PHYSIOLOGICAL | BIOCHEMICAL |
| LEVELS | TYPE OF GENES | CONSEQUENCES | ACTIVITY |
| Up Regulated | Genes Expressed In | Primary Root, | Transporters |
| Transcripts | Root Development | Lateral Root, and/or | Metabolic Enzymes |
| | Responders To | Root Hair Growth | Change In Cell |
| | Micro-Organismal | and Differentiation | Membrane Structure |
| | Symbionts And | Microorganism | And Potential |
| | Parasites | Perception | Kinases, |
| | Genes involved in | Entrapment Of | Phosphatases, G- |
| | polar Auxin transport | Microorganismal | Proteins |
| | Genes involved in | Symbionts | Transcription |
| | starch deposition in | Nutrient Uptake | Activators |
| | the roots | Synthesis Of | Change In |
| | Genes involved in | Metabolites And/Or | Chromatin Structure |
| | production of reactive | Proteins | And/Or Localized |
| | oxygen species | Modulation Of | DNA Topology |
| | Genes involved in | Transduction | Cell Wall Proteins |
| | flavonoid synthesis | Pathways | Ca⁺⁺ Fluctuation |
| | | Specific Gene | Reactive Oxygen |
| | | Transcription | Species (ROS) |
| | | Initiation | production |
| | | Nutrient Uptake | |
| | | Enhancement | |
| | | Gravitropic growth | |
| | | of roots | |
| | | Associations with | |
| | | rhizobia are | |
| | | stimulated | |
| Down- | Genes Repressed In | Negative | Transcription |
| Regulated | Root Development | Regulation Of | Factors |
| Transcripts | Responders To | Primary Root, | Kinases, |
| | Micro-Organismal | Lateral Root, and/or | Phosphatases, G- |
| | Symbionts And | Root Hair | Proteins |
| | Parasites | Production | Change In |
| | Genes With | Released | Chromatin Structure |
| | Discontinued | Changes In | And/Or DNA |
| | Expression Or | Pathways And | Topology |
| | UnsTable mRNA In | Processes | Stability Of Factors |
| | Presence Of Root | Operating In Cells | For Protein |
| | And/Or Micro- | Changes In | Synthesis And |
| | Organismal | Metabolism | Degradation |
| | Symbionts | Inhibition of root | Metabolic Enzymes |
| | | gravitropism | |

[0624] Changes in the function or development of roots are the result of modulation of the activities of one or more of these many root genes and gene products. These genes and/or products are responsible for effects on traits such as plant vigor and seed yield, especially when plants are growing in the presence of soil borne biotic or abiotic stresses or when they are growing in barren conditions or in soils depleted of certain minerals.

[0625] Root genes, gene components and gene products can act alone or in combination as described in the introduction. Of particular interest are combinations of these genes and gene products with those that modulate stress tolerance and/or metabolism. Stress tolerance and metabolism genes and gene products are described in more detail in the sections below.

### Use of Promoters of Root Genes

[0626] Promoters of root genes, as described in the Reference tables, for example, can be used to modulate transcription that is induced by root development or any of the root biological processes or activities above. For example, when a selected polynucleotide sequence is operably linked to a promoter of a root gene, then the selected sequence is transcribed in the same or similar temporal, development or environmentally-specific patterns as the root gene from which the promoter was taken. The root promoters can also be used to activate antisense copies of any coding sequence to achieve down regulation of its protein product in roots. They can also be used to activate sense copies of mRNAs by RNA interference or sense suppression in roots.

[0627] III.A.2. Root Hair Genes, Gene Components and Products

[0628] Root hairs are specialized outgrowths of single epidermal cells termed trichoblasts. In many and perhaps all species of plants, the trichoblasts are regularly arranged around the perimeter of the root. In Arabidopsis, for example, trichoblasts tend to alternate with non-hair cells or atrichoblasts. This spatial patterning of the root epidermis is under genetic control, and a variety of mutants have been isolated in which this spacing is altered or in which root hairs are completely absent.

[0629] III.A.2.a. Identification of Root Hair Genes

[0630] Root hair genes identified herein are defined as genes, gene components and products capable of modulating one or more processes in or the function of root hairs as described below. Root hairs are capable of controlling or influencing many plant traits, also as shown below. Examples of such root hair development genes and gene products are shown in the Reference and Sequence Tables. The protein products of many of these genes are also identified in these Tables.

[0631] Root Hair Genes Identified by Differential Expression

[0632] These genes were discovered and characterized from a much larger set of genes by experiments designed to find genes whose mRNA products are associated specifically with root hairs. These experiments made use of the arabidopsis mutant “root hairless” (rhl), which does not develop root hairs. By comparing gene expression profiles of rhl roots with those of wild type roots grown in identical conditions, genes specifically expressed in root hairs were revealed. The MA_diff Table(s) reports the transcript levels of the experiment (see EXPT ID: 108594, 108433). For transcripts that had higher levels in the samples than the control, a “+” is shown. A “−” is shown for when transcript levels were reduced in root tips as compared to the control. For more experimental detail see the Example section below.

[0633] Root Hairs genes are those sequences that showed differential expression as compared to controls, namely those sequences identified in the MA_diff tables with a “+” or “−” indication.

[0634] Root Hairs Genes Identified by Cluster Analyses of Differential Expression

[0635] Root Hairs Genes Identified by Correlation to Genes that are Differentially Expressed

[0636] As described above, the transcription profiles of genes that act together are well correlated. Applicants not only have identified the genes that are differentially expressed in the microarray experiments, but also have identified the genes that act in concert with them. The MA_clust table indicates groups of genes that have well correlated transcription profiles and therefore participate in the same pathway or network.

[0637] A pathway or network of Root Hairs genes is any group in the MA_clust that comprises a cDNA ID that also appears in Expt ID 108594, 108433 the MA_diff table(s).

[0638] Root Hairs Genes Identified by Correlation to Genes that Cause Physiological Consequences

[0639] Additionally, the differential expression data and the phenotypic observations can be merged to identify pathways or networks of Root Hairs genes. A group in the MA_clust is considered a Root Hairs pathway or network if the group comprises a cDNA ID that also appears in Knock-in or Knock-out tables that causes one or more of the phenotypes described in section above.

[0640] Root Hairs Genes Identified by Amino Acid Sequence Similarity

[0641] Root Hairs genes from other plant species typically encode polypeptides that share amino acid similarity to the sequences encoded by corn and Arabidopsis Root Hairs genes. Groups of Root Hairs genes are identified in the Protein Group table. In this table, any protein group that comprises a peptide ID that corresponds to a cDNA ID member of a Root Hairs pathway or network is a group of proteins that also exhibits Root Hairs functions/utilities.

[0642] Examples of phenotypes, biochemical activities, and transcript profiles that can be modulated by these genes and gene products are described above and below.

[0643] III.A.2.b. Use of Root Hair Development Genes to Modulate Phenotypes

[0644] The root hair development genes of the instant invention are useful to modulate one or more processes of root hair structure and/or function including (1) development; (2) interaction with the soil and soil contents; (3) uptake and transport in the plant; and (4) interaction with microorganisms.

[0645] 1.) Development

[0646] The surface cells of roots can develop into single epidermal cells termed trichoblasts or root hairs. Some of the root hairs will persist for the life of the plant; others will gradually die back; some may cease to function due to external influences. The genes and gene products of this invention are useful to modulate any one or all of these growth and development process generally, as in root hair density or root hair growth; including rate, timing, direction, and size, for example. Processes that are regulated by these genes and gene products include cell properties such as cell size, cell division, rate and direction and number, cell elongation, cell differentiation, lignified cell walls, epidermal cells (including trichoblasts) and root apical meristem cells (growth and initiation); and root hair architecture such as leaf cells under the trichome, cells forming the base of the trichome, trichome cells, and root hair responses.

[0647] The genes and gene products of this invention are useful to modulate one or more of the growth and development processes in response to internal plant programs or environmental stimuli in, for example, the seminal system, nodal system, hormone responses, Auxin, root cap abscission, root senescence, gravitropism, coordination of root growth and development with that of other organs (including leaves, flowers, seeds, fruits, and stems), and changes in soil environment (including water, minerals, Ph, and microfauna and flora).

[0648] 2.) Interaction with Soil and Soil Contents

[0649] Root hairs are sites of intense chemical and biological activity and as a result can strongly modify the soil they contact. Roots hairs can be coated with surfactants and mucilage to facilitate these activities. Specifically, roots hairs are responsible for nutrient uptake by mobilizing and assimilating water, reluctant ions, organic and inorganic compounds and chemicals. In addition, they attract and interact with beneficial microfauna and flora. Root hairs also help to mitigate the effects of toxic ions, pathogens and stress. Examples of root hair properties and activities that the genes and gene products of the invention are useful to modulate include root hair surfactant and mucilage (including composition and secretion rate and time); nutrient uptake (including water, nitrate and other sources of nitrogen, phosphate, potassium, and micronutrients (e.g. iron, copper, etc.); microbe and nematode associations (such as bacteria including nitrogen-fixing bacteria, mycorrhizae, nodule-forming and other nematodes, and nitrogen fixation); oxygen transpiration; detoxification effects of iron, aluminum, cadium, mercury, salt, and other soil constituents; pathogens (including chemical repellents) glucosinolates (GSL1), which release pathogen-controlling isothiocyanates; and changes in soil (such as Ph, mineral excess and depletion), and rhizosheath.

[0650] 3.) Transport of Materials in Plants

[0651] Uptake of the nutrients by the root and root hairs contributes a source-sink effect in a plant. The greater source of nutrients, the more sinks, such as stems, leaves, flowers, seeds, fruits, etc. can draw sustenance to grow. Thus, root hair development genes and gene products are useful to modulate the vigor and yield of the plant overall as well as of distinct cells, organs, or tissues of a plant. The genes and gene products, therefore, can modulate Vigor, including plant nutrition, growth rate (such as whole plant, including height, flowering time, etc., seedling, coleoptile elongation, young leaves, stems, flowers, seeds and fruit) and yield, including biomass (fresh and dry weight during any time in plant life, including maturation and senescence), number of flowers, number of seeds, seed yield, number, size, weight and harvest index (content and composition, e.g. amino acid, jasmonate, oil, protein and starch) and fruit yield (number, size, weight, harvest index, and post harvest quality).

[0652] Additional Uses of Plants with Modified Root Hairs

[0653] Plants with root hairs modified in one or more of the properties described above are used to provide:
[0654] A. Higher vigor and yield of plant and harvested products due to pathogen resistance from conditioning the soil with plant-derived chemicals and/or more tolerance to stresses such as drought, flooding and anoxia
[0655] B. Better Animal (Including Human) Nutrition
[0656] C. Improved Dietary Mineral Nutrition
[0657] D. Increased Plant Survival By Decreasing Lodging
[0658] E. Better Plant Survival By:
   [0659] (a) Decreased Lodging
   [0660] (b) More Efficient Transport
   [0661] (c) More Efficient Physiology
   [0662] (d) More Efficient Metabolism
[0663] F. Increased Yield Of Valuable Molecules

[0664] Root Hair Modulation

[0665] To regulate any of the phenotype(s) above, activities of one or more of the root hair genes or gene products is modulated and tested by screening for the desired trait. Specifically, the gene, mRNA levels, or protein levels are altered in a plant utilizing the procedures described herein and the phenotypes can be assayed. As an example, a plant can be transformed according to Bechtold and Pelletier (1998, Methods. Mol. Biol. 82:259-266) and/or screened for variants as in Winkler et al. (1998) Plant Physiol 118: 743-50 and visually inspected for the desired phenotype or metabolically and/or functionally assayed according to Dolan et al. (1993, Development 119: 71-84), Dolan et al. (1997, Development 124: 1789-98), Crawford and Glass (1998, Trends Plant Science 3: 389-95), Wang et al. (1998, PNAS USA 95: 15134-39), Gaxiola et al. (1998, PNAS USA 95: 4046-50), Apse et al. (1999, Science 285: 1256-58), Fisher and Long (1992, Nature 357: 655-60), Schneider et al. (1998, Genes Devel 12: 2013-21) and Hirsch (1999, Curr Opin Plant Biol. 2: 320-326).

[0666] III.A.2.c. Use of Root Hair Development Genes to Modulate Biochemical Activities

[0667] The activities of one or more of the root hair development genes can be modulated to change biochemical or metabolic activities and/or pathways such as those noted below. Such biological activities can be measured according to the citations included in the table below:

| | Biochemical Or Metabolic | |
|---|---|---|
| Process | Activities And/Or Pathways | Citations Including Assays |
| Association | Functions Associated | Gage et al. (1996) J |
| Of Root Hair | With Root Hair Curling | Bacteriol 178: 7159-66 |
| With Nitrogen | And Signal Transduction | |
| Fixing | | |
| Bacteria | | |
| Root Hair | | Schneider et al. (1998) |
| Spacing | | Genes Devel 12: 2013-21 |
| Initiation | | |
| Elongation | | |
| Metabolism | Organic Molecule Export | Moody et al. (1988) |
| | | Phytochemistry |
| | | 27: 2857-61 |
| | Ion Export | Uozumi et al. (2000) Plant |
| | | Physiol 122: 1249-59 |
| | | Frachisse et al. (2000) Plant |
| | | J 21: 361-71 |
| Nutrient | Nutrient Uptake | Frachisse et al. (2000) Plant |
| Uptake | | J 21: 361-71 |
| | | Uozumio et al. (2000) Plant |
| | | Physiol 122: 1249-59 |

[0668] Other biological activities that can be modulated by the root hair genes and gene products are listed in the Reference tables. Assays for detecting such biological activities are described in the Protein Domain table.

[0669] III.A.2.d. Use of Root Hair Genes, Gene Components and Product to Modulate Transcription Levels

[0670] Many genes are “up regulated” or “down regulated” in root hairs or associated with root hair formation because genes are regulated in networks. Thus some root hairs genes are useful to regulate the activities of many other genes, directly or indirectly to influence complex phenotypes. Examples of transcription profiles of root genes are described in the Table below with associated biological activities. “Up regulated” profiles are those where the mRNA levels are higher when the rhl gene is inhibited as compared to when rhl gene is not inhibited; and vice-versa for “down-regulated” profiles.

| Transcript | | Physiological | Examples Of |
|---|---|---|---|
| Levels | Type Of Genes | Consequences | Biochemical Activity |
| Down | Genes Expressed In | Root Hair Formation | Transporters |
| Regulated | Root Hair | Microorganism | Metabolic Enzymes |
| Transcripts | Development | Perception | Change In Cell |
| | Responders To | Entrapment Of | Membrane Structure |
| | Micro-Organismal | Microorganismal | And Potential |
| | Symbionts And | Symbionts | Kinases, |
| | Parasites | Nutrient Uptake | Phosphatases, G- |
| | | Synthesis Of | Proteins |
| | | Metabolites And/Or | Transcription |
| | | Proteins | Activators |
| | | Modulation Of | Change In Chromatin |
| | | Transduction | Structure And/Or |
| | | Pathways | Localized DNA |
| | | Specific Gene | Topology |
| | | Transcription | Cell Wall Proteins |
| | | Initiation | |
| | | Nutrient Uptake | |
| | | Enhancement | |
| Up-Regulated | Genes Repressed In | Negative Regulation | Transcription Factors |
| Transcripts | Roots Making | Of Hair Production | Kinases, |
| | Hairs | Released | Phosphatases, G- |
| | Responders To | Changes In | Proteins |
| | Micro-Organismal | Pathways And | Change In Chromatin |
| | Symbionts And | Processes Operating | Structure And/Or |
| | Parasites | In Cells | DNA Topology |
| | Genes With | Changes In | Stability Of Factors |
| | Discontinued | Metabolism | For Protein Synthesis |
| | Expression Or | | And Degradation |
| | UnsTable mRNAIn | | Metabolic Enzymes |
| | Presence Of Root | | Cell Wall Proteins |
| | Hairs And/Or | | |
| | Micro-Organismal | | |
| | Symbionts | | |

[0671] Changes in the patterning or development of root hairs are the result of modulation of the activities of one or more of these many root hair genes and gene products. These genes and/or products are responsible for effects on traits such as plant vigor and seed yield, especially when plants are growing in the presence of biotic or abiotic stresses or when they are growing in barren conditions or in soils depleted of certain minerals.

[0672] Root hair genes and gene products can act alone or in combination as described in the introduction. Of particular interest are combination of these genes and gene products with those that modulate stress tolerance and/or metabolism. Stress tolerance and metabolism genes and gene products are described in more detail in the sections below.

### Use of Promoters of Root Hair Genes

[0673] Promoters of root hair development genes, as described in the Reference tables, for example, are useful to modulate transcription that is induced by root hair development or any of the following phenotypes or biological activities above. For example, any desired sequence can be transcribed in similar temporal, tissue, or environmentally-specific patterns as the root hair genes when the desired sequence is operably linked to a promoter of a root hair responsive gene.

[0674] III.A.3. Leaf Genes, Gene Components and Products

[0675] Leaves are responsible for producing most of the fixed carbon in a plant and are critical to plant productivity and survival. Great variability in leaf shapes and sizes is observed in nature. Leaves also exhibit varying degrees of complexity, ranging from simple to multi-compound. Leaf genes as defined here, not only modulate morphology, but also influence the shoot apical meristem, thereby affecting leaf arrangement on the shoot, internodes, nodes, axillary buds, photosynthetic capacity, carbon fixation, photorespiration and starch synthesis. Leaf genes elucidated here can be used to modify a number of traits of economic interest from leaf shape to plant yield, including stress tolerance, and to modify the efficiency of synthesis and accumulation of specific metabolites and macromolecules.

[0676] III.A.3.a. Identification of Leaf Gene, Gene Components and Products

[0677] Leaf genes identified herein are defined as genes, active or potentially active to greater extent in leaves than in some other organs of the plant or as genes that affect leaf properties. These genes and gene components are useful for modulating one or more processes in or functions of leaves, as described below, to improve plant traits ranging from yield to stress tolerance. Examples of such leaf genes and gene products are shown in the Reference and Sequence Tables and sequences encoding polypeptides of the Protein Group and Protein Group Matrix tables or fragments thereof, Knock-In, Knock-Out and MA_diff Tables. The biochemical functions of the protein products of many of these genes determined from comparisons with known proteins are also given in the Reference tables.

[0678] Leaf Genes Identified by Phenotypic Observations

[0679] Some leaf genes were discovered and characterized from a much larger set of genes by experiments designed to find genes that cause phenotypic changes in leaf, petiole, internode, and cotyledon morphology.

[0680] In these experiments, leaf genes were identified by either (1) ectopic expression of a cDNA in a plant or (2) mutagenesis of the plant genome. The plants were then cultivated and one or more of the following leaf phenotypes, which varied from the parental “wild-type”, were observed:

[0681] A. Changes In Seedling Stage Cotyledons
[0682] Cup Shaped
[0683] Curled
[0684] Horizontally Oblong
[0685] Long Petioles
[0686] Short Petioles
[0687] Silver
[0688] Tricot
[0689] Wilted

[0690] B. Changes In Rosette And Flowering Stage Leaf Shapes
[0691] Cordate
[0692] Cup-Shaped
[0693] Curled
[0694] Fused
[0695] Lanceolate
[0696] Lobed
[0697] Long Petioles
[0698] Short Petioles
[0699] Oval
[0700] Ovate
[0701] Serrate
[0702] Trident
[0703] Undulate
[0704] Vertically Oblong

[0705] C. Changes In Cauline, Flowering Leaf Shape
[0706] Misshapen
[0707] Other

[0708] D. Changes In Leaf Pigment
[0709] Albino
[0710] Dark Green Pigment
[0711] High Anthocyanin
[0712] Interveinal Chlorosis
[0713] Yellow Pigment

[0714] E. Changes In Leaf Size

[0715] F. Changes In Seedling Stage Hypocotyl
[0716] Long
[0717] Short

[0718] G. Changes In Leaf Number

[0719] H. Changes In Wax Deposition
[0720] Glossy Rosette And Flowering Stage Leaves
[0721] Altered Wax Deposition On The Bolt

[0722] Leaf Genes Identified by Differential Expression

[0723] Also, leaf genes were identified in experiments in which the concentration of mRNA products in the leaf, or stem, or Knock-out mutant 3642-1 were compared with to a control. The MA_diff Table(s) reports the transcript levels of the experiment (see EXPT ID: 108477, 108512, 108497, 108498, 108598). For transcripts that had higher levels in the samples than the control, a “+” is shown. A “−” is shown for when transcript levels were reduced in root tips as compared to the control. For more experimental detail see the Example section below.

[0724] Leaf genes are those sequences that showed differential expression as compared to controls, namely those sequences identified in the MA_diff tables with a “+” or “−” indication.

[0725] Leaf Genes Identified by Cluster Analyses of Differential Expression

[0726] Leaf Genes Identified by Correlation to Genes that are Differentially Expressed

[0727] As described above, the transcription profiles of genes that act together are well correlated. Applicants not only have identified the genes that are differentially expressed in the microarray experiments, but also have identified the genes that act in concert with them. The MA_clust table indicates groups of genes that have well correlated transcription profiles and therefore participate in the same pathway or network.

[0728] A pathway or network of Leaf genes is any group in the MA_clust that comprises a cDNA ID that also appears in Expt ID 108477, 108512, 108497, 108498, 108598 of the MA_diff table(s).

[0729] Leaf Genes Identified by Correlation to Genes that Cause Physiological Consequences

[0730] Additionally, the differential expression data and the phenotypic observations can be merged to identify pathways or networks of Leaf genes. A group in the MA_clust is considered a Leaf pathway or network if the group comprises a cDNA ID that also appears in Knock-in or Knock-out tables that causes one or more of the phenotypes described in section above.

[0731] Leaf Genes Identified by Amino Acid Sequence Similarity

[0732] Leaf genes from other plant species typically encode polypeptides that share amino acid similarity to the sequences encoded by corn and Arabidopsis Leaf genes. Groups of Leaf genes are identified in the Protein Group table. In this table, any protein group that comprises a peptide ID that corresponds to a cDNA ID member of a Leaf pathway or network is a group of proteins that also exhibits Leaf functions/utilities.

[0733] It is assumed that (i) the genes preferentially expressed in leaves are concerned with specifying leaf structures and the synthesis of all the constituent molecules and (ii) that the genes repressed in leaves specify products that are not required in leaves or that could inhibit normal leaf development and function.

[0734] Examples of phenotypes, biochemical activities, and transcription profiles that are modulated by using selected members of these genes and gene products, singly or in combination, are described below.

[0735] III.A.3.b. Use of Leaf Genes, Genes Components and Products to Modulate Phenotypes

[0736] Leaves are critical for the performance and industrial utility of plants. There is extensive evidence that the number, size, shape, position, timing of synthesis, timing of senescence and chemical constitution are very important for agriculture, horticulture and uses of plants as chemical factories for making valuable molecules. Many improvements already demonstrated over past decades have involved genetic modifications to leaves. Therefore, the leaf genes and gene components of this invention offer considerable opportunities for further improving plants for industrial purposes. When the leaf genes and/or gene components are mutated or regulated differently, they are capable of modulating one or more of the processes determining leaf structure and/or function including (1) development; (2) interaction with the environment and (3) photosynthesis and metabolism.

[0737] 1.) Development

[0738] The leaf genes, gene components and products of the instant invention are useful to modulate one or more processes of the stages of leaf morphogenesis including: stage 1—organogenesis that gives rise to the leaf primordium; stage 2—delimiting basic morphological domains; and stage 3—a coordinated processes of cell division, expansion, and differentiation. Leaf genes include those genes that terminate as well as initiate leaf development. Modulating any or all of the processes leads to beneficial effects either at specific locations or throughout the plant, such as in the cotyledons, major leaves, cauline leaves, or petioles.

[0739] Leaf genes, gene components and gene products are useful to modulate changes in leaf cell size, cell division (rate and direction), cell elongation, cell differentiation, stomata size, number, spacing and activity, trichome size and number, xylem and phloem cell numbers, cell wall composition, and all cell types. The leaf genese are also useful to modulate to change overall leaf architecture, including veination (such as improvements in photosynthetic efficiency, stress tolerance efficiency of solute and nutrient movement to and from the leaf are accomplished by increases or decreases in vein placement and number of cells in the vein); shape, either elongated versus rounded or symmetry, around either (e.g. abaxial-adaxial (dorsiventral) axis, apical-basal (proximodistal) axis, and margin-blade-midrib (lateral) axis; and branching (improved plant performance to biotic and abiotic stress in heavy density planting is achieved by increases or decreases in leaf branch position or leaf branch length).

[0740] Shoot apical meristem cells differentiate to become leaf primordia that eventually develop into leaves. The genes, gene components and gene products of this invention are useful to modulate any one or all of these growth and development processes, by affecting timing and rate or planes of cell divisions for example, in response to the internal plant stimuli and/or programs such as embryogenesis; germination; hormones like Auxin leaf senescence; phototropism; coordination of leaf growth and development with that of other organs (such as roots, flowers, seeds, fruits, and stems; and stress-related programs.

[0741] 2.) Interaction with the Environment

[0742] Leaves are the main sites of photosynthesis and have various adaptations for that purpose. Flat laminae provide a large surface for absorbing sunlight; leaves are rich in chloroplasts and mitochondria; stomata in the lower surface of the laminae allow gases to pass into and out of the leaves including water; and an extensive network of veins brings water and minerals into the leaves and transports the sugar products produced by photosynthesis to the rest of the plant. examples of leaf properties or activities that are modulated by leaf genes, gene components and their products to facilitate interactions between a plant and the environment including pigment accumulation; wax accumulation on the surface of leaves (e.g. improved protection of young leaves from water borne pathogen attack such as downey mildew with increased wax production); oxygen gain/loss control; carbon dioxide gain/loss control; water gain/loss control; nutrient transport; light harvesting; chloroplast biogenesis; circadian rhythm control; light/dark adaptation; defense systems against biotic and abiotic stresses; metabolite accumulation; and secondary metabolite production in leaf mesophyl, epidermis and trichomes (such as increases in antifeeding secondary metabolites such as strictosiden reduce herbivory and decreases in secondary metabolites improve plants as forage by reducing allergens or undigestible compounds).

[0743] 3.) Photosynthesis and Metabolism

[0744] Many of the uses for plants depend on the success of leaves as the powerhouses for plant growth, their ability to withstand stresses and their chemical composition. Leaves are organs with many different cell types and structures. Most genes of a plant are active in leaves and therefore leaves have very diverse of pathways and physiological processes. Pathways and processes that are modulated by leaf genes, gene components and products include photosynthesis, sugar metabolism, starch synthesis, starch degradation, nitrate and ammonia metabolism, amino acid biosynthesis, transport, protein biosynthesis, dna replication, repair, lipid biosynthesis and breakdown, protein biosynthesis, storage and breakdown, nucleotide transport and metabolism, cell envelope biogenesis, membrane formation, mitochondrial and chloroplast biogenesis, transcription and RNA metabolism, vitamin biosynthesis, steroid and terpenoid biosynthesis, devise secondary metabolite synthesis, co-enzyme metabolism, flavonoid biosynthesis and degradation, synthesis of waxes, glyoxylate metabolism, and hormone perception and response pathways.

[0745] Uses of Plants that are Modified as Described Above

[0746] Altering leaf genes or gene products in a plant modifies one or more plant traits, to make the plants more useful for specific purposes in agriculture, horticulture and for the production of valuable molecules. The modified plant traits include A higher yield of leaves and their molecular constituents (due to different number, size, weight, harvest index, composition including and amounts and types of carbohydrates, proteins, oils, waxes, etc.; photosynthetic efficiency (e.g. reduced photorespiration), absorption of water and nutrients to enhance yields, including under stresses such as high light, herbicides, and heat, pathways to accumulate new valuable molecules); more optimal leaf shape and architecture—enhancing photosynthesis and enhancing appeal in ornamental species (including size, number, pigment, and aroma; a better overall plant architecture—enhancing photosynthesis and enhancing appeal in ornamental species petals, sepals, stamens, and carpels; better shade avoidance for maximizing photosynthesis by, for example, altering leaf placement, to improve light capture and photosynthetic efficiency, thereby increasing yields; Reduced negative effects of high planting density, by altering leaf placement to be more vertical instead of parallel to the ground, for instance; More resistance to the deleterious effects of wind and mechanical damage; Better stress tolerance (including without limitation drought resistance, by decreasing water loss, and pathogen resistance, including, for instance, insect resistance through internal insecticide levels and optimizing the leaf shape to prevent runoff of insecticides); and better overall yield and vigor.

[0747] Plant yield of biomass and of constituent molecules and plant vigor are modulated to create benefits by genetically changing the growth rate of the whole plant, (including height, flowering time, etc.), seedling, coleoptile elongation, young leaves flowers, seeds, and/or fruit, or by changing the biomass, including fresh and dry weight during any time in plant life, (including maturation and senescence), number of flowers, seed yield including for example, number, size, weight, harvest index, content and composition (e.g. amino acid, jasmonate, oil, protein and starch), and fruit yield (such as number, size, weight, harvest index, content and composition, e.g. amino acid, jasmonate, oil, protein and starch).

[0748] To change any of the phenotype(s) in I, II, or III above, activities of one or more of the leaf genes or gene products are modulated in an organism and the consequence evaluated by screening for the desired trait. Specifically, the gene, mRNA levels, or protein levels are altered in a plant utilizing the procedures described herein and the phenotypes can be assayed. As an example, a plant can be transformed according to Bechtold and Pelletier (Methods. Mol. Biol. 82:259-266 (1998)) with leaf gene constructs and/or screened for variants as in Winkler et al., Plant Physiol. 118: 743-50 (1998) and visually inspected for the desired phenotype and metabolically and/or functionally assayed for altered levels of relevant molecules.

[0749] III.A.3.c. Use of Leaf Genes Gene Components and Products to Modulate Biochemical Activities

[0750] Leaves are complex organs and their structure, function and properties result from the integration of many processes and biochemical activities. Some of these are known from the published literature and some can be deduced from the genes and their products described in this application. Leaf genes, and gene components are used singly or in combination to modify these processes and biochemical activities and hence modify the phenotypic and trait characteristics described above. Examples of the processes and metabolic activities are given in the Table below. The resulting changes are measured according to the citations included in the Table.

| | BIOCHEMICAL OR | CITATIONS |
|---|---|---|
| | METABOLIC ACTIVITIES | INCLUDING |
| PROCESS | AND/OR PATHWAYS | ASSAYS |
| Metabolism - anabolic | Farnesylation | Pei et al., Science 282: 287-290 |
| and catabolic | Cell Wall Biosynthesis | (1998); Cutler et al., |
| | Nitrogen Metabolism | Science 273: 1239 (1996) |
| | Secondary Metabolite | Goupil et al., J Exptl. Botany |
| | Biosynthesis and | 49: 1855-62 (1998) |
| | Degradation | Walch-Liu et al., J Exppt. |
| | | Botany 51, 227-237 (2000) |
| Water Conservation And | Stomatal Development And | Allen et al., Plant Cell 11: |
| Resistance To Drought | Physiology | 1785-1798 (1999) |
| And Other Related | Production of polyols | Li et al., Science 287: 300-303 |
| Stresses | Regulation of salt | (2000) |
| | concentration | Burnett et al., J Exptl. Botany |
| | ABA response(s) | 51: 197-205 (2000) |
| Transport Anion and | Ca2+ Accumulation | Raschke, In: Stomatal |
| Cation Fluxes | K+ Fluxes | Function, Zeiger et al. Eds., |
| | Na+ Fluxes | 253-279 (1987) |
| | Receptor - ligand binding | Lacombe et al., Plant Cell 12: |
| | Anion and Cation fluxes | 837-51 (2000); |
| | | Wang et al., Plant Physiol. |
| | | 118: 1421-1429 (1998); |
| | | Shi et al., Plant Cell 11: 2393-2406 |
| | | (1999) |
| | | Gaymard et al., Cell 94: 647-655 |
| | | (1998) |
| | | Jonak et al., Proc. Natl. Acad. |
| | | Sci. 93: 11274-79 (1996); |
| | | Sheen, Proc. Natl. Acad. Sci. |
| | | 95: 975-80 (1998); |
| | | Allen et al., Plant Cell 11: |
| | | 1785-98 (1999) |
| Carbon Fixation | Calvin Cycle | Wingler et al., Philo Trans R |
| | Photorespiration | Soe Lond B Biol Sci 355, |
| | Oxygen evolution | 1517-1529 (2000); |
| | RuBisCO | Palecanda et al., Plant Mol |
| | Chlorophyll metabolism | Biol 46, 89-97 (2001); |
| | Chloroplast Biogenesis and | Baker et al., J Exp Bot 52, |
| | Metabolism | 615-621 (2001) |
| | Fatty Acid and Lipid | Chen et al., Acta Biochim Pol |
| | Biosynthesis | 41, 447-457 (1999) |
| | Glyoxylate metabolism | Imlau et al., PlantCell II, 309-322 |
| | Sugar Transport | (1999) |
| | Starch Biosynthesis and | |
| | Degradation | |
| Hormone Perception and | Hormone Receptors and | Tieman et al., Plant J 26, 47-58 |
| Growth | Downstream Pathways for | (2001) |
| | ethylene | Hilpert et al., Plant J 26, 435-446 |
| | jasmonic acid | (2001) |
| | brassinosteroid | Wenzel et al., Plant Phys |
| | gibberellin | 124, 813-822 (2000) |
| | Auxin | Dengler and Kang, Curr Opin |
| | cytokinin | Plant Biol 4, 50-56 (2001) |
| | Activation Of Specific | Tantikanjana et al., Genes |
| | Kinases And Phosphatases | Dev 15, 1577-1580 (2001) |

[0751] Other biological activities that are modulated by the leaf genes and gene products are listed in the Reference tables. Assays for detecting such biological activities are described in the Protein Domain table, for example.

[0752] III.A.3.d. Use of Leaf Genes, Gene Components and Products to Modulate Transcription Levels

[0753] The expression of many genes is “upregulated” or downregulated” in leaves because some leaf genes and their products are integrated into complex networks that regulate transcription of many other genes. Some leaf genes, gene components and products are therefore useful for modifying the transcription of other genes and hence complex phenotypes, as described above. Profiles of leaf gene activities are described in the Table below with associated biological activities. “Up-regulated” profiles are those where the mRNA transcript levels are higher in leaves as compared to the plant as a whole. “Down-regulated” profiles represent higher transcript levels in the whole plant as compared to leaf tissue only.

| | | | EXAMPLES OF |
|---|---|---|---|
| | TYPE OF GENES | PHYSIOLOGICAL | BIOCHEMICAL |
| | WHOSE | CONSEQUENCES OF | ACTIVITIES OF GENE |
| TRANSCRIPT | TRANSCRIPTS | MODIFYING GENE | PRODUCTS WITH |
| LEVELS | ARE CHANGED | PRODUCT LEVELS | MODIFIED LEVELS |
| Up Regulated | Genes Involved In | Leaf Cells | Transcription |
| Transcripts | Leaf Cell | Proliferate And | Factors, Signal |
| | Differentiation, Cell | Differentiate; | Transduction |
| | Division, Cell | | Proteins, Kinase |
| | Expansion | | And Phosphatases |
| | Genes Involved In | Leaf Structures | Chromatin |
| | Positive Regulation | Form And Expand | Remodeling |
| | Of Leaf Genes | | Hormone |
| | Repressors Of Root | | Biosynthesis |
| | And Other Non Leaf | | Enzymes |
| | Cell Types | | Receptors |
| | Genes Involved In | Photosynthesis And | Light Harvesting |
| | Photosynthesis | Plastid | Coupled To ATP |
| | | Differentiation | Production |
| | | | Chlorophyll |
| | | | Biosynthesis |
| | | Calvin Cycle | Ribulose |
| | | Activated | Bisphosphate |
| | | Chloroplast | Carboxylase |
| | | Biogenesis And | Chloroplast |
| | | Plastid | Membranes |
| | | Differentiation | Synthesis |
| | | Activated | Chloroplast |
| | | | Ribosome |
| | | | Biogenesis |
| | Other Genes | Starch Biosynthesis | Starch Synthase |
| | Involved In | Lipid Biosynthesis | Nitrate Reductase |
| | Metabolism | Nitrogen | Terpenoid |
| | | Metabolism —NO₃ | Biosynthesis |
| | | Reduced And | Transcription |
| | | Amino Acids Made | Factors |
| | | Secondary | Transporters |
| | | Metabolites | Kinases |
| | | Produced | Phosphatases And |
| | | | Signal Transduction |
| | | | Protein |
| | | | Chromatin Structure |
| | | | Modulators |
| Down | Genes Involved In | Leaf Genes | Transcription |
| Regulated | Negative Regulation | Activated And Leaf | Factors |
| Genes | Of Leaf Genes | Functions Induced; | Signal Transduction |
| | | Dark-Adapted | Proteins - Kinases |
| | | Metabolism | And Phosphatases |
| | | Suppressed | Metabolic Enzymes |
| | | Meristematic Genes | Chromatin |
| | | Suppressed | Remodeling Proteins |
| | | Leaf Metabolic | |
| | | Pathways Induced | |

[0754] While leaf polynucleotides and gene products are used singly, combinations of these polynucleotides are often better to optimize new growth and development patterns. Useful combinations include different leaf polynucleotides and/or gene products with a hormone responsive polynucleotide. These combinations are useful because of the interactions that exist between hormone-regulated pathways, nutritional pathways and development.

### Use of Leaf Gene Promoters

[0755] Promoters of leaf genes are useful for transcription of desired polynucleotides, both plant and non-plant. If the leaf gene is expressed only in leaves, or specifically in certain kinds of leaf cells, the promoter is used to drive the synthesis of proteins specifically in those cells. For example, extra copies of carbohydrate transporter cDNAs operably linked to a leaf gene promoter and inserted into a plant increase the “sink” strength of leaves. Similarly, leaf promoters are used to drive transcription of metabolic enzymes that alter the oil, starch, protein, or fiber contents of a leaf. Alternatively, leaf promoters direct expression of non-plant genes that can, for instance, confer insect resistance specifically to a leaf. Additionally the promoters are used to synthesize an antisense mRNA copy of a gene to inactivate the normal gene expression into protein. The promoters are used to drive synthesis of sense RNAs to inactivate protein production via RNA interference.

[0756] III.A.4. Trichome Genes and Gene Components

[0757] Trichomes, defined as hair-like structures that extend from the epidermis of aerial tissues, are present on the surface of most terrestrial plants. Plant trichomes display a diverse set of structures, and many plants contain several types of trichomes on a single leaf. The presence of trichomes can increase the boundary layer thickness between the epidermal tissue and the environment, and can reduce heat and water loss. In many species, trichomes are thought to protect the plant against insect or pathogen attack, either by secreting chemical components or by physically limiting insect access to or mobility on vegetative tissues. The stellate trichomes of Arabidopsis do not have a secretory anatomy, but at a functional level, they might limit herbivore access to the leaf in the field. In addition, trichomes are known to secrete economically valuable substances, such as menthol in mint plants.

[0758] III.A.4.a. Identification of Trichome Genes, Gene Components and Products

[0759] Trichome genes identified herein are defined as genes or gene components capable of modulating one or more processes in or functions of a trichome, as described below. These genes, their components and products are useful for modulating diverse plant traits from production of secondary metabolites to pathogen resistance. Examples of such trichome genes and gene products are shown in the Reference and Sequence Tables and sequences encoding polypeptides of the Protein Group and Protein Group Matrix tables or fragments thereof, Knock-in, Knock-out, MA-diff and MA-clust. The biochemical functions of the protein products of many of these genes determined from comparisons with known proteins are also given in the Reference tables.

[0760] Trichome Genes Identified by Phenotypic Observation

[0761] Trichome genes were discovered and characterized from a much larger set of genes by experiments designed to find genes that cause phenotypic changes in trichome number and morphology on leaf, internode, cotyledon, petiole, and inflorescence. In these experiments, trichome genes were identified by either (1) ectopic expression of a cDNA in a plant or (2) mutagenesis of the plant genome. The plants were then cultivated and one or more of the following phenotypes, which varied from parental “wild-type”, were observed: (1) trichome number; (2) trichome spacing (clustering); or (3) trichome branching. The genes regulating trichome phenotypes are identified in the Knock-In and Knock-Out Tables.

[0762] Trichome Genes Identified by Differential Expression

[0763] Trichome genes were also discovered and characterized from a much larger set of genes by experiments designed to find genes whose mRNA products are associated specifically or preferentially with trichomes. These experiments made use of an Arabidopsis glaborous mutant and a hairy mutant. By comparing gene expression profiles of the glabrous mutant with those of the hairy mutant grown under identical conditions, genes specifically or preferentially expressed in trichomes were revealed. The MA_diff Table(s) reports the transcript levels of the experiment (see EXPT ID: 108452). For transcripts that had higher levels in the samples than the control, a “+” is shown. A “−” is shown for when transcript levels were reduced in root tips as compared to the control. For more experimental detail see the Example section below.

[0764] Trichome genes are those sequences that showed differential expression as compared to controls, namely those sequences identified in the MA_diff tables with a “+” or “−” indication.

[0765] Trichome Genes Identified by Cluster Analyses of Differential Expression

[0766] Trichome Genes Identified by Correlation to Genes that are Differentially Expressed

[0767] As described above, the transcription profiles of genes that act together are well correlated. Applicants not only have identified the genes that are differentially expressed in the microarray experiments, but also have identified the genes that act in concert with them. The MA_clust table indicates groups of genes that have well correlated transcription profiles and therefore participate in the same pathway or network.

[0768] A pathway or network of Trichome genes is any group in the MA_clust that comprises a cDNA ID that also appears in Expt ID 108452 of the MA_diff table(s).

[0769] Trichome Genes Identified by Correlation to Genes that Cause Physiological Consequences

[0770] Additionally, the differential expression data and the phenotypic observations can be merged to identify pathways or networks of Trichome genes. A group in the MA_clust is considered a Trichome pathway or network if the group comprises a cDNA ID that also appears in Knock-in or Knock-out tables that causes one or more of the phenotypes described in section above.

[0771] Trichome Genes Identified by Amino Acid Sequence Similarity

[0772] Trichome genes from other plant species typically encode polypeptides that share amino acid similarity to the sequences encoded by corn and Arabidopsis Trichome genes. Groups of Trichome genes are identified in the Protein Group table. In this table, any protein group that comprises a peptide ID that corresponds to a cDNA ID member of a Trichome pathway or network is a group of proteins that also exhibits Trichome functions/utilities.

[0773] It is assumed that the genes differentially expressed in trichomes or leaves producing trichomes are concerned with specifying trichomes and their functions and therefore modulations of such genes and their products modify trichomes and their products.

[0774] Examples of phenotypes, biochemical activities, and transcription profiles that can be modulated by selected numbers of these genes and gene products singly or in combinations are described above and below.

[0775] III.A.4.b. Use of Trichome Genes, Gene Components and Products to Modulate Phenotypes

[0776] Trichome genes of the instant invention, when mutated or activated differently, are useful for modulating one or more processes of trichome structure and/or function including: (1) development; (2) plant stress tolerance; and (3) biosynthesis or secretion of trichome-specific molecules. Trichome genes, components and gene products are useful to alter or modulate one or more of the following phenotypes:

[0777] 1.) Development

[0778] Trichome differentiation is integrated with leaf development, hormone levels and the vegetative development phase. The first trichome at the leaf tip appears only after the leaf grows to ˜100 μm in length. Subsequent events proceed basipetally as the leaf grows. As leaf development progresses, cell division patterns become less regular and islands of dividing cells can be observed among differentiated pavement cells with their characteristic lobed morphology. Trichome initiation in the expanding leaf occurs within these islands of cells and often defines points along the perimeter of a circle, with an existing trichome defining the center.

[0779] Once a cell enters the trichome pathway it undergoes an elaborate morphogenesis program that has been divided into different stages based on specific morphological hallmarks. The trichome genes, gene components and gene products of this invention are useful to modulate any one or all of these growth and development processes by affecting rate, timing, direction and size, for example. Trichome genes can also affect trichome number and the organs on which they occur, type of trichomes such as glandular trichomes and stellate trichomes; cell properties such as cell size, cell division rate and direction, cell elongation, cell differentiation, secretory cells, trichome number (average trichome number per leaf for mint: 13,500,000), cell walls, cell death, and response to reactive oxygen species; trichome architecture such as trichome cell structure, placement on leaf, and secretory systems; and trichome responses. Trichome genes, gene components and gene products of this invention are useful to modulate one or more of the growth and development processes above; as in timing and rate, for example. In addition, the polynucleotides and polypeptides of the invention can control the response of these processes to internal plant programs and signaling molecules such as leaf development, hormones (including abscisic acid, Auxin, cytokinin, gibberellins, and brassinosteroids, apoptosis; and coordinated trichome growth and development in flowers, stems, petioles, cotyledons, and hypocotyls.

[0780] 2.) Plant Stress Tolerance

[0781] The physical characteristics of trichomes as well as the substances secreted by trichomes are useful in protecting the plant from both biotic and abiotic attacks. Thus, selected trichome genes and gene products can be used to help protect distinct cells, organs, or tissues as well as overall plant yield and vigor. Examples of stresses, tolerances to which are modulated by trichome genes and gene products are drought (e.g., trichome number variation can decrease the surface area that allows evaporation), heat (e.g., trichomes can produce shade and provide protection for meristems), salt, insects (e.g., trichomes can prevent insects from settling on plant surfaces), herbivory (e.g., trichomes can produce harmful chemicals), and ultraviolet light.

[0782] 3.) Biosynthesis, Accumulation or Secretion of Metabolites

[0783] The glandular trichomes from various species are shown to secrete and, sometimes, locally synthesize a number of substances including salt, monoterpenes and sesquiterpenes, terpenoids, exudate, insect entrapping substances, antifeedants, pheromones, and others. Therefore, trichome genes can be used to modulate the synthesis, accumulation and secretion of a large number of metabolites especially related to trichome biology. Some are synthesized in response to biotic and abiotic stresses. For a more detailed description of these metabolites see the section “Use of Trichome Genes to Modulate Biochemical Activities” below.

[0784] Uses of Plants that are Modified as Described Above

[0785] Altering trichome properties is useful for modifying one or more plant traits making the plants more useful in agriculture, horticulture and for the production of valuable molecules. These plant traits include Production of specific carbohydrates, proteins, oils, aromas, flavors, pigments, secondary metabolites such as menthol (and other monoterpenes), etc., that can be used in situ or purified and used in a wide variety of industries; Increased production of molecules synthesized in trichomes by increasing the trichome number on different plant organs, such as cotyledons, leaves, hypocotyls, stems, petioles, etc.; Increased cotton fibers per boll due to decreased numbers of trichomes that reduces insect hiding and contamination; More optimal growth rate of a whole plant or specific parts of a plant due to more optimal trichome cellular development and the better resistance to biotic/abiotic stresses (including plant parts such as whole plant seedling, coleoptile elongation, young leaves, flowers, seeds, and fruit); increased harvested yield of plants, organs and their constituent molecules including biomass (such as fresh and dry weight during any time in plant life, including maturation and senescence, number of flowers, seed yield in terms of number, size, weight, harvest index, content and composition, e.g. amino acid, jasmonate, oil, protein and starch, and fruit yield in terms of number, size, weight, harvest index, post harvest quality, content and composition, e.g. amino acid, jasmonate, oil, protein and starch).

[0786] To regulate any of the phenotype(s) above, activities of one or more of the trichome genes or gene products can be modulated in an organism and tested by screening for the desired trait. Specifically, the gene, mRNA levels, or protein levels can be altered in a plant utilizing the procedures described herein and the phenotypes can be assayed. As an example, a plant can be transformed according to Bechtold and Pelletier (Methods. Mol. Biol. 82:259-266 (1998)) and/or screened for variants as in Winkler et al., Plant Physiol. 118: 743-50 (1998) and visually inspected for the desired phenotype or metabolically and/or functionally assayed.

[0787] III.A.4.c. Use of Trichome Genes, Gene Components and Products to Modulate Biochemical Activities

[0788] The phenotype traits outlined above result from the integration of many cellular trichome associated processes and biochemical activities. Some of these are known from published literature and some can be deduced from the genes discovered in the MA Tables, etc. One or more of these trichome genes, gene components and products are useful to modulate these cellular processes, biochemical or metabolic activities and/or pathways such as those noted below. Such biological activities can be measured according to the citations included in the table below:

| | BIOCHEMICAL OR | |
|---|---|---|
| | METABOLIC | |
| | ACTIVITIES AND/OR | CITATIONS INCLUDING |
| PROCESS | PATHWAYS | ASSAYS |
| Growth, | Cell wall biosynthetic | Molhoj et. al. (2001). Plant |
| Differentiation | enzymes | Mol. Biol. 46, 263-275 |
| And Development | Cell fate determination | Krishnakumar and |
| | proteins | Oppenheimer (1999). |
| | Major pathways of carbon | Development 1221, 3079-3088. |
| | and nitrogen metabolism | Kroumova et al. (1994). |
| | | PNAS 91, 11437-11441 |
| Water | Cytoskeleton and Trichome | Schnittger et al. (1999). |
| Conservation And | morphology and spacing | Plant Cell 11, 1105-1116 |
| Resistance To | controls | Hulskamp et al (1994). Cell |
| Drought And | | 76, 555-566 |
| Other Related | | |
| Stresses | | |
| Trichome exudate | Insect repellant | Insects and The Plant |
| | | Surface, pp 151-172, |
| | | Edward Arnold, London |
| | | (1986) |
| Terpenoid | Terpenoid biosynthesis | Alonso et al. (1992). J. Biol. |
| biosynthesis | enzymes including: | Chem. 267, 7582-7587 |
| including | Farnesyltranstransferase | Rajonarivony et al (1992). |
| monoterpenes and | Geranylgeranyl- | Arch. Biochem. Biophys. |
| sesquiterpenes | diphosphate synthase | 299, 77-82 |
| | Geranyltranstransferase | |
| | Farnesyl-diphosphate | |
| | synthase | |
| | Dimethylallyltranstransferase | |
| | Geranyl-diphosphate | |
| | synthase | |
| H₂O₂ | NADPH oxidase (subunit) | Alverez et al (1998) Cell 92, |
| accumulation and | synthesis and function | 773-784 |
| activation of SAR | | Grant Orozco-Cardenas and |
| | | Ryan (1999) PNAS 96, |
| | | 6553-6557 |
| Antifeedants | Lactone biosynthesis | Paruch et al. (2000). J. |
| biosynthesis and | enzymes | Agric. Food Chem. 48, |
| secretion | | 4973-4977 |
| Pheromone | Farnesine biosynthesis | Teal et al. (1999) Arch. |
| biosynthesis and | enzymes | Insect Biochem Physiol. 42, |
| secretion | | 225-232 |
| Endoreplication | Cyclin and cyclin dependant | De Veylder et al. (2001) |
| | kinases | Plant Cell 13, 1653-1668 |
| | | De Veylder et al. (2001) |
| | | Plant J. 25, 617-626 |

[0789] Specific enzyme and other activities associated with the functions of individual trichome genes that can be modulated by the trichome genes and gene products are listed in the Reference tables where the functions of individual genes and their products are listed. Assays for detecting such biological activities are described in the Protein Domain table, for example.

[0790] III.A.4.d. Use of Trichome Genes, Gene Components and Products to Modulate Phenotypes by Modulating Transcription Levels of Other Genes

[0791] Many of the genes are “up regulated” or “down regulated” in trichomes because they are regulated as members of networks or cascade of genes under the control of regulatory genes. Thus some trichome genes are useful to influence levels of other genes and so orchestrate the complex phenotypes. Examples of the types of genes with altered transcript levels in trichomes are described in the Table below, together with associated biological activities. “Up-regulated” profiles are those where the mRNA levels are higher in the glaborous plants as compared to the “hairy” plant. “Down-regulated” profiles represent higher transcript levels in the “hairy” plant as compared to the glaborous plant.

| | | PHYSIOLOGICAL | EXAMPLES OF |
|---|---|---|---|
| | TYPE OF GENES | CONSEQUENCES | BIOCHEMICAL |
| | WHOSE | OF MODIFYING | ACTIVITIES WHOSE |
| TRANSCRIPT | TRANSCRIPTS ARE | GENE PRODUCT | TRANSCRIPTS ARE |
| LEVELS | CHANGED | LEVELS | CHANGED |
| Up Regulated | Genes active in | Changes in | Transcription |
| Transcripts | suppressing trichome | Hormone | Factors |
| | formation | Perception | Transporters |
| | | Changes in | Change In Cell G- |
| | | Hormone | proteins |
| | | Biosynthesis | Kinases And |
| | | Changes in | Phosphatases |
| | | Specific Gene | Transcription |
| | | Transcription | factors |
| | | Initiation | Ca-binding proteins |
| | | Changes in | Transcription |
| | | cytoskeleton and | Activators |
| | | cell wall | Change In |
| | | assembly and | Chromatin |
| | | structure | Structure And/Or |
| | | | Localized DNA |
| | | | Topology |
| | | | Specific Factors |
| | | | (Initiation And |
| | | | Elongation) For |
| | | | Protein Synthesis |
| | | | Maintenance Of |
| | | | mRNA Stability |
| | | | Maintenance Of |
| | | | Protein Stability |
| | | | Maintenance Of |
| | | | Protein-Protein |
| | | | Interaction |
| Down-Regulated | Genes active in | Changes in | Transcription |
| Transcripts | inducing formation of | Hormone | Factors |
| | trichomes | Perception | Change In Protein |
| | | Changes in | Structure By |
| | | Hormone | Phosphorylation |
| | | Biosynthesis | (Kinases) Or |
| | | Changes in | Dephosphorylation |
| | | Specific Gene | (Phosphatases) |
| | | Transcription | Change In |
| | | Initiation | Chromatin |
| | | Changes in | Structure And/Or |
| | | cytoskeleton and | DNA Topology |
| | | cell wall | G-proteins, Ca2+- |
| | | assembly and | binding proteins |
| | | structure | |
| | Genes associated with | Changes in cell | |
| | Trichome | size, cell shape | |
| | differentiation and | | |
| | structure | | |
| | Genes associated with | Changes in | |
| | trichome-specific | terpenoid | |
| | metabolic pathways | biosynthesis | |
| | | Changes in | |
| | | antifeedant and | |
| | | pheromone | |
| | | biosynthesis | |

[0792] While trichome polynucleotides and gene products can act alone, combinations of these polynucleotides also affect growth, development and leaf biochemistry. Combinations of trichome polynucleotide(s) and/or gene product(s) with genes or gene products involved in leaf development, hormone responses, or vegetative development are useful because trichome development is integrated with these processes.

### Use of Promoters of Trichome Genes

[0793] Promoters of trichome genes are useful for facilitating transcription of desired polynucleotides, both plant and non-plant in trichomes. For example, extra copies of existing terpenoid synthesis coding sequences can be operably linked to a trichome gene promoter and inserted into a plant to increase the terpenoids in the trichome. Alternatively, trichome promoters can direct expression of non-plant genes or genes from another plant species that can, for instance, lead to new terpenoids being made. The promoters can also be operably linked to antisense copies of coding sequences to achieve down regulation of these gene products in cells.

[0794] III.A5. Chloroplast Genes, Gene Components and Products

[0795] The chloroplast is a complex and specialized organelle in plant cells. Its complexity comes from the fact that it has at least six suborganellar compartments subdivided by double-membrane envelope and internal thylakoid membranes. It is specialized to carry out different biologically important processes including photosynthesis and amino acid and fatty acid biosynthesis. The biogenesis and development of chloroplast from its progenitor (the proplasptid) and the conversion of one form of plastid to another (e.g., from chloroplast to amyloplast) depends on several factors that include the developmental and physiological states of the cells.

[0796] One of the contributing problems that complicate the biogenesis of chloroplast is the fact that some, if not most, of its components must come from the outside of the organelle itself. The import mechanisms must take into account to what part within the different sub-compartments the proteins are being targeted; hence the proteins being imported from the cytoplasm must be able to cross the different internal membrane barriers before they can reach their destinations. The import mechanism must also take into account how to tightly coordinate the interaction between the plastid and the nucleus such that both nuclear and plastidic components are expressed in a synchronous and orchestrated manner. Changes in the developmental and physiological conditions within or surrounding plant cells can consequently change this tight coordination and therefore change how import mechanisms are regulated as well. Manipulation of these conditions and modulation of expression of the import components and their function can have critical and global consequences to the development of the plant and to several biochemical pathways occurring outside the chloroplast. Expression patterns of such genes have been determined using microarray technology.

[0797] Microarray technology allows monitoring of gene expression levels for thousands of genes in a single experiment. This is achieved by hybridizing labeled fluorescent cDNA pools to glass slides that contain spots of DNA (Schena et al. (1995) Science 270: 467-70). The US Arabidopsis Functional Genomics Consortium (AFGC) has recently made public the results from such microarray experiments conducted with AFGC chips containing about 10,000 non-redundant ESTs, selected from about 37,000 randomly sequenced ESTs generated from mRNA of different tissues and developmental stages.

[0798] The sequences of the ESTs showing at least two-fold increases or decreases in a mutant in a mutant (CiA2) of Arabidopsis thaliana, that is distributed in chloroplast biogenesis relative to wild type grown in the same conditions were identified, compared to the Ceres full length cDNA and genomic sequence databanks, and equivalent Ceres clones identified. The MA_diff table reports the results of this analysis, indicating those Ceres clones which are up or down regulated over controls, thereby indicating the Ceres clones that are involved in the import of proteins to chloroplast and chloroplast biogenesis.

[0799] Examples of genes and gene products that are involved in the import of proteins to chloroplast are shown in the Reference, Sequence, Protein Group, and Protein Group Matrix tables. While chloroplast protein import polynucleotides and gene products can act alone, combinations of these polynucleotides also affect growth and development. Useful combinations include different chloroplast protein import responsive polynucleotides and/or gene products that have similar transcription profiles or similar biological activities, and members of the same or functionally related biochemical pathways. Whole pathways or segments of pathways are controlled by transcription factor proteins and proteins controlling the activity of signal transduction pathways. Manipulation of one or more chloroplast protein import gene activities are useful to modulate the biological processes and/or phenotypes listed below. Chloroplast protein import responsive genes and gene products can act alone or in combination. Useful combinations include chloroplast protein import responsive genes and/or gene products with similar transcription profiles, similar biological activities, or members of the same or functionally related biochemical pathways. Here, in addition to polynucleotides having similar transcription profiles and/or biological activities, useful combinations include polynucleotides that may have different transcription profiles but which participate in common or overlapping pathways. Whole pathways or segments of pathways are controlled by transcription factor proteins and proteins controlling the activity of signal transduction pathways. Therefore, manipulation of such protein levels is especially useful for altering phenotypes and biochemical activities of plants. Manipulation of one or more chloroplast protein import gene activities are useful to modulate the biological processes and/or phenotypes listed below.

[0800] Such chloroplast protein import responsive genes and gene products can function to either increase or dampen the above phenotypes or activities in response to changes in the regulation of import mechanisms. Further, promoters of chloroplast protein transport responsive genes, as described in the Reference tables, for example, are useful to modulate transcription that is induced by chloroplast protein transport or any of the following phenotypes or biological activities below. Further, any desired sequence can be transcribed in similar temporal, tissue, or environmentally specific patterns as the chloroplast protein transport responsive genes when the desired sequence is operably linked to a promoter of a chloroplast protein transport responsive gene. The MA_diff Table(s) reports the transcript levels of the experiment (see EXPT ID: Chloroplast (relating to SMD 8093, SMD 8094)). For transcripts that had higher levels in the samples than the control, a “+” is shown. A “−” is shown for when transcript levels were reduced in root tips as compared to the control. For more experimental detail see the Example section below.

[0801] Chloroplast genes are those sequences that showed differential expression as compared to controls, namely those sequences identified in the MA_diff tables with a “+” or “−” indication.

[0802] Chloroplast Genes Identified by Cluster Analyses of Differential Expression Chloroplast

[0803] Genes Identified by Correlation to Genes that are Differentially Expressed

[0804] As described above, the transcription profiles of genes that act together are well correlated. Applicants not only have identified the genes that are differentially expressed in the microarray experiments, but also have identified the genes that act in concert with them. The MA_clust table indicates groups of genes that have well correlated transcription profiles and therefore participate in the same pathway or network.

[0805] A pathway or network of Chloroplast genes is any group in the MA_clust that comprises a cDNA ID that also appears in Expt ID Chloroplast (relating to SMD 8093, SMD 8094) of the MA_diff table(s).

[0806] Chloroplast Genes Identified by Correlation to Genes that Cause Physiological Consequences

[0807] Additionally, the differential expression data and the phenotypic observations can be merged to identify pathways or networks of Chloroplast genes. A group in the MA_clust is considered a Chloroplast pathway or network if the group comprises a cDNA ID that also appears in Knock-in or Knock-out tables that causes one or more of the phenotypes described in section above.

[0808] Chloroplast Genes Identified by Amino Acid Sequence Similarity

[0809] Chloroplast genes from other plant species typically encode polypeptides that share amino acid similarity to the sequences encoded by corn and Arabidopsis Chloroplast genes. Groups of Chloroplast genes are identified in the Protein Group table. In this table, any protein group that comprises a peptide ID that corresponds to a cDNA ID member of a Chloroplast pathway or network is a group of proteins that also exhibits Chloroplast functions/utilities.

[0810] III.A.5.a. Use of Chloroplast Protein Import Responsive Genes to Modulate Phenotypes

[0811] Chloroplast protein import responsive genes and gene products are useful to or modulate one or more phenotypes, including growth, roots, stems, and leaves; development, including plastid biogenesis, plastid division, plastid development and thylakoid membrane structures differentiation including plastid/chloroplast differentiation; photosynthesis including carbon dioxide fixation; transport including transcription/translation regulation within transport complex, phosphate translocation, and targeted starch deposition and accumulation; and biosynthesis of essential compounds such as lipid biosynthesis, riboflavin biosynthesis, carotenoid biosynthesis, and aminoacid biosynthesis.

[0812] To improve any of the phenotype(s) above, activities of one or more of the chloroplast protein import responsive genes or gene products can be modulated and the plants tested by screening for the desired trait. Specifically, the gene, mRNA levels, or protein levels can be altered in a plant utilizing the procedures described herein and the phenotypes can be assayed. As an example, a plant can be transformed according to Bechtold and Pelletier (1998, Methods. Mol. Biol. 82:259-266) and/or screened for variants as in Winkler et al. (1998) Plant Physiol 118: 743-50 and visually inspected for the desired phenotype or metabolically and/or functionally assayed according to Saito et al. (1994, Plant Physiol. 106: 887-95), Takahashi et al (1997, Proc. Natl. Acad. Sci. USA 94: 11102-07) and Koprivova et al. (2000, Plant Physiol. 122: 737-46).

[0813] III.A.5.b. Use of Chloroplast Protein Import-Responsive Genes to Modulate Biochemical Activities

[0814] The activities of one or more of the chloroplast protein import responsive genes can be modulated to change biochemical or metabolic activities and/or pathways such as those noted below. Such biological activities can be measured according to the citations included in the table below:

| | BIOCHEMICAL OR | CITATIONS |
|---|---|---|
| | METABOLIC ACTIVITIES | INCLUDING |
| GENERAL CATEGORY | AND/OR PATHWAYS | ASSAYS |
| Cell Growth and | Regulation of Leaf | Reinbothe et al. (1997) Proc. |
| Differentiation | Development Including | Natl. Acad. Sci. USA. |
| | Photosynthetic | 94: 8890-8894 |
| | Apparatus | Eggink and Hoober (2000) J. |
| | | Biol. Chem. 275: 9087-9090 |
| | | Jagtap et al. (1998) J Exptl |
| | | Botany 49: 1715-1721 |
| | Regulation of Plastid | Lawrence and Kindle (1997) |
| | Biogenesis and Plastid | J. Biol. Chem. 272: 20357-20363 |
| | Division | Lahiri and Allison (2000) |
| | | Plant Physiol. 123: 883-894 |
| | Development of Plastid | Kouranov et al. (1999) J. |
| | Inner/Outer and | Biol. Chem. 274: 25181-25186 |
| | thylakoid Membrane | Jackson et al. (1998) J. Biol. |
| | Structures | Chem. 273: 16583-16588 |
| | | Li and Chen (1997) J. Biol. |
| | | Chem. 272: 10968-10974 |
| | | Lawrence and Kindle (1997) |
| | | J. Biol. Chem. 272: 20357-20363 |
| | | Silva-Filho et al. (1997) J. |
| | | Biol. Chem. 272: 15264-15269 |
| | Regulation of | May and Soll (2000) Plant |
| | transcription and/or | Cell 12: 53-63 |
| | translation related to | Caliebe et al. (1997) EMBO |
| | maintenance of stability | J. 16: 7342-7350 |
| | of protein-protein | |
| | interaction within | |
| | transport complex | |
| Physiology | Modulation of | Sung and Krieg (1979) Plant |
| | Photosynthesis | Physiol 64: 852-56 |
| | Regulation of Lipid | Bourgis et al. (1999) Plant |
| | Biosynthesis | Physiol. 120: 913-922 |
| | | Reverdatto et al. (1999) |
| | | Plant Physiol. 119: 961-978 |
| | | Roesler et al. (1997) Plant |
| | | Physiol. 113: 75-81 |
| | Regulation of Riboflavin | Jordan et al. (1999) J. Biol. |
| | (Vitamin B) biosynthesis | Chem. 274: 22114-22121 |
| | Regulation of phosphate | Flugge (1999) Annu. Rev. |
| | translocation across | Plant Physiol. Plant Mol. |
| | chloroplast membrane | Biol. 50: 27-45 |
| | | Silva-Filho et al. |
| | | (1997) J. Biol. Chem. |
| | | 272: 15264-15269 |
| | Regulation of targeted | Yu et al. (1998) Plant |
| | starch depostion and | Physiol. 116: 1451-1460 |
| | accumulation | |
| | Modulation of protein | Summer and Cline (1999) |
| | targeting and | Plant Physiol. 119: 575-584 |
| | translocation across | Dabney-Smith et al. (1999) |
| | chloroplast membrane | J. Biol. Chem. 274: 32351-32359 |
| | | Hinnah et al. (1997) EMBO |
| | | J. 16: 7351-7360 |
| | Regulation of carotenoid | Bonk et al. (1996) Plant |
| | biosynthesis | Physiol. 111: 931-939 |
| | Regulation of amino acid | Flugge (1999) Annu. Rev. |
| | biosynthesis | Plant Physiol. Plant Mol. |
| | | Biol. 50: 27-45 |
| | Regulation of secondary | Flugge (1999) Annu. Rev. |
| | metabolism | Plant Physiol. Plant Mol. |
| | | Biol. 50: 27-45 |
| Signal Transduction | Regulation of gene | Chen et al. (2000) Plant |
| | transcriptional activity | Physiol. 122: 813-822. |
| | specific to chloroplast | Macasev et al. (2000) Plant |
| | protein import | Physiol. 123: 811-816 |
| | Regulation of protein | Lang et al. (1998) J. Biol. |
| | target signal cleavage | Chem. 273: 30973-30978 |
| | and protein degradation | Jackson et al. (1998) J. Biol. |
| | | Chem. 273: 16583-16588 |
| | | Richter and Lamppa (1998) |
| | | Proc. Natl. Acad. Sci. USA. |
| | | 95: 7463-7468 |
| | Regulation of ion | Van der Wijngaard and |
| | channel conformation | Vredenberg (1999) J. Biol. |
| | and activity | Chem. 274: 25201-25204 |
| | Regulation of kinase and | Waegemann and Soll (1996) |
| | phosphatases synthesis | J. Biol. Chem. 271: 6545-6554 |
| | and activity | Li et al. (2000) Science 287-300-303 |
| | | Muller et al. (2000) J. Biol. |
| | | Chem. 275: 19475-19481 |
| | Modulation of Molecular | Bonk et al. (1996) Plant |
| | Chaperone and Other | Physiol. 111: 931-939 |
| | Protein Folding Activity | Walker et al. (1996) J. Biol. |
| | | Chem. 271: 4082-4085 |
| | | Kessler and Blobel (1996). |
| | | Proc. Natl. Acad. Sci. USA |
| | | 93: 7684-7689 |
| | | Jackson et al. (1998) J. Biol. |
| | | Chem. 273: 16583-16588 |

[0815] Other biological activities that can be modulated by the chloroplast protein import responsive genes and gene products are listed in the Reference tables. Assays for detecting such biological activities are described in the Protein Domain table.

[0816] Chloroplast protein import responsive genes are characteristically differentially transcribed in response to fluctuating chloroplast protein import levels or concentrations, whether internal or external to an organism or cell. The MA_diff reports the changes in transcript levels of various chloroplast protein import responsive genes that are differentially expressed among the mutants and the wild type.

[0817] Profiles of some of these chloroplast protein import responsive genes are shown in the Table below together with examples of the kinds of associated biological activities.

| | | | EXAMPLES OF |
|---|---|---|---|
| TRANSCRIPT | | PHYSIOLOGICAL | BIOCHEMICAL |
| LEVELS | TYPE OF GENES | CONSEQUENCES | ACTIVITY |
| Up regulated | Responders to | Chloroplast | Transporters |
| transcripts | defective chloroplast | protein import | Metabolic enzymes |
| | protein import | regulation | Change in cell |
| | Genes induced by | Chloroplast | membrane structure |
| | defective import | protein import and | and potential |
| | | transport | Kinases and |
| | | Chloroplast | phosphatases |
| | | import | Transcription |
| | | metabolism | activators |
| | | Synthesis of | Change in |
| | | secondary | chromatin structure |
| | | metabolites and/or | and/or localized |
| | | proteins | DNA topology |
| | | Modulation of | Redox control |
| | | chloroplast import | Metabolic enzymes |
| | | response | concerned with |
| | | transduction | chloroplast |
| | | pathways | biochemistry |
| | | Changes in | Organelle gene |
| | | chloroplast | expression and |
| | | membranes | translation |
| | | Specific gene | |
| | | transcription | |
| | | initiation | |
| | | Chloroplast and | |
| | | non-chloroplast | |
| | | metabolic | |
| | | pathways | |
| Down-regulated | Responders to | Regulation of | Transcription |
| transcripts | defective chloroplast | chloroplast protein | factors |
| | protein import. | import pathways | Change in protein |
| | Genes repressed by | released | structure by |
| | defective chloroplast | Chloroplast | phosphorylation |
| | protein import | protein import and | (kinases) or |
| | Genes with unsTable | transport | dephosphoryaltion |
| | mRNAs when | Chloroplast | (phosphatases) |
| | chloroplast import is | import | Change in |
| | defective | metabolism | chromatin structure |
| | Genes with | Changes in | and/or DNA |
| | discontinued | pathways and | topology |
| | expression or | processes | Stability factors for |
| | unsTable mRNA in | operating in | protein mRNA |
| | presence of | chloroplasts | synthesis and |
| | chloroplast protein | Changes in | degradation |
| | import | organelle | Organelle |
| | | membranes | transcription and |
| | | Loss of organelle | translation proteins |
| | | gene expression, | Metabolic enzymes |
| | | RNA and protein | |
| | | synthesis | |
| | | Changes in | |
| | | metabolism other | |
| | | than chloroplast | |
| | | protein import | |
| | | pathways | |
| | | Chloroplast | |
| | | import | |
| | | metabolism | |

### Use of Promoters of Chloroplast Genes

[0818] Promoters of Chloroplast genes are useful for transcription of any desired polynucleotide or plant or non-plant origin. Further, any desired sequence can be transcribed in a similar temporal, tissue, or environmentally specific patterns as the Chloroplast genes, where the desired sequence is operably linked to a promoter of a Chloroplast gene. The protein product of such a polynucleotide is usually synthesized in the same cells, in response to the same stimuli as the protein product of the gene from which the promoter was derived. Such promoter are also useful to produce antisense mRNAs to down-regulate the product of proteins, or to produce sense mRNAs to down-regulate mRNAs via sense suppression

[0819] III.A.6. Reproduction Genes, Gene Components and Products

[0820] Reproduction genes are defined as genes or components of genes capable of modulating any aspect of sexual reproduction from flowering time and inflorescence development to fertilization and finally seed and fruit development. These genes are of great economic interest as well as biological importance. The fruit and vegetable industry grosses over $1 billion USD a year. The seed market, valued at approximately $15 billion USD annually, is even more lucrative.

[0821] Expression of many reproduction genes and gene products is orchestrated by internal programs or the surrounding environment of a plant, as described below. These genes and/or products have great importance in determining traits such as fruit and seed yield. Examples of such reproduction genes and gene products are shown in the Reference, Sequence, Protein Group, Protein Group Matrix tables, Knock-in, Knock-out, MA-diff and MA-clust. The biochemical functions of the protein products of many of these genes determined from comparisons with known proteins are also given in the Reference tables.

[0822] Reproduction Genes Identified by Phenotypic Observation

[0823] Reproduction genes were discovered and characterized from a much larger set of genes by experiments designed to find genes that cause phenotypic changes in flower, silique, and seed morphology. In these experiments, reproduction genes were identified by either (1) ectopic expression of a cDNA in a plant or (2) mutagenesis of the plant genome. The plants were then cultivated and phenotypes, which varied from the parental “wild-type”, were observed.

[0824] One particular example of reproductive genes are those that are regulated by AP2. AP2 is a transcription factor that regulates many genes, both as a repressor of some genes and as an activator of others. Some of these genes are those which establish the floral meristem or those which regulate floral organ identity and development. As such, AP2 has an effect on reproduction. This is, loss of AP2 activity is correlated with decreased male and female reproduction. AP2 is also known to have an effect on seed mass, and therefore on yield. That is, overexpression of AP2 is correlated with smaller seeds or seedless fruit while repression of AP2 correlates with larger seeds (see, e.g. U.S. Pat. No. 5,994,622).

[0825] Another example of reproduction genes are those that are regulated by PISTILLATA (PI). PI is a transcription factor that regulates many genes both as a repressor and activator. Some of these genes are those which regulate floral organ identity and development, in conjunction with other transcription factors such as AP2 and AGAMOUS. As such, PI has an effect on reproduction in that loss of PI activity is correlated with decreased male reproduction. PI is also known to have an effect on carpel number, and therefore potentially on ovule/seed number and yield. Specifically, repression of PI results in increased carpel number and therefore ovule number.

[0826] Yet another example of reproductive genes are those that are regulated by MEDEA (MEA). MEA is a SET-domain containing protein that associates with other proteins to form complexes that affect chromatin structure and therefore gene expression. As such, loss of MEA function is correlated with global gene activation and repression leading to many phenotypes including decreased female reproduction and therefore reduced seed set and yield.

[0827] In the characterization of these and other reproduction genes, the following phenotypes were scored:

[0828] I. Flower
[0829] Size
   [0830] Large
   [0831] Small
[0832] Shape
   [0833] Abnormal organ numbers
   [0834] Agamous
   [0835] AP-2 like
[0836] Color
[0837] Number
[0838] Fused Sepals

[0839] II. Silique
[0840] Size
[0841] Seed number
   [0842] Reduced
   [0843] Absent
[0844] Seed color

[0845] The identified genes regulating reproduction are identified in the Knock-in and Knock-out Tables.

[0846] Reproduction Genes Identified by Differential Expression

[0847] Reproduction genes were also identified in experiments designed to discover genes whose mRNA products were in different concentrations in whole flowers, flower parts, and siliques relative to the plant as a whole. The MA_diff Table(s) reports the transcript levels of the experiment (see EXPT ID: 108473, 108474, 108429, 108430, 108431, 108475, 108476, 108501). For transcripts that had higher levels in the samples than the control, a “+” is shown. A “−” is shown for when transcript levels were reduced in root tips as compared to the control. For more experimental detail see the Example section below.

[0848] Reproduction genes are those sequences that showed differential expression as compared to controls, namely those sequences identified in the MA_diff tables with a “+” or “−” indication.

[0849] Reproduction Genes Identified by Cluster Analyses of Differential Expression

[0850] Reproduction Genes Identified by Correlation to Genes that are Differentially Expressed

[0851] As described above, the transcription profiles of genes that act together are well correlated. Applicants not only have identified the genes that are differentially expressed in the microarray experiments, but also have identified the genes that act in concert with them. The MA_clust table indicates groups of genes that have well correlated transcription profiles and therefore participate in the same pathway or network.

[0852] A pathway or network of Reproduction genes is any group in the MA_clust that comprises a cDNA ID that also appears in Expt ID 108473, 108474, 108429, 108430, 108431, 108475, 108476, 108501 of the MA_diff table(s).

[0853] Reproduction Genes Identified by Correlation to Genes that Cause Physiological Consequences

[0854] Additionally, the differential expression data and the phenotypic observations can be merged to identify pathways or networks of Reproduction genes. A group in the MA_clust is considered a Reproduction pathway or network if the group comprises a cDNA ID that also appears in Knock-in or Knock-out tables that causes one or more of the phenotypes described in section above.

[0855] Reproduction Genes Identified by Amino Acid Sequence Similarity

[0856] Reproduction genes from other plant species typically encode polypeptides that share amino acid similarity to the sequences encoded by corn and Arabidopsis Reproduction genes. Groups of Reproduction genes are identified in the Protein Group table. In this table, any protein group that comprises a peptide ID that corresponds to a cDNA ID member of a Reproduction pathway or network is a group of proteins that also exhibits Reproduction functions/utilities.

[0857] It is assumed that the reproduction genes differentially expressed in floral parts and seeds are concerned with specifying flowers and seeds and their functions, and therefore modulations of such genes produce variant flowers and seeds.

[0858] Reproductive genes and gene products can function to either increase or dampen the phenotypes, biochemical activities and transcription profiles, either in response to changes of internal plant programs or to external environmental fluctuations.

[0859] III.A.5.a. Use of Reproduction Genes, Gene Components and Products to Modulate Phenotypes

[0860] The reproduction genes of the instant invention, when mutated or activated differently, are capable of modulating one or more processes of flower, seed and fruit development. They are thus useful for improving plants for agriculture and horticulture and for providing seeds with a better chemical composition for diverse industries including the food, feed and chemical industries. Reproduction genes, gene components and products are useful to alter the following traits and properties of plants, including development, such as flowering time and number of inflorescences, flower development (including anther, stamen, pollen, style, stigma, ovary, ovule, and gametes), pollination and fertilization (including sporogenesis gametogenesis, zygote formation, embryo development, endosperm development, and male sterility, hybrid breeding systems and heterosis); cellular properties, such as cell size, cell shape, cell death, cell division, cell elongation, cell differentiation, and meiosis; organ characteristics, such as flowers, receptacle, sepals, petals, and tepals color, shape, and size, number, and petal drop); androecium, such as stamen (including anther size, pollen sterile, size, shape, weight and color, number, and filament size), gynoecium, such as carpel, ovary. number. and length) and style (stigma, ovule, size, shape, and number); pedicel and peduncle (size and shape), seeds, such as placenta, embryo. cotyledon, endosperm, suspensor, seed coat (testa), aleurone, development, including apomixis (gametophytic, apospory, diplospory), dormancy and germination; fruits, such as pericarp—thickness, texture (exocarp, mesocarp, endocarp); development (seed set, fruit set, false fruit, fruit elongation and maturation, and dehiscence), and fruit drop; plant seed yield, such as increased biomass, better harvest index, attraction of favorable insects, better seed quality, and better yield of constituent chemicals; and plant population features, such as architecture (shade avoidance and planting density).

[0861] To regulate any of the phenotype(s) above, activities of one or more of the reproduction genes or gene products can be modulated in an organism and tested by screening for the desired trait. Specifically, the gene, mRNA levels or protein levels can be altered in a plant using the procedures described herein and the phenotypes can be assayed. As an example, a plant can be transformed according to Bechtold and Pelletier (Methods Mol. Biol. 82:259-266 (1998)) and/or screened for variants as in Winkler et al. (Plant Physiol 118:743-50 (1998)) and visually inspected for the desired phenotype or metabolically and/or functionally assayed.

[0862] III.A.5.b. Use of Reproduction Genes to Modulate Biochemical Activities

[0863] The activities of one or more of the reproduction genes can be modulated to change biochemical or metabolic activities and/or pathways such as those examples noted below. Such biological activities can be measured according to the citations included in the Table below:

| | EXAMPLES OF | |
|---|---|---|
| | BIOCHEMICAL/MOLECULAR | |
| FUNCTION/PROCESS | ACTIVITIES | Reference AND ASSAY |
| Metabolism | Energy production and | Ap Rees, T. (1974). In |
| | conversion | “Plant Biochemistry. |
| | Glucosyl-transferase | Biochemistry, Series One”, |
| | (CLONE_ID 1040) | Vol. 11. (H. L. Kornberg and |
| | Heme-binding protein | D. C. Phillips, eds.), |
| | (putative cytochrom | Butterworths, London. |
| | B5) | Juliano, B. O. and Varner, J. E. |
| | (CLONE_ID 3743) | (1969). Plant Physiol. |
| | Storage protein synthesis | 44, 886-892. |
| | Inorganic ion transport and | Bewley et al. (1993). Plant |
| | metabolism | Physiol. Biochem. 31, 483-490. |
| | Peroxidase | Hills, M. J. and Beevers, H. |
| | (CLONE_ID 100990) | (1987). Plant Physiol. 84, |
| | Cystathione beta | 272-276. |
| | synthase | Olsen, L. J. and Harada, J. J. |
| | (CLONE_ID 21847) | (1991). In “Molecular |
| | Amino acid transport and | Approaches to |
| | metabolism | Compartmentalization and |
| | l-asparaginase | Metabolic Regulation (A. H. C. Huang |
| | (CLONE_ID 92780) | and L. Taiz, eds.), |
| | Putative peptide/amino | ASPP, Rockville, Md. |
| | acid | Mitsuhashi, W. and Oaks, A. |
| | transporter | (1994). Plant Physiol. |
| | (CLONE_ID 113723) | 104, 401-407. |
| | Carbohydrate transport and | Walker-Smith, D. J., and |
| | metabolism | Payne, J. W. (1985). Planta |
| | Glucose transport | 164, 550-556. |
| | protein | Salmenkallio, M. and |
| | (CLONE_ID 33727) | Sopanen, T. (1989). Plant |
| | Putative sugar | Physiol. 89, 1285-1291. |
| | transporter | Baumgartner, B. and |
| | (CLONE_ID 3250) | Chrispeels, M. J. (1976). |
| | Starch biosynthesis | Plant Physiol. 58, 1-6. |
| | Coenzyme metabolism | Elpidina, E. N. et al. (1991). |
| | Tyrosine | Planta 185, 46-52. |
| | aminotransferase | Ericson, M. C. and |
| | (ROOTY/SUPERROOT1) | Chrispeels, M. J. (1973). |
| | (CLONE_ID 14570) | Plant Physiol. 52, 98-104. |
| | Formate dehydrogenase | Kern, R. and Chrispeels, M. J. |
| | (CLONE_ID 7530) | 1978) Plant Physiol. 62, |
| | Lipid metabolism | 815-819. |
| | Branched chain α- | Dilworth, M. F. and Dure, L. |
| | ketoacid | III. (1978). Plant Physiol. |
| | dehydrogenase E2 | 61, 698-702. |
| | subunit | Chrispeels, M. J. and Jones, R. L. |
| | (CLONE_ID 25116) | (1980/81). Isr. J. Bot. |
| | Acyl carrier protein-1 | 29, 222-245. |
| | (CLONE_ID 14291) | Gould, S. E. B., and Rees, D. A. |
| | Lipid metabolic enzymes | (1964). J. Sci. Food |
| | Secretion | Agric. 16, 702-709. |
| | Sensor protein RcsC- | |
| | like | |
| | (CLONE_ID 16461) | |
| | Signal recognition | |
| | particle | |
| | RP54 (CLONE_ID | |
| | 22158) | |
| Modulate floral organ | Transcriptional control | Elliot et al. (1996). Plant |
| number | ANT (AP2-domain) DNA | Cell 8, 155-168. |
| | binding protein | Sakai et al. (2000). Plant |
| | SUP (Zinc finger) | Cell 12, 1607-1618. |
| | | Jacobsen and Meyerowitz |
| | | (1997). Science 277, 1100-1103. |
| Floral organ size | Transcriptional control | Mizukami et al. (2000). |
| | ANT (AP2-domain) DNA | PNAS 97, 942-947. |
| | binding protein | Krizek (1999). |
| | | Developmental Genetics 25, |
| | | 224-236. |
| Female organ | Membrane receptor kinase | Clark and Meyerowitz |
| number/Floral meristem | signal transduction | (1997). Cell 89, 575-585 |
| size | CLV1 (LRR domain and | Jeong et al. (1999). Plant |
| | kinase domain) receptor | Cell 11, 1925-1934. |
| | CLV2 (LRR domain) | Fletcher et al. (1999). |
| | receptor | |
| | CLV3 (Receptor ligand) | Science 283, 1911-1914. |
| Female reproduction | DNA binding protein | Yanofsky et al. (1990). |
| | AG (MADS domain) DNA | Nature 346, 35-39. |
| | binding protein | |
| Female reproduction | Signal transduction | Kieber et al. (1993). Cell |
| | CTR1 (Raf kinase) | 72, 427-441. |
| Male organ number | DNA methylation | Jacobsen and Meyerowitz |
| | MET1 (DNA | (1997). Science 277, 1100-1103. |
| | methyltransferase) | |
| Seed size control | DNA binding protein | Jofuku et al. (1994). Plant |
| | AP2 (AP2 domain) | Cell 6, 1211-1225. |
| | RAP2 (AP2 domain) | US Patent #6,093,874; |
| | | #5,994,622 |
| Seed size control | Polycomb group protein | Luo et al. (2000). PNAS 97, |
| | complex | 10637-10642. |
| | FIE, FIS2, MEA | |
| Seed size control | DNA methylation | Scott et al. (2000). |
| | MET1 | Development 127, 2493-2502. |
| | | Vinkenoog et al. (2000). |
| | | Plant Cell 12, 2271-2282. |
| | | Luo et al. (2000). PNAS 97, |
| | | 10637-10642. |
| Embryo | CAAT box binding complex | Lotan et al. (1998). Cell 93, |
| development/Embryo | LEC1/HAP3 | 1195. |
| viability | HAP2, HAP5 | US Patent #6,235,975 |
| Embryo development/Seed | DNA binding proteins | Finkelstein et al. (1998). |
| dormancy | ABI4 (AP2 domain) | Plant Cell 10, 1043-1054. |
| | FUS3 (B3 domain) | Luerssen et al. (1998). Plant |
| | VP1 (B3 domain) | J. 15, 755-764. |
| Embryo development | Signal transduction | Leung et al. (1994). Science |
| | ABI1, ABI2 | 264, 1448-1452. |
| | [Serine/threonine protein | Leung et al. (1997). Plant |
| | phosphatase 2C (PP2C)] | Cell 9, 759-771. |
| Endosperm development | Chromatin level control of | Ohad et al. (1996). PNAS |
| | gene activity | 93, 5319-5324. |
| | Polycomb complex; FIE, | US Patent #6,229,064 |
| | MEA, FIS2 | Kiyosue et al. (1999). |
| | | PNAS 96, 4186-4191. |
| | | Grossniklaus et al. (1998). |
| | | Science 280, 446-450. |
| | | Chaudhury et al. (1997) |
| | | PNAS 94, 4223-4228. |
| Integument | DNA binding | Jofuku et al. (1994). Plant |
| development/Seed coat | AP2, ANT (AP2 domain) | Cell 6, 1211-1225. |
| development | | Klucher et al. Plant Cell 8, |
| | | 137-153. |
| | BEL1 (Homeodomain) | Reiser et al. (1995). Cell 83, |
| | | 735-742. |
| Anthocyanin production | Secondary transporter | Debeaujon et al. (2001). |
| | TT12 (MATE; multidrug and | Plant Cell 13, 853-872. |
| | toxic compound extrusion) | |
| Anthocyanin production | DNA binding protein | Nesi et al. (2000). Plant Cell |
| | TT8 (Basic helix-loop-helix | 12, 1863-1878. |
| | domain) | |
| Fruit development | Chromatin level control of | Ohad et al. (1996). PNAS |
| | gene activity | 93, 5319-5324. |
| | Polycomb complex; FIE, | Kiyosue et al. (1999). |
| | MEA, FIS2 | PNAS 96, 4186-4191. |
| | | Grossniklaus et al. (1998). |
| | | Science 280, 446-450. |
| | | Chaudhury et al. (1997) |
| | | PNAS 94, 4223-4228. |
| Fruit size control | Signal transduction | Frary et al. (2000). Science |
| | FW2.2 (c-Ras P21) | 289, 85-88. |
| Fruit development/Pod | Transcriptional control | Liljegren et al. (2000). |
| shattering | SHP1, SHP2, FUL (MADS | Nature 404, 766-770. |
| | domain) DNA binding | Ferrandiz et al. (2000). |
| | proteins | Science 289, 436-438.. |
| Transcription and | Transcription | Delseny, M. et al. (1977). |
| Posttranscription | SRF-domain AGL11 | Planta 135, 125-128. |
| | (CLONE_ID 32791) | Lalonde, L. and Bewley, J. D. |
| | AP2-domain containing | (1986). J. Exp. Bot. 37, |
| | protein (CLONE_ID | 754-764. |
| | 332) | Walling, L. et al. (1986). |
| | Myb-DNA binding | PNAS 83, 2123-2125. |
| | protein | Okamuro, J. K. and |
| | (CLONE_ID 94597) | Goldberg, R. B. (1989). In |
| | Transcription factors | “Biochemistry of Plants, |
| | Signal transduction | Vol 15.” Academic Press, |
| | mechanisms | Inc. |
| | Protein-kinases | Wong, J. et al. (1995). |
| | Phosphatases | Genes Dev. 9, 2696-2711. |
| | meiosis proteins | Dimitrov et al. (1994). J. |
| | Chromatin remodeling | Cell Biol. 126, 591-601. |
| | proteins | Landsberger, N. and |
| | Chaperones | Wolffe, A. P. (1997). |
| | Chalcone synthase | EMBO J. 16, 4361-4373. |
| | Putative Ser/Thr protein | Bogdanove, A. J. and |
| | kinase (CLONE_ID | Martin, G. G. (2000). PNAS |
| | 31383) | 97, 8836-8840. |
| | ER6-like protein | Zhu, H. et al. Science Jul. |
| | (implicated in ethylene | 26, 2001: |
| | signal transduction) | 10.1126/science.1062191 |
| | (CLONE_ID 7474) | (Reports). |
| | Translation, ribosomal | |
| | structure and biogenesis | |
| | Ribosomal proTein | |
| | S15A | |
| | (CLONE_ID 17466) | |
| | Translation initiation | |
| | factor | |
| | (CLONE_ID 103464) | |
| | Posttranslational | |
| | modification, protein | |
| | turnover, chaperones | |
| | DnaJ-domain containing | |
| | protein (CLONE_ID | |
| | 4150) | |
| | Cyclophilin-like protein | |
| | (CLONE_ID 35643) | |
| Cell division and Repair | Cell division and | Rogan, P. G. and Simon, E. W. |
| | chromosome partitioning | (1975). New Phytol. 74, |
| | Protein of unknown | 273-275. |
| | function | Morahashi, Y. and Bewley, J. D. |
| | with tropomyosin-, | (1980). Plant Physiol |
| | myosin | 66, 70-73. |
| | tail- and filament- | Morahashi, Y. et al. (1981). |
| | domains | Plant Physiol. 68, 318-323. |
| | (CLONE_ID 15546) | Morahashi, Y. (1986). |
| | Actin-1 | Physiol. Plant. 66, 653-658. |
| | (CLONE_ID 25785) | Zlatanova, J. et al. (1987). |
| | DNA replication, | Plant Mol. Biol. 10, 139-144. |
| | recombination and repair | Zlatanova, J. and Ivanov, P. |
| | Proliferating cell | (1988). Plant Sci. 58, 71-76. |
| | nuclear | |
| | antigen-1 (axillary | |
| | protein, | |
| | DNA polymerase I | |
| | delta) | |
| | (CLONE_ID 28554) | |
| | AAA-type ATPase, | |
| | cdc48 | |
| | (CLONE_ID 100292) | |
| | Cell envelope biogenesis, | |
| | outer membrane | |
| | dTDP-D-glucose 4,6- | |
| | dehydratase | |
| | (CLONE_ID 28597) | |
| | Putative cinnamoyl- | |
| | CoA | |
| | reductase | |
| | (CLONE_ID 109228) | |

[0864] Other biological activities that are modulated by the reproductive genes and gene products are listed in the Reference tables. Assays for detecting such biological activities are described in the Protein Domain table, for example.

[0865] III.5.A.c. Use of Reproduction Genes, Gene Components and Products to Modulate Transcription Levels

[0866] Reproduction genes are characteristically differentially transcribed in response to cell signals such as fluctuating hormone levels or concentrations, whether internal or external to an organism or cell. Many reproduction genes belong to networks or cascades of genes under the control of regulatory genes. Thus some reproduction genes are useful to modulate the expression of other genes. Examples of transcription profiles of reproduction genes are described in the Table below with associated biological activities. “Up-regulated” profiles are those where the mRNA transcript levels are higher in flowers, flower parts or siliques as compared to the plant as a whole. “Down-regulated” profiles represent higher transcript levels in the whole plant as compared to flowers, flower parts or siliques alone.

| | | | EXAMPLES OF |
|---|---|---|---|
| | | | BIOCHEMICAL |
| | | PHYSIOLOGICAL | ACTIVITIES OF |
| | TYPE OF GENES | CONSEQUENCES | GENES WITH |
| TRANSCRIPT | WITH ALTERED | OF ALTERING | ALTERED |
| LEVELS | ACTIVITY | GENE EXPRESSION | EXPRESSION |
| Up Regulated | Genes that control | Flowers form from | Transcription Factors |
| Transcripts | flower differentiation, | flower meristem | Signal transduction |
| Flower | number and size | Floral organs mature | Membrane Structure |
| Reproduction | Genes that promote | Flavonoid pathways | Protein kinases |
| Genes | petal, stamen and | induced | Phosphatases |
| | carpel formation | | Meiosis proteins |
| | Genes controlling | | Chromatin |
| | flower-specific | | remodeling proteins |
| | metabolism such as | | Chaperones |
| | petal pigments | | Chalcone synthase |
| | Genes that promote | | Amino acid transport |
| | ovule formation | | and metabolism |
| | Genes that promote | | Storage protein |
| | fertilization, seed, | | synthesis |
| | embryo and | | Lipid metabolic |
| | endosperm formation | | enzymes |
| | | | Carbohydrate |
| | | | transport and |
| | | | metabolism |
| | | | Starch biosynthesis |
| AP2 | Genes activated by | Many steps and | Proteins associated |
| Reproduction | AP2 transcription | pathways induced, | with: |
| Genes | factors | developmental and | Energy production |
| | Genes that induce | metabolic | and conversion |
| | petal and stamen | No petals or stamens | Amino acid transport |
| | formation | produced | and metabolism |
| | | | Carbohydrate |
| | | | transport and |
| | | | metabolism |
| | | | Lipid metabolism |
| | | | Transcription and |
| | | | signal transduction |
| | | | Poor translational |
| | | | modification |
| | | | DNA replication |
| | | | Chromatin |
| | | | remodeling |
| Down-Regulated | Genes that repress | Flowers form from | Transcritipion factors |
| Transcripts | flower development | flower meristem | Signal transduction |
| Flower | | | pathways |
| Reproduction | | | Kinases and |
| Genes | | | phosphatases |
| | Genes that induce | Non-floral organs are | Chromatin |
| | stem, leaf and other | repressed | remodeling proteins |
| | organ differentiation | | |
| | Genes that negatively | Flower-specific | |
| | regulate flower | pathways are induced | |
| | specific metabolism | | |
| | Genes that negatively | | |
| | regulate ovule | | |
| | formation, meiosis, | | |
| | fertilization and seed | | |
| | development | | |
| AP2 Reproduction | Genes activated by | Many steps and | Proteins associated |
| Genes | AP2 transcription | pathways induced, | with: |
| | factors | developmental and | Energy production |
| | | metabolic | and conversion |
| | Genes that induce | No petals or stamens | Amino acid transport |
| | petal and stamen | produced | and metabolism |
| | formation | | Carbohydrate |
| | | | transport and |
| | | | metabolism |
| | | | Lipid metabolism |
| | | | Transcription and |
| | | | signal transduction |
| | | | Poor translational |
| | | | modification |
| | | | DNA replication |
| | | | Chromatin |
| | | | remodeling |

[0867] While polynucleotides and gene products modulating reproduction can act alone, combinations of these polynucleotides also affect growth and development. Useful combinations include different polynucleotides and/or gene products of the instant invention that have similar transcription profiles or similar biological activities, and members of the same or similar biochemical pathways. In addition, the combination of a polynucleotide and/or gene product(s) capable of modulating reproduction with a hormone responsive polynucleotide, particularly one affected by gibberellic acid and/or Auxin, is also useful because of the interactions that exist between hormone-regulated pathways, and development. Here, in addition to polynucleotides having similar transcription profiles and/or biological activities, useful combinations include polynucleotides that may have different transcription profiles but which participate in common or overlapping pathways.

### Use of Promoters and Reproduction Genes

[0868] Promoter of reproduction genes are useful for transcription of desired polynucleotides, both plant and non-plant. For example, extra copies of carbohydrate transporter genes can be operably linked to a reproduction gene promoter and inserted into a plant to increase the “sink” strength of flowers or siliques. Similarly, reproduction gene promoters can be used to drive transcription of metabolic enzymes capable of altering the oil, starch, protein or fiber of a flower or silique. Alternatively, reproduction gene promoters can direct expression of non-plant genes that can, for instance confer insect resistance specifically to a flower.

[0869] III.A.7. Ovule Genes, Gene Components and Products

[0870] The ovule is the primary female sexual reproductive organ of flowering plants. It contains the egg cell and, after fertilization occurs, contains the developing seed. Consequently, the ovule is at times comprised of haploid, diploid and triploid tissue. As such, ovule development requires the orchestrated transcription of numerous polynucleotides, some of which are ubiquitous, others that are ovule-specific and still others that are expressed only in the haploid, diploid or triploid cells of the ovule.

[0871] Although the morphology of the ovule is well known, little is known of these polynucleotides and polynucleotide products. Mutants allow identification of genes that participate in ovule development. As an example, the pistillata (PI) mutant replaces stamens with carpels, thereby increasing the number of ovules present in the flower. Accordingly, comparison of transcription levels between the wild-type and PI mutants allows identification of ovule-specific developmental polynucleotides.

[0872] Changes in the concentration of ovule-specific polynucleotides during development results in the modulation of many polynucleotides and polynucleotide products. Examples of such ovule-specific responsive polynucleotides and polynucleotide products are shown in the Reference, Sequence, Protein Group, Protein Group Matrix, MA_diff, and MA_clust tables. These polynucleotides and/or products are responsible for effects on traits such as fruit production and seed yield.

[0873] While ovule-specific developmentally responsive polynucleotides and polynucleotide products can act alone, combinations of these polynucleotides also affect fruit and seed growth and development. Useful combinations include different ovule-specific developmentally responsive polynucleotides and/or polynucleotide products that have similar transcription profiles or similar biological activities, and members of the same or similar biochemical pathways. In addition, the combination of an ovule-specific developmentally responsive polynucleotide and/or polynucleotide product with an environmentally responsive polynucleotide is also useful because of the interactions that exist between development, hormone-regulated pathways, stress pathways and nutritional pathways. Here, in addition to polynucleotides having similar transcription profiles and/or biological activities, useful combinations include polynucleotides that may have different transcription profiles but which participate in a common pathway. The MA_diff Table(s) reports the transcript levels of the experiment (see EXPT ID: 108595). For transcripts that had higher levels in the samples than the control, a “+” is shown. A “−” is shown for when transcript levels were reduced in root tips as compared to the control. For more experimental detail see the Example section below.

[0874] Ovule genes are those sequences that showed differential expression as compared to controls, namely those sequences identified in the MA_diff tables with a “+” or “−” indication.

[0875] Ovule Genes Identified by Cluster Analyses of Differential Expression

[0876] Ovule Genes Identified by Correlation to Genes that are Differentially Expressed

[0877] As described above, the transcription profiles of genes that act together are well correlated. Applicants not only have identified the genes that are differentially expressed in the microarray experiments, but also have identified the genes that act in concert with them. The MA_clust table indicates groups of genes that have well correlated transcription profiles and therefore participate in the same pathway or network.

[0878] A pathway or network of Ovule genes is any group in the MA_dust that comprises a cDNA ID that also appears in Expt ID 108595 of the MA_diff table(s).

[0879] Ovule Genes Identified by Correlation to Genes that Cause Physiological Consequences

[0880] Additionally, the differential expression data and the phenotypic observations can be merged to identify pathways or networks of Ovule genes. A group in the MA_clust is considered a Ovule pathway or network if the group comprises a cDNA ID that also appears in Knock-in or Knock-out tables that causes one or more of the phenotypes described in section above.

[0881] Ovule Genes Identified by Amino Acid Sequence Similarity

[0882] Ovule genes from other plant species typically encode polypeptides that share amino acid similarity to the sequences encoded by corn and Arabidopsis Ovule genes. Groups of Ovule genes are identified in the Protein Group table. In this table, any protein group that comprises a peptide ID that corresponds to a cDNA ID member of a Ovule pathway or network is a group of proteins that also exhibits Ovule functions/utilities.

[0883] Such ovule-specific developmentally responsive polynucleotides and polynucleotide products can function to either increase or dampen the above phenotypes or activities either in response to transcript changes during ovule development or in the absence of ovule-specific polynucleotide fluctuations. More specifically, ovule-specific developmentally responsive polynucleotides and polynucleotide products are useful to or modulate one or more of the phenotypes, including egg cell, maturation (for development of parthenogenic embryos), metabolism, polar nuclei, fusion (for development of parthenogenic endosperm), central cell, maturation, metabolism (for alteration of endosperm metabolism), synergids, maturation, programmed cell death, nucellus, maturation, integuments, maturation, funiculus, extension (for increased seed), cuticle, maturation, tensile properties (for increased seed size), ovule, modulation of ovule senescence, and shaping (for increased seed number).

[0884] To produce the desired phenotype(s) above, one or more of the ovule-specific developmentally responsive polynucleotides and polynucleotide products can be tested by screening for the desired trait. Specifically, the polynucleotide, mRNA levels, or protein levels can be altered in a plant utilizing the procedures described herein and the phenotypes can be assayed. As an example, a plant can be transformed according to Bechtold and Pelletier (1998, Methods. Mol. Biol. 82:259-266) and visually inspected for the desired phenotype or metabolically and/or functionally assayed according to Weigel et al. (2000, Plant Physiol 122: 1003-14) and Winkler et al. (1998, Plant Physiol 118: 743-50).

[0885] Alternatively, the activities of one or more of the ovule-specific developmentally responsive polynucleotides and polynucleotide products can be modulated to change biochemical or metabolic activities and/or pathways such as those noted below. Such biological activities can be measured according to the citations included in the Table below:

| | BIOCHEMICAL OR | |
|---|---|---|
| GENERAL | METABOLIC ACTIVITIES | |
| CATEGORY | AND/OR PATHWAYS | ASSAY |
| Cell Growth and | Programmed Cell Death | Pennell and Lamb |
| Differentiation | | (1997) Plant Cell 9, |
| | | 1157-1168 |
| | DNA Methylation and | Adams et al. (2000) |
| | Imprinting | Development 127: |
| | | 2493-502 |
| Organ Growth and | Ovule Growth and | De Martinis and |
| Development | Development | Mariani (1999) |
| | Ethylene Response | Plant Cell 11: |
| | Megagametophyte | 1061-72 |
| | Development | Christensen et al. |
| | Seed Growth and | (1997) Sexual Plant |
| | Development | Reproduc 10: 49-64 |
| | Fertilization | Scott et al. (1998) |
| | Independent | Development 125: |
| | Seed Development | 3329-41 |
| | | Ohad et al. (1996) |
| | | PNAS USA 93: |
| | | 5319-24 |
| | | Chaudhury et al. |
| | | (1997) PNAS USA |
| | | 94: 4223-28 |
| Signal Transduction | Ethylene Metabolism | DeMartinis and |
| | Protein Remodeling | Mariani (1999) |
| | Sucrose Mobilization | Plant Cell 11: |
| | and | 1061-1072 |
| | Partitioning | Winkler et al. |
| | Pollen Tube Adhesion | (1998) Plant |
| | Jasmonic Acid | Physiol 118: |
| | Biosynthesis | 743-750 |
| Senescence and Cell | Apomixis | |
| Death | | |
| Environmental | Wound and Defense | Epple and |
| Responses | Response Gene | Bohlmann (1997) |
| | Expression | Plant Cell 9: 509-20 |
| | Stress Response | He et al. (1998) |
| | | Plant J. 14: 55-63 |

[0886] Other biological activities that can be modulated by the ovule-specific developmentally responsive polynucleotides and polynucleotide products are listed in the Reference tables. Assays for detecting such biological activities are described in the Protein Domain table section.

[0887] Ovule-specific developmentally responsive polynucleotides are characteristically differentially transcribed in response to fluctuating developmental-specific polynucleotide levels or concentrations, whether internal or external to a cell. The MA_diff Table reports the changes in transcript levels of various ovule-specific developmentally responsive polynucleotides in ovules.

[0888] These data can be used to identify a number of types of ovule-specific developmentally responsive polynucleotides. Profiles of these different ovule-specific developmentally responsive polynucleotides are shown in the Table below with examples of associated biological activities.

| | | | EXAMPLES OF |
|---|---|---|---|
| TRANSCRIPTS | | PHYSIOLOGICAL | BIOCHEMICAL |
| AFFECTED BY | TYPES OF GENES | CONSEQUENCES | ACTIVITY |
| Ethylene Signals | Responders to | Ethylene Perception | Transcription |
| | Ethylene | Ethylene Uptake | Factors |
| | | Modulation of Ethylene | Transporters |
| | | Response Transduction | |
| | | Pathways | |
| | | Specific Gene | |
| | | Transcription Initiation | |
| Protein | | Repression of Pathways | Inhibit Transport of |
| Remodeling | | to Optimize Abscissic | Abscissic acid |
| | | acid Response Pathways | Degradation |
| Lower at 1 hours | High Abscissic acid | | Abscissic acid |
| than 6 hours | Responders | | Metabolic Pathways |
| | Repressor of Abscissic | Negative Regulation of | |
| | acid Deprivation | Abscissic acid Pathways | |
| | Pathways | | |

### Use of Promoters of Ovule Genes

[0889] Promoters of Ovule genes are useful for transcription of any desired polynucleotide or plant or non-plant origin. Further, any desired sequence can be transcribed in a similar temporal, tissue, or environmentally specific patterns as the Ovule genes where the desired sequence is operably linked to a promoter of a Ovule gene. The protein product of such a polynucleotide is usually synthesized in the same cells, in response to the same stimuli as the protein product of the gene from which the promoter was derived. Such promoter are also useful to produce antisense mRNAs to down-regulate the product of proteins, or to produce sense mRNAs to down-regulate mRNAs via sense suppression.

[0890] III.A.8. Seed and Fruit Development Genes, Gene Components and Products

[0891] The ovule is the primary female sexual reproductive organ of flowering plants. At maturity it contains the egg cell and one large central cell containing two polar nuclei encased by two integuments that, after fertilization, develops into the embryo, endosperm, and seed coat of the mature seed, respectively. As the ovule develops into the seed, the ovary matures into the fruit or silique. As such, seed and fruit development requires the orchestrated transcription of numerous polynucleotides, some of which are ubiquitous, others that are embryo-specific and still others that are expressed only in the endosperm, seed coat, or fruit. Such genes are termed fruit development responsive genes.

[0892] Changes in the concentration of fruit-development responsive polynucleotides during development results in the modulation of many polynucleotides and polynucleotide products. Examples of such fruit development responsive polynucleotides and polynucleotide products relative to leaves and floral stem are shown in the Reference, Sequence, Protein Group, Protein Group Matrix, MA_diff, MA_clust, Knock-in and Knock-out tables. The polynucleotides were discovered by isolating fruits at developmental stages from Arabidopsis wild-type ecotype “Wassilewskija”, and measuring the mRNAs expressed in them relative to those in a leaf and floral stem sample. These polynucleotides and/or products are responsible for effects on traits such as seed size, seed yield, seed composition, seed dormancy, fruit ripening, fruit production, and pod shattering.

[0893] While fruit development responsive polynucleotides and polynucleotide products can act alone, combinations of these polynucleotides also affect fruit and seed growth and development. Useful combinations include different polynucleotides and/or polynucleotide products that have similar transcription profiles or similar biological activities, and members of the same or functionally similar biochemical pathways. In particular, modulation of transcription factors and/or signal transduction pathways are likely to be useful for manipulating whole pathways and hence phenotypes. In addition, the combination of ovule-developmentally responsive polynucleotides and/or polynucleotide products with environmentally responsive polynucleotides is also useful because of the interactions that exist between development, hormone-regulated pathways, stress and pathogen induced pathways and nutritional pathways. Here, useful combinations include polynucleotides that may have different transcription profiles, and participate in common or overlapping pathways but combine to produce a specific, phenotypic change.

[0894] Such fruit development responsive polynucleotides and polynucleotide products can function to either increase or dampen the above phenotypes or activities either in response to transcript changes in fruit development or in the absence of fruit development polynucleotide fluctuations.

[0895] The MA_diff Table(s) reports the transcript levels of the experiment (see EXPT ID: 108436, 108437, 108438). For transcripts that had higher levels in the samples than the control, a “+” is shown. A “−” is shown for when transcript levels were reduced in root tips as compared to the control. For more experimental detail see the Example section below.

[0896] Fruit genes are those sequences that showed differential expression as compared to controls, namely those sequences identified in the MA_diff tables with a “+” or “−” indication.

[0897] Fruit Genes Identified by Cluster Analyses of Differential Expression

[0898] Fruit Genes Identified by Correlation to Genes that are Differentially Expressed

[0899] As described above, the transcription profiles of genes that act together are well correlated. Applicants not only have identified the genes that are differentially expressed in the microarray experiments, but also have identified the genes that act in concert with them. The MA_clust table indicates groups of genes that have well correlated transcription profiles and therefore participate in the same pathway or network.

[0900] A pathway or network of Fruit genes is any group in the MA_clust that comprises a cDNA ID that also appears in Expt ID 108436, 108437, 108438 of the MA_diff table(s).

[0901] Fruit Genes Identified by Correlation to Genes that Cause Physiological Consequences

[0902] Additionally, the differential expression data and the phenotypic observations can be merged to identify pathways or networks of Fruit genes. A group in the MA_clust is considered a Fruit pathway or network if the group comprises a cDNA ID that also appears in Knock-in or Knock-out tables that causes one or more of the phenotypes described in section above.

[0903] Fruit Genes Identified by Amino Acid Sequence Similarity

[0904] Fruit genes from other plant species typically encode polypeptides that share amino acid similarity to the sequences encoded by corn and Arabidopsis Fruit genes. Groups of Fruit genes are identified in the Protein Group table. In this table, any protein group that comprises a peptide ID that corresponds to a cDNA ID member of a Fruit pathway or network is a group of proteins that also exhibits Fruit functions/utilities.

[0905] Use of Fruit Development Responsive Genes to Modulate Phenotypes

[0906] Manipulation of the polynucleotides in the mature ovule, developing embryo, endosperm, seed coat and fruit enables many features of seed and fruit to be improved including the following:
[0907] Female fertility, megasporogenesis, embryo and endosperm development, ovule size, endosperm size, embryo size, seed size, seed yield, seed protein, seed oil, seed starch, seed cell number, cell size, seed coat development, organ size, dormancy and acquisition of desiccation tolerance, seed storage and longevity, seed germination, apomixis, production of seedless fruit and vegetables and hybrid seed production.

[0908] To improve any of the phenotype(s) above, activities of one or more of the fruit development responsive polynucleotides and polynucleotide products can be modulated and the plants can be tested by screening for the desired trait. Specifically, the polynucleotide, mRNA levels, or protein levels can be altered in a plant utilizing the procedures described herein and the phenotypes can be assayed. As an example, a plant can be transformed according to Bechtold and Pelletier (1998, Methods. Mol. Biol. 82:259-266) and visually inspected for the desired phenotype or metabolically and/or functionally assayed.

[0909] Use of Fruit Development Responsive Genes to Modulate Biochemical Activities

[0910] The activities of one or more of the fruit-expressed polynucleotides and polynucleotide products can be modulated to change biochemical or metabolic activities and/or pathways such as those noted below. Such biological changes can be achieved and measured according to citations such as the following:
[0911] 1. Winkler et al. (1998). Plant Physiol. 118, 743-750
[0912] 2. Weigel et al. (2000). Plant Physiol. 122, 1003-1014
[0913] 3. Cosgrove (1997). Plant Cell 9, 1031-1041
[0914] 4. Jacobs (1997). Plant Cell 9, 1021-1029
[0915] 5. Reismeier et al. (1994). EMBO J. 13, 1-7
[0916] 6. Carland et al. (1999). Plant Cell 11, 2123-2138
[0917] 7. Cheng et al. (1996). Plant Cell 8, 971-983
[0918] 8. Weber et al. (1995). Plant Cell 7, 1835-1846
[0919] 9. Leyser and Furner (1992). Development 116, 397-403
[0920] 10. Hayashi et al. (1998). Plant Cell 10, 183-196.
[0921] 11. Pyke (1999). Plant Cell 11, 549-556
[0922] 12. Lotan et al. (1998). Cell 93, 1195-1205
[0923] 13. Lending and Larkins (1989). Plant Cell 1, 1011-1023
[0924] 14. Hong et al. (1996). Development 122, 2051-2058.
[0925] 15. Fernandez et al. (2000). Science 289, 436-438
[0926] 16. D'Aoust et al. (1999). Plant Cell 11, 2407-2418
[0927] 17. Bewley (1997). Plant Cell 9, 1055-1066
[0928] 18. Heath et al. (1986). Planta 169, 304-312
[0929] 19. Browse et al. (1986). Anal. Biochem. 152, 141-145
[0930] 20. D'Aoust et al. (1999). Plant Cell 11, 2407-2418

[0931] Other biological activities that can be modulated by the fruit-specific developmentally responsive polynucleotides and polynucleotide products are listed in Reference Tables. Assays for detecting such biological activities are described in the table as well as in the Protein Domain tables.

| | BIOLOGICAL | | | | |
|---|---|---|---|---|---|
| | FUNCTION | UTILITY | CITATION | ASSAY | CITATION |
| Ovule Growth, | Ethylene and | Manipulate | De Martinis | Analyze | Winkler et al. |
| Ovule | ethylene | female | and Mariani | ovule and | (1998). Plant |
| Development | signal | fertility. | (1999). Plant | seed | Physiol. 118, |
| and Seed | transduction | Manipulate | Cell 11, 1061-1072. | development | 743-750. |
| Growth and | pathway | megasporo- | Silencing | by light | Systematic |
| Development | Examples: | genesis. | gene | microscopy | reverse |
| | AP2 domain | Manipulate | expression of | or by | genetics of |
| | DNA binding | female | the ethylene- | confocal | transfer- |
| | proteins; | gametophyte | forming | microscopy. | DNA-tagged |
| | EREBP, EBF | development. | enzyme results | Test for | lines of |
| | Example: | Manipulate | in a reversible | fertilization | Arabidopsis. |
| | Leucine-rich | fertilization | inhibition of | independent | Weigel et al. |
| | receptor | independent | ovule | endosperm | (2000). Plant |
| | kinase; ETR- | endosperm | development in | development. | Physiol 122, |
| | like | development. | transgenic | Test for | 1003-1014. |
| | Example: Raf | Manipulate | tobacco plants. | fertilization | Activation |
| | kinase; CTR | fertilization | Christensen et | independent | tagging in |
| | | independent | al. (1997). | embryo | Arabidopsis. |
| | | embryo | Sexual Plant | development. | Ohad et al. |
| | | development. | Reproduc. 10, | Test for | (1996). PNAS |
| | | Manipulate | 49-64. | fertilization | USA 93, |
| | | fertilization | Megagametogenesis | independent | 5319-5324. A |
| | | independent | in | seed | mutation that |
| | | seed | Arabidopsis | production. | allows |
| | | development. | wild type and | Analyze seed | endosperm |
| | | Manipulate | the Gf mutant. | size. | development |
| | | ovule size. | Christiansen | Analyze seed | without |
| | | Manipulate | and Drews, | yield. | fertilization |
| | | endosperm | unpublished | Analyze seed | Chaudhury et |
| | | size. | | composition. | al. (1997). |
| | | Manipulate | | Analyze fruit | PNAS USA |
| | | embryo size. | | size. | 94, 4223-4228. |
| | | Manipulate | | | Fertilization- |
| | | seed size. | | | independent |
| | | Manipulate | | | seed |
| | | seed yield. | | | development |
| | | Manipulate | | | in Arabidopsis |
| | | seed protein. | | | thaliana |
| | | Manipulate | | | De Martinis |
| | | seed oil. | | | and Mariani |
| | | Manipulate | | | (1999). Plant |
| | | starch | | | Cell 11, 1061-1072. |
| | | production. | | | Silencing |
| | | Manipulate | | | gene |
| | | cell number. | | | expression of |
| | | Manipulate | | | the ethylene- |
| | | cell size. | | | forming |
| | | Produce | | | enzyme results |
| | | seedless fruit | | | in a reversible |
| | | and | | | inhibition of |
| | | vegetables | | | ovule |
| | | Manipulate | | | development in |
| | | fruit size. | | | transgenic |
| | | | | | tobacco plants. |
| | | | | | Christensen et |
| | | | | | al. (1997). |
| | | | | | Sexual Plant |
| | | | | | Reproduc. 10, |
| | | | | | 49-64. |
| | | | | | Megagametogenesis |
| | | | | | in |
| | | | | | Arabidopsis |
| | | | | | wild type and |
| | | | | | the Gf mutant. |
| | | | | | Scott et al. |
| | | | | | (1998). |
| | | | | | Development |
| | | | | | 125, 3329-3341. |
| | | | | | Parent- |
| | | | | | of-origin |
| | | | | | effects on |
| | | | | | seed |
| | | | | | development |
| | | | | | in |
| | | | | | Arabidopsis |
| | | | | | thaliana |
| | | | | | Heath et al. |
| | | | | | (1986). |
| | | | | | Planta 169, |
| | | | | | 304-312. |
| | | | | | Browse et al. |
| | | | | | (1986). Anal. |
| | | | | | Biochem. |
| | | | | | 152, 141-145. |
| | | | | | D'Aoust et al. |
| | | | | | (1999). Plant |
| | | | | | Cell 11, |
| | | | | | 2407-2418. |
| | 2. Growth | Manipulate | Wilson et al. | Analyze ovule | Winkler et al. |
| | and | female | (1996). Plant | and seed | (1998). Plant |
| | developmental | fertility. | Cell 8, 659-671. A | development | Physiol. 118, |
| | control | Manipulate | dissociation | by light | 743-750. |
| | genes | megasporo- | insertion | microscopy or | Systematic |
| | — | genesis. | causes a | by confocal | reverse |
| | Upregulated | Manipulate | semidominant | microscopy. | genetics of |
| | genes | female | mutation that | Test for | transfer- |
| | Example: | gametophyte | increases | fertilization | DNA-tagged |
| | DNA binding | development. | expression of | independent | lines of |
| | proteins; tiny- | Manipulate | TINY, an | endosperm | Arabidopsis. |
| | like, AGL1, | fertilization | Arabidopsis | development. | Weigel et al. |
| | FBP2, AGL9, | independent | gene related to | Test for | (2000). Plant |
| | AP3, CPC- | endosperm | APETALA2. | fertilization | Physiol 122, |
| | like myb. | development. | Zhao et al | independent | 1003-1014. |
| | Example: | Manipulate | (1999). | embryo | Activation |
| | Protein | fertilization | Developmental | development. | tagging in |
| | kinase; | independent | Genetics 25, | Test for | Arabidopsis. |
| | ASK1. | embryo | 209-223. The | fertilization | Ohad et al. |
| | Example: | development. | ASK1 gene | independent | (1996). PNAS |
| | Auxin | Manipulate | regulates | seed | USA 93, |
| | conjugating | fertilization | development | production. | 5319-5324. A |
| | enzyme; | independent | and interacts | Analyze seed | mutation that |
| | indole-3- | seed | with the UFO | size. | allows |
| | acetate beta- | development. | gene to | Analyze seed | endosperm |
| | glucosyltransferase. | Manipulate | control floral | yield. | development |
| | Example: S/T | ovule size. | organ identity | Analyze seed | without |
| | protein | Manipulate | in | composition. | fertilization |
| | kinase; | endosperm | Arabidopsis. | Analyze fruit | Chaudhury et |
| | APK1. | size. | Flanagan et | size. | al. (1997). |
| | Example: | Manipulate | al. (1996). | Analyze | PNAS USA |
| | Leucine-rich | embryo size. | Plant J. 10, | seedling size. | 94, 4223-4228. |
| | receptor | Manipulate | 343-53. | Analyze | Fertilization- |
| | kinase; | organ size | Specific | seedling | independent |
| | CLV1, ER, | and number. | expression of | viability. | seed |
| | BRI, Cf-2- | Manipulate | the AGL1 | Screen for | development |
| | like. | seed size. | MADS-box | changes in | in |
| | — | Manipulate | gene suggests | shatter time. | Arabidopsis |
| | Downregulated | seed yield. | regulatory | Screen for | thaliana |
| | genes | Manipulate | functions in | changes in | De Martinis |
| | Example: | seedling size | Arabidopsis | germination | and Mariani |
| | Cyclin- | through seed | gynoecium | frequency. | (1999). Plant |
| | dependent | size. | and ovule | Screen for | Cell 11, 1061-1072. |
| | kinase; cdc2. | Manipulate | development. | seed longevity | Silencing |
| | | seedling vigor | Angenent et | and viability. | gene |
| | | through seed | al. (1994). | | expression of |
| | | size. | Plant J 1994. | | the ethylene- |
| | | Manipulate | 5, 33-44. Co- | | forming |
| | | seed protein. | suppression of | | enzyme results |
| | | Manipulate | the petunia | | in a reversible |
| | | seed oil. | homeotic gene | | inhibition of |
| | | Manipulate | fbp2 affects | | ovule |
| | | starch | the identity of | | development in |
| | | production. | the generative | | transgenic |
| | | Manipulate | meristem. | | tobacco plants. |
| | | integument | AGL9 web | | Christensen et |
| | | development. | page. | | al. (1997). |
| | | Manipulate | Wada et al. | | Sexual Plant |
| | | seedcoat | (1997) | | Reproduc. 10, |
| | | development. | Science 277, | | 49-64. |
| | | Manipulate | 1113-6. | | Megagametogenesis |
| | | cell size. | Epidermal cell | | in |
| | | Manipulate | differentiation | | Arabidopsis |
| | | cell number. | in Arabidopsis | | wild type and |
| | | Manipulate | determined by | | the Gf mutant. |
| | | homeotic | a Myb | | Scott et al. |
| | | gene | homolog | | (1998). |
| | | expression. | CPC. | | Development |
| | | Manipulate | Szerszen et al. | | 125, 3329-3341. |
| | | organ size. | (1994). | | Parent- |
| | | Manipulate | Science 16, | | of-origin |
| | | meristem size. | 1699-1701. | | effects on |
| | | Produce | iaglu, a gene | | seed |
| | | seedless fruit | from Zea | | development |
| | | and | mays | | in |
| | | vegetables | involved in | | Arabidopsis |
| | | Manipulate | conjugation of | | thaliana. |
| | | fruit size. | growth | | Heath et al. |
| | | Manipulate | hormone | | (1986). |
| | | time of seed | indole-3- | | Planta 169, |
| | | dispersal. | acetic acid. | | 304-312. |
| | | Manipulate | Ito et al. | | Browse et al. |
| | | seed viability | (1997). Plant | | (1986). Anal. |
| | | upon storage. | Cell Physiol. | | Biochem. |
| | | Manipulate | 38, 248-258. A | | 152, 141-145. |
| | | germination | serine/threonine | | D'Aoust et al. |
| | | frequency. | protein | | (1999). Plant |
| | | | kinase gene | | Cell 11, 2407-2418. |
| | | | isolated by an | | |
| | | | in vivo | | |
| | | | binding | | |
| | | | procedure | | |
| | | | using the | | |
| | | | Arabidopsis | | |
| | | | floral | | |
| | | | homeotic | | |
| | | | gene product, | | |
| | | | AGAMOUS. | | |
| | | | Clark et al. | | |
| | | | (1997). Cell | | |
| | | | 89, 575-585. | | |
| | | | The | | |
| | | | CLAVATA1 | | |
| | | | gene encodes | | |
| | | | a putative | | |
| | | | receptor | | |
| | | | kinase that | | |
| | | | controls shoot | | |
| | | | and floral | | |
| | | | meristem size | | |
| | | | in | | |
| | | | Arabidopsis. | | |
| | | | Torii et al. | | |
| | | | (1996). Plant | | |
| | | | Cell 8, 735-746. | | |
| | | | The | | |
| | | | Arabidopsis | | |
| | | | ERECTA | | |
| | | | gene encodes | | |
| | | | a putative | | |
| | | | receptor | | |
| | | | protein kinase | | |
| | | | with | | |
| | | | extracellular | | |
| | | | leucine-rich | | |
| | | | repeats. | | |
| | | | Li and Chory | | |
| | | | (1997). Cell | | |
| | | | 90, 929-38. A | | |
| | | | putative | | |
| | | | leucine-rich | | |
| | | | repeat | | |
| | | | receptor | | |
| | | | kinase | | |
| | | | involved in | | |
| | | | brassinosteroid | | |
| | | | signal | | |
| | | | transduction. | | |
| | 3. Cell | Manipulate | Solomon et al. | Analyze ovule | Winkler et al. |
| | senescence | female | (1999). Plant | and seed | (1998). Plant |
| | and cell death | fertility. | Cell 11, 431-444. | development | Physiol. 118, |
| | Example: | Manipulate | The | by light | 743-750. |
| | Cystatin | seed set. | involvement of | microscopy or | Systematic |
| | Example: | Manipulate | cysteine | by confocal | reverse |
| | WIPK | seed yield. | proteases and | microscopy. | genetics of |
| | | Manipulate | protease | Analyze seed | transfer- |
| | | seed size. | inhibitor genes | set. | DNA-tagged |
| | | Manipulate | in the | Analyze seed | lines of |
| | | fruit set. | regulation of | size. | Arabidopsis. |
| | | Promote | programmed | Analyze seed | Weigel et al. |
| | | apomixis. | cell death in | yield. | (2000). Plant |
| | | Produce | plants. | Analyze fruit | Physiol 122, |
| | | Seedless fruit | Zhang et al. | set. | 1003-1014. |
| | | and | (2000). Plant J. | Screen for | Activation |
| | | vegetables. | 23, 339-347. | fertilization | tagging in |
| | | | Multiple levels | independent | Arabidopsis. |
| | | | of tobacco | seed | Ohad et al. |
| | | | WIPK | development. | (1996). PNAS |
| | | | activation | | USA 93, |
| | | | during the | | 5319-5324. A |
| | | | induction of cell | | mutation that |
| | | | death by fungal | | allows |
| | | | elicitins. | | endosperm |
| | | | | | development |
| | | | | | without |
| | | | | | fertilization |
| | 4. Protein | Manipulate | Christensen et | Test for | Winkler et al. |
| | remodeling | female | al. (1997). | altered female | (1998). Plant |
| | Example: | fertility. | Sexual Plant | fertility, seed | Physiol. 118, |
| | DNA-J | Manipulate | Reproduc. 10, | set, seed | 743-750. |
| | protein/chaperones | female | 49-64. | yield. | Systematic |
| | | gametophyte | Megagametogenesis | Analyze ovule | reverse |
| | | development. | in | development | genetics of |
| | | Promote | Arabidopsis | by light | transfer- |
| | | apomixis. | wild type and | microscopy or | DNA-tagged |
| | | Manipulate | the Gf mutant. | by confocal | lines of |
| | | endosperm | Cory | microscopy. | Arabidopsis. |
| | | development. | Christiansen | Analyze seed | Weigel et al. |
| | | Manipulate | and Gary | size. | (2000). Plant |
| | | embryo | Drews, | Analyze seed | Physiol 122, |
| | | development. | unpublished | yield. | 1003-1014. |
| | | Manipulate | | Analyze seed | Activation |
| | | seed size. | | composition. | tagging in |
| | | Manipulate | | | Arabidopsis. |
| | | seed yield. | | | Christensen et |
| | | Manipulate | | | al. (1997). |
| | | seed protein. | | | Sexual Plant |
| | | Manipulate | | | Reproduc. 10, |
| | | seed oil. | | | 49-64. |
| | | Manipulate | | | Megagametogenesis |
| | | starch. | | | in |
| | | Produce | | | Arabidopsis |
| | | seedless fruit | | | wild type and |
| | | and | | | the Gf mutant. |
| | | vegetables. | | | Ohad et al. |
| | | | | | (1996). PNAS |
| | | | | | USA 93, |
| | | | | | 5319-5324. A |
| | | | | | mutation that |
| | | | | | allows |
| | | | | | endosperm |
| | | | | | development |
| | | | | | without |
| | | | | | fertilization |
| | | | | | Scott et al. |
| | | | | | (1998). |
| | | | | | Development |
| | | | | | 125, 3329-3341. |
| | | | | | Parent- |
| | | | | | of-origin |
| | | | | | effects on |
| | | | | | seed |
| | | | | | development |
| | | | | | in |
| | | | | | Arabidopsis |
| | | | | | thaliana. |
| | | | | | Heath et al. |
| | | | | | (1986). |
| | | | | | Planta 169, |
| | | | | | 304-312. |
| | | | | | Browse et al. |
| | | | | | (1986). Anal. |
| | | | | | Biochem. |
| | | | | | 152, 141-145. |
| | | | | | D'Aoust et al. |
| | | | | | (1999). Plant |
| | | | | | Cell 11, |
| | | | | | 2407-2418. |
| | 5. Sucrose | Manipulate | Mapping of | Analyze ovule | Winkler et al. |
| | mobilization and | female | tomato genes | and seed | (1998). Plant |
| | partitioning | fertility. | associated | development | Physiol. 118, |
| | Example: | Manipulate | with sugar | by light | 743-750. |
| | Invertase | ovule | metabolism. | microscopy or | Systematic |
| | inhibitor | development. | Tomato | by confocal | reverse |
| | Example: | Manipulate | Genetics Co- | microscopy. | genetics of |
| | bZIP | seed | op Report 48, | Determine | transfer-DNA- |
| | transcription | development. | 22-23 (1998) | female | tagged lines of |
| | factor | Manipulate | Ikeda et al. | fertility. | Arabidopsis. |
| | (translation of | endosperm | (1999). Plant | Analyze seed | Weigel et al. |
| | bZIP protein | development. | Physiol 121, | mass. | (2000). Plant |
| | is inhibited by | Manipulate | 813-820. | Analyze seed | Physiol 122, |
| | sucrose levels | embryo | Sucrose and | yield. | 1003-1014. |
| | greater than | development. | Cytokinin | Analyze seed | Activation |
| | 25 mM) | Manipulate | Modulation of | composition. | tagging in |
| | Example: | seed size. | WPK4, a | Analyze | Arabidopsis. |
| | Lipoxygenase | Manipulate | Gene | organ size. | Christensen et |
| | — | seed yield. | Encoding a | Analyze | al. (1997). |
| | Downregulated | Manipulate | SNF1-Related | seedling size. | Sexual Plant |
| | gene | seed protein. | Protein | Analyze | Reproduc. 10, |
| | Example: | Manipulate | Kinase from | seedling | 49-64. |
| | SNF1-related | seed oil. | Wheat. | viability. | Megagametogenesis |
| | protein kinase | Manipulate | Rook et al. | | in |
| | | starch. | (1998). Plant | | Arabidopsis |
| | | Manipulate | J. 15, 253-263. | | wild type and |
| | | cell size. | Sucrose- | | the Gf mutant. |
| | | Manipulate | specific | | Ohad et al. |
| | | cell number. | signaling | | (1996). PNAS |
| | | Manipulate | represses | | USA 93, |
| | | organ size. | translation of | | 5319-5324. A |
| | | Manipulate | the | | mutation that |
| | | meristem | Arabidopsis | | allows |
| | | size. | ATB2 bZIP | | endosperm |
| | | Manipulate | transcription | | development |
| | | seedling size | factor gene. | | without |
| | | through seed | Rook et al. | | fertilization |
| | | size. | (1998). Plant | | Scott et al. |
| | | Manipulate | Mol Biol | | (1998). |
| | | seedling | 37, 171-178. | | Development |
| | | viability | The light- | | 125, 3329-3341. |
| | | through seed | regulated | | Parent- |
| | | size. | Arabidopsis | | of-origin |
| | | Produce | bZIP | | effects on |
| | | seedless fruit | transcription | | seed |
| | | and | factor gene | | development |
| | | vegetables. | ATB2 | | in |
| | | Translational | encodes a | | Arabidopsis |
| | | control of | protein with | | thaliana. |
| | | gene | an unusually | | 6. Heath et al. |
| | | expression in | long leucine | | (1986). |
| | | ovule and | zipper | | Planta 169, |
| | | seed by | domain. | | 304-312. |
| | | sucrose. | Bunker et al. | | 7. Browse et |
| | | Manipulate | (1995). Plant | | al. (1986). |
| | | assimilate | Cell 7, 1319-1331. | | Anal. |
| | | partitioning in | Sink | | Biochem. |
| | | ovule and | limitation | | 152, 141-145. |
| | | seed | induces the | | 8. D'Aoust et |
| | | development. | expression of | | al. (1999). |
| | | | multiple | | Plant Cell 11, |
| | | | soybean | | 2407-2418. |
| | | | vegetative | | |
| | | | lipoxygenase | | |
| | | | mRNAs while | | |
| | | | the | | |
| | | | endogenous | | |
| | | | jasmonic acid | | |
| | | | level remains | | |
| | | | low. | | |
| | | | Lowry et al. | | |
| | | | (1998). Plant | | |
| | | | Physiol. 116, | | |
| | | | 923-933. | | |
| | | | Specific | | |
| | | | soybean | | |
| | | | lipoxygenases | | |
| | | | localize to | | |
| | | | discrete | | |
| | | | subcellular | | |
| | | | compartments | | |
| | | | and their | | |
| | | | mRNAs are | | |
| | | | differentially | | |
| | | | regulated by | | |
| | | | source-sink | | |
| | | | status. | | |
| | 6. Jasmonic | Targeted | Sanders et al. | Test for | Winkler et al. |
| | acid | death of cells | (2000). Plant | altered female | (1998). Plant |
| | biosynthesis | belonging to | Cell 12, 1041-1062. | fertility. | Physiol. 118, |
| | and | the female | The | Analyze male | 743-750. |
| | signal | gametophyte, | Arabidopsis | fertility. | Systematic |
| | transduction | ovule or | DELAYED | Screen for | reverse |
| | pathway | integuments. | DEHISCENCE1 | enhanced | genetics of |
| | Example: | Delay | gene | expression of | transfer- |
| | Biosynthetic | senescence of | encodes an | pathogen | DNA-tagged |
| | enzyme; | unfertilized | enzyme in the | defense | lines of |
| | FMN | female | jasmonic acid | response | Arabidopsis |
| | oxidoreductase | gametophyte, | synthesis | genes. | Weigel et al. |
| | 12- | ovule or | pathway. | | (2000). Plant |
| | oxophyto- | integuments. | Vijayan et al. | | Physiol 122, |
| | dienoate | Manipulate | (1998). A role | | 1003-1014. |
| | reductase, | female | for jasmonate | | Activation |
| | OPR1, OPR1- | fertility | in pathogen | | tagging in |
| | like. | Coordinate | defense of | | Arabidopsis. |
| | Example: | female with | Arabidopsis. | | |
| | Signal | male | PNAS USA | | |
| | transduction | reproduction. | 95, 7209-7214. | | |
| | pathway | Manipulate | Seo et al. | | |
| | kinase WIPK. | male fertility. | (1999). Plant | | |
| | | Enhanced | Cell 11, 289-298. | | |
| | | defense | Jasmonate- | | |
| | | response in | based wound | | |
| | | ovules and | signal | | |
| | | seed | transduction | | |
| | | | requires | | |
| | | | activation of | | |
| | | | WIPK, a | | |
| | | | tobacco | | |
| | | | mitogen- | | |
| | | | activated | | |
| | | | protein | | |
| | | | kinase. | | |
| Environmental | 1. Wound and | Pathogen | Song et al. | Resistance to | Winkler et al. |
| responses | defense | resistant | (1995). | Xanthamonas | (1998). Plant |
| | response gene | ovules. | Science 270, | sp. | Physiol. 118, |
| | expression | Pathogen | 1804-1806. A | Resistance to | 743-750. |
| | Example: | resistant | receptor | known | Systematic |
| | Leucine rich | seeds. | kinase-like | arabidopsis | reverse |
| | receptor S/T | Pathogen | protein | pathogens in | genetics of |
| | kinase; Xa21- | resistant fruit. | encoded by the | ovules, seed | transfer-DNA- |
| | like and | | rice disease | and fruit. | tagged lines of |
| | TMK-like. | | resistance | | Arabidopsis. |
| | Example: | | gene, Xa21. | | Weigel et al. |
| | Cell wall- | | Seo et al. | | (2000). Plant |
| | associated | | (1995). Science | | Physiol 122, |
| | protein kinase | | 270, 1988-1992. | | 1003-1014. |
| | WAK1. | | Tobacco | | Activation |
| | Example: | | MAP kinase: a | | tagging in |
| | Thionins. | | possible | | Arabidopsis. |
| | | | mediator in | | Epple and |
| | | | wound signal | | Bohlmann |
| | | | transduction | | (1997). Plant |
| | | | pathways. | | Cell 9, 509-520. |
| | | | He et al. | | Overexpression |
| | | | (1998). Plant J. | | of an |
| | | | 14, 55-63. | | endogenous |
| | | | Requirement | | thionin |
| | | | for the induced | | enhances |
| | | | expression of a | | resistance of |
| | | | cell wall | | Arabidopsis |
| | | | associated | | against |
| | | | receptor kinase | | Fusarium |
| | | | for survival | | oxysporum. |
| | | | during the | | He et al. |
| | | | pathogen | | (1998). Plant |
| | | | response. | | J. 14, 55-63. |
| | | | He et al. | | Requirement |
| | | | (1999). Plant | | for the |
| | | | Mol. Biol. 39, | | induced |
| | | | 1189-1196. A | | expression of |
| | | | cluster of five | | a cell wall |
| | | | cell wall- | | associated |
| | | | associated | | receptor |
| | | | receptor kinase | | kinase for |
| | | | genes, Wak1-5, | | survival |
| | | | are expressed | | during the |
| | | | in specific | | pathogen |
| | | | organs of | | response. |
| | | | Arabidopsis. | | |
| | | | Epple and | | |
| | | | Bohlmann | | |
| | | | (1997). Plant | | |
| | | | Cell 9, 509-520. | | |
| | | | Overexpression | | |
| | | | of an | | |
| | | | endogenous | | |
| | | | thionin | | |
| | | | enhances | | |
| | | | resistance of | | |
| | | | Arabidopsis | | |
| | | | against | | |
| | | | Fusarium | | |
| | | | oxysporum. | | |
| | | | Ichimura et al. | | |
| | | | (1998). DNA | | |
| | | | Res. 5,341-5348. | | |
| | | | Molecular | | |
| | | | cloning and | | |
| | | | characterization | | |
| | | | of three cDNAs | | |
| | | | encoding | | |
| | | | putative | | |
| | | | mitogen- | | |
| | | | activated | | |
| | | | protein kinase | | |
| | | | kinases | | |
| | | | (MAPKKs) in | | |
| | | | Arabidopsis | | |
| | | | thaliana. | | |
| | 2. Stress | Manipulate | Close, T. J. | Test for | Winkler et al. |
| | response to | drought | (1996). | enhanced | (1998). Plant |
| | cold, drought, | resistance. | Physiol. Plant | sensitivity to | Physiol. 118, |
| | salinity, seed | Manipulate | 97, 795-803. | drought, | 743-750. |
| | maturation, | desiccation | Dehydrins: | dessication, | Systematic |
| | embryo | tolerance in | emergence of | cold, salinity, | reverse |
| | development, | flowers, | a biochemical | in ovules, | genetics of |
| | ABA. | ovules and | role of a | developing | transfer- |
| | Example: | seeds. | family of | seed and | DNA-tagged |
| | Dehydrins | Manipulate | plant | seedlings. | lines of |
| | Example: | cold tolerance | dehydration | Test for | Arabidopsis. |
| | NPK1-like | in flowers, | proteins. | enhanced | Weigel et al. |
| | protein kinase | ovules, and | Kovtun et al. | tolerance to | (2000). Plant |
| | Example: | seeds. | (2000). PNAS | drought, | Physiol 122, |
| | DNA binding | Manipulate | USA 97, | dessication, | 1003-1014. |
| | protein genes: | seed | 2940-2945. | cold, salinity, | Activation |
| | CBF-like, | dormancy. | Functional | in ovules, | tagging in |
| | DREB2A, | Manipulate | analysis of | developing | Arabidopsis. |
| | RAP2.1. | germination | oxidative | seed and seed. | |
| | | frequency. | stress- | Test for | |
| | | Manipulate | activated | changes in | |
| | | seed storage | mitogen- | seed viability | |
| | | and viability. | activated | upon storage. | |
| | | | protein kinase | Test for | |
| | | | cascade in | changes in | |
| | | | plants. | germination | |
| | | | | frequencies. | |
| | 3. Response | Altered | Bender and | Test for | Winkler et al. |
| | to starvation, | response to | Fink (1998). | enhanced | (1998). Plant |
| | wounding, | starvation. | A myb | sensitivity to | Physiol. 118, |
| | and pathogen | Altered | homologue, | starvation, | 743-750. |
| | attack by | response to | ATR1, | wounding, | Systematic |
| | tryptophan | wounding. | activates | and pathogen | reverse |
| | synthesis. | Altered | tryptophan | attack. | genetics of |
| | Example: | response to | gene | Test for | transfer- |
| | DNA binding | pathogen | expression in | enhanced | DNA-tagged |
| | protein; | attack. | arabidopsis. | tolerance to | lines of |
| | ATR1-like | | PNAS USA | starvation, | Arabidopsis. |
| | myb. | | 95, 5655-5660. | wounding, | Weigel et al. |
| | Example: | | | and pathogen | (2000). Plant |
| | Auxin | | | attack. | Physiol 122, |
| | conjugating | | | | 1003-1014. |
| | enzyme; | | | | Activation |
| | indole-3- | | | | tagging in |
| | acetate beta- | | | | Arabidopsis. |
| | glucosyltransferase. | | | | |
| Cell | Stearoyl-acyl | Production of | Merlo et al. | Analyze seed | Winkler et al. |
| metabolism | carrier | oils high in | (1998). Plant | size. | (1998). Plant |
| | protein | saturated fatty | Cell 10, 1603-1621. | Analyze seed | Physiol. 118, |
| | desaturase | acids | | yield. | 743-750. |
| | Example: | Manipulate | | Analyze seed | Systematic |
| | C18 fatty acid | membrance | | composition. | reverse |
| | desaturation | composition | | Analyze seed | genetics of |
| | | | | oil by gas | transfer- |
| | | | | chromatography. | DNA-tagged |
| | | | | | lines of |
| | | | | | Arabidopsis. |
| | | | | | Weigel et al. |
| | | | | | (2000). Plant |
| | | | | | Physiol 122, |
| | | | | | 1003-1014. |
| | | | | | Activation |
| | | | | | tagging in |
| | | | | | Arabidopsis. |
| | | | | | Browse et al. |
| | | | | | (1986). Anal. |
| | | | | | Biochem. |
| | | | | | 152, 141-145. |
| | 2. Manipulate | Manipulate | Mathews and | Analyze seed | Winkler et al. |
| | nitrogen | asparagine | Van Holde | size. | (1998). Plant |
| | economy | degradation in | | Analyze seed | Physiol. 118, |
| | Example: | ovules and | | yield. | 743-750. |
| | Asparaginase | seeds. | | Analyze seed | Systematic |
| | | Manipulate | | composition. | reverse |
| | | endosperm | | | genetics of |
| | | production. | | | transfer- |
| | | Manipulate | | | DNA-tagged |
| | | embryo | | | lines of |
| | | development. | | | Arabidopsis. |
| | | Manipulate | | | Weigel et al. |
| | | ovule size. | | | (2000). Plant |
| | | Manipulate | | | Physiol 122, |
| | | seed size. | | | 1003-1014. |
| | | | | | Activation |
| | | | | | tagging in |
| | | | | | Arabidopsis. |
| | | | | | Heath et al. |
| | | | | | (1986). |
| | | | | | Planta 169, |
| | | | | | 304-312. |
| | | | | | Browse et al. |
| | | | | | (1986). Anal. |
| | | | | | Biochem. |
| | | | | | 152, 141-145. |
| | | | | | D'Aoust et al. |
| | | | | | (1999). Plant |
| | | | | | Cell 11, |
| | | | | | 2407-2418. |

[0932] Fruit development responsive polynucleotides are characteristically differentially transcribed in response to fluctuating developmental-specific polynucleotide levels or other signals, whether internal or external to a cell. MA_diff reports the changes in transcript levels of various fruit development responsive polynucleotides in fruits.

[0933] These data can be used to identify a number of types of fruit development responsive polynucleotides. Profiles of some of these different fruit development responsive polynucleotides are shown in the table below with examples of the kinds of associated biological activities. Because development is a continuous process and many cell types are being examined together, the expression profiles of genes overlap between stages of development in the chart below.

| | | | Examples of |
|---|---|---|---|
| | Developmental | | Biochemical |
| Transcript Levels | Process | Metabolic Pathways | Activity |
| (0-5 mm) >> (5-10 mm) ≅ | Ovule Elongation | Hormone Production, | Transcription |
| (>10 mm) | Tissue Specialization | Transport, Perception, | Factors |
| (0-5 mm) >> (5-10 mm) > | Vascular system | Signalling, Response (e.g., | Transporters |
| (>10 mm) | Meristem | Gibberellin, Ethylene, Auxin) | Kinases |
| (0-5 mm) > (5-10 mm) ≅ | Endosperm | Cell wall Biosynthesis | Changes in |
| (>10 mm) | Seed coat | Lipid Biosynthesis | cytoskeletal |
| | Fruit | Specific Gene Transcription | protein activity |
| | | Initiation | modulating cell |
| | | Sucrose Mobilization and | structure |
| | | Partitioning | Stability factors |
| | | Sucrose Signaling | for protein |
| | | Lipoxygenase | translation |
| | | Localization | Changes in cell |
| | | Repressors of Metabolic | wall/membrane |
| | | Pathways | structure |
| | | Protein Remodeling | Chromatin |
| | | | structure and/or |
| | | | DNA topology |
| | | | Biosynthetic |
| | | | enzymes |
| (5-10 mm) >> (0-5 mm) > | Tissue Specialization | Cell Wall Biosynthesis | Transcription |
| (>10 mm) | Vascular System | Specific Gene Transcription | Factors |
| (5-10 mm) > (0-5 mm) ≅ | Organelle | Initiation | Transporters |
| (>10 mm) | Differentiation | Sucrose Mobilization and | Kinases |
| (5-10 mm) >> (0-5 mm) ≅ | Cotyledon Elongation | Partitioning | Chaperones |
| (>10 mm) | (cell division) | Sucrose Signaling | Changes in |
| | Vacuome | Repressors of Metabolic | cytoskeletal |
| | Development | Pathways | protein activity |
| | Lipid Deposition | Auxin Perception, | modulating cell |
| | | Response and Signaling | strucure |
| | | Protein Remodeling | Stability of |
| | | Lipid Biosynthesis and | factors for |
| | | Storage | protein |
| | | | translation |
| | | | Changes in cell |
| | | | wall/membrane |
| | | | structure |
| | | | Chromatin |
| | | | structure and/or |
| | | | DNA topology |
| | | | Biosynthetic |
| | | | enzymes |
| (>10 mm) > (0-5 mm) ≅ | Cotyledon Elongation | Cell Elongation | Transcription |
| (5-10 mm) | (expansion) | Specific Gene Transcription | Factors |
| | Lipid Deposition | Initiation | Transporters |
| | Protein Deposition | Sucrose Mobilization and | Kinases |
| | Desiccation | Partitioning | Chaperones |
| | | Sucrose Signaling | for protein |
| | | Lipoxygenase | translation |
| | | Localization | Changes in cell |
| | | Repressors of metabolic | wall/membrane |
| | | pathways | structure |
| | | Hormone Perception, | Chromatin |
| | | Response and Signaling (e.g. | structure and/or |
| | | abscissic acid) | DNA topology |
| | | Protein Remodeling | Biosynthetic |
| | | Protein synthesis and Storage | enzymes |
| | | Lipid Synthesis and Storage | Metabolic |
| | | Acquisition of Dessication | enzymes |
| | | Tolerance | |
| | | Senescence | |
| (0-5 mm) < (5-10 mm) ≅ | Ovule Elongation | Cell elongation | Transcription |
| (>10 mm) | Repressors of | Negative regulation of | Factors |
| (0-5 mm) << (5-10 mm) ≅ | Ethylene | ethylene pathways | Transporters |
| (>10 mm) | production | Maintenance of Ethylene | Kinases |
| (0-5 mm) << (5-10 mm) < | Tissue | response | Chaperones |
| (>10 mm) | specialization | Changes in pathways and | Stability of |
| (0-5 mm) << (>10 mm) < | Vascular System | processes operation in cells | factors |
| (5-10 mm) | Meristem | | Biosynthetic |
| | Cotyledon | | enzymes |
| | Seed Coat | | Metabolic |
| | | | enzymes |
| (5-10 mm) < (0-5 mm) ≅ | Organelle | Negative regulation of | Transcription |
| (>10 mm) | differentiation | hormone pathways | Factors |
| | Cotyledon elongation | Maintenance of hormone | Transporters |
| | (division) | response | Kinases |
| | Vacuome | Changes in pathways and | Chaperones |
| | development | processes operation in cells | |
| | Lipid development | Dehydration and acquisition of | |
| | Desiccation | desiccation tolerance | |
| | | Senescence | |
| (>10 mm) < (0-5 mm) ≅ | Cotyledon Elongation | Cell elongation | Transcription |
| (5-10 mm) | (expansion) | Negative regulation of | Factors |
| | Lipid deposition | hormone pathways | Transporters |
| | Protein deposition | Maintenance of hormone | Kinases |
| | Desiccation | response | Chaperones |
| | | Changes in pathways and | Metabolic |
| | | processes operation in cells | enzymes |
| | | Dehydration and acquisition of | Biosynthetic |
| | | desiccation tolerance | enzymes |
| | | Senescence | |
| (0-5 mm) ≅ (5-10 mm) ≅ | All stages | Ribosome/polysome | Transcription |
| (>10 mm) | | production and maintenance | Factors |
| | | Housekeeping genes | Transporters |
| | | | Kinases |
| | | | Chaperones |

[0934] III.B. Development Genes, Gene Components and Products

[0935] III.B.1. Imbibition and Germination Responsive Genes, Gene Components and Products

[0936] Seeds are a vital component of the world's diet. Cereal grains alone, which comprise ˜90% of all cultivated seeds, contribute up to half of the global per capita energy intake. The primary organ system for seed production in flowering plants is the ovule. At maturity, the ovule consists of a haploid female gametophyte or embryo sac surrounded by several layers of maternal tissue including the nucleus and the integuments. The embryo sac typically contains seven cells including the egg cell, two synergids, a large central cell containing two polar nuclei, and three antipodal cells. That pollination results in the fertilization of both egg and central cell. The fertilized egg develops into the embryo. The fertilized central cell develops into the endosperm. And the integuments mature into the seed coat. As the ovule develops into the seed, the ovary matures into the fruit or silique. Late in development, the developing seed ends a period of extensive biosynthetic and cellular activity and begins to desiccate to complete its development and enter a dormant, metabolically quiescent state. Seed dormancy is generally an undesirable characteristic in agricultural crops, where rapid germination and growth are required. However, some degree of dormancy is advantageous, at least during seed development. This is particularly true for cereal crops because it prevents germination of grains while still on the ear of the parent plant (preharvest sprouting), a phenomenon that results in major losses to the agricultural industry. Extensive domestication and breeding of crop species have ostensibly reduced the level of dormancy mechanisms present in the seeds of their wild ancestors, although under some adverse environmental conditions, dormancy may reappear. By contrast, weed seeds frequently mature with inherent dormancy mechanisms that allow some seeds to persist in the soil for many years before completing germination.

[0937] Germination commences with imbibition, the uptake of water by the dry seed, and the activation of the quiescent embryo and endosperm. The result is a burst of intense metabolic activity. At the cellular level, the genome is transformed from an inactive state to one of intense transcriptional activity. Stored lipids, carbohydrates and proteins are catabolized fueling seedling growth and development. DNA and organelles are repaired, replicated and begin functioning. Cell expansion and cell division are triggered. The shoot and root apical meristem are activated and begin growth and organogenesis. Schematic 4 summarizes some of the metabolic and cellular processes that occur during imbibition. Germination is complete when a part of the embryo, the radicle, extends to penetrate the structures that surround it. In Arabidopsis, seed germination takes place within twenty-four (24) hours after imbibition. As such, germination requires the rapid and orchestrated transcription of numerous polynucleotides. Germination is followed by expansion of the hypocotyl and opening of the cotyledons. Meristem development continues to promote root growth and shoot growth, which is followed by early leaf formation.

[0938] Genes with activities relevant to imbibition-germination and early seedling growth are described in the two sections A and B below.

[0939] III.B.1.a. Identification of Imbibition and Germination Genes

[0940] Imbibition and germination includes those events that commence with the uptake of water by the quiescent dry seed and terminate with the expansion and elongation of the shoots and roots. The germination period exists from imbibition to when part of the embryo, usually the radicle, extends to penetrate the seed coat that surrounds it. Imbibition and germination genes identified herein are defined as genes, gene components and products capable of modulating one or more processes of imbibition and germination described above. They are useful to modulate many plant traits from early vigor to yield to stress tolerance. Examples of such germination genes and gene products are shown in the Reference and Sequence Tables. The functions of many of the genes were deduced from comparisons with known proteins and are also given in the REF Tables.

[0941] Imbibition and Germination Genes Identified by Phenotypic Observations

[0942] Imbibition and germination genes are active, potentially active or more active during growth and development of a dry seed into a seedling. These genes herein were discovered and characterized from a much larger set of genes in experiments designed to find genes that cause poor germination.

[0943] In these experiments, imbibition and germination genes were identified by either 1) ectopic expression of a cDNA in a plant or (2) mutagenesis of the plant genome. The seeds were then imbibed and cultivated under standardized conditions and any phenotypic differences in the modified plants compared with the parental “wild-type” seedlings were recorded. The genes causing the changes were deduced from the cDNA inserted or gene mutated. The phenotypic differences observed were poor germination and aberrant seedlings.

[0944] Imbibition and Germination Genes Identified by Differential Expression

[0945] Germination genes were also identified by measuring the relative levels of mRNA products of genes in different stages of germination of a seed versus the plant as a whole. Specifically, mRNA was isolated from whole imbibed seeds of Arabidopsis plants 1, 2, 3 or 4 days after imbibition and compared to mRNA isolated from dry seed-utilizing microarray procedures. The MA_diff Table reports the transcript levels of the experiment. For transcript levels that were higher in the imbibed seed than in dry seed a “+” is shown. A “−” is shown when the transcript levels in dry seed were greater than those in imbibed seed. For more experimental detail, see the examples below:

[0946] Germination associated genes can be identified by comparing expression profiles of imbibed gibberellin treated and untreated gal mutant seed. Germination associated genes can also be identified by comparing expression profiles in late maturation seed from wild-type and mutants that are defective for the establishment of dormancy and can germinate precociously (e.g. aba1, aba2, abi4 in arabidopsis and vp1, vp5 in maize) or are defective for the specification of cotyledon identity and dessication tolerance (e.g. lec1, lec2, and fus3).

[0947] The MA_diff Table(s) reports the transcript levels of the experiment (see EXPT ID: 108461, 108462, 108463, 108464, 108528, 108529, 108530, 108531, 108545, 108546, 108547, 108518, 108529, 108543, 108544). For transcripts that had higher levels in the samples than the control, a “+” is shown. A “−” is shown for when transcript levels were reduced in root tips as compared to the control. For more experimental detail see the Example section below.

[0948] Imbibed & Germinating Seeds genes are those sequences that showed differential expression as compared to controls, namely those sequences identified in the MA_diff tables with a “+” or “−” indication.

[0949] Imbibed & Germinating Seeds Genes Identified by Cluster Analyses of Differential Expression

[0950] Imbibed & Germinating Seeds Genes Identified by Correlation to Genes that are Differentially Expressed

[0951] As described above, the transcription profiles of genes that act together are well correlated. Applicants not only have identified the genes that are differentially expressed in the microarray experiments, but also have identified the genes that act in concert with them. The MA_clust table indicates groups of genes that have well correlated transcription profiles and therefore participate in the same pathway or network.

[0952] A pathway or network of Imbibed & Germinating Seeds genes is any group in the MA_clust that comprises a cDNA ID that also appears in Expt ID 108461, 108462, 108463, 108464, 108528, 108529, 108530, 108531, 108545, 108546, 108547, 108518, 108529, 108543, 108544 of the MA_diff table(s).

[0953] Imbibed & Germinating Seeds Genes Identified by Correlation to Genes that Cause Physiological Consequences

[0954] Additionally, the differential expression data and the phenotypic observations can be merged to identify pathways or networks of Imbibed & Germinating Seeds genes. A group in the MA_clust is considered a Imbibed & Germinating Seeds pathway or network if the group comprises a cDNA ID that also appears in Knock-in or Knock-out tables that causes one or more of the phenotypes described in section above.

[0955] Imbibed & Germinating Seeds Genes Identified by Amino Acid Sequence Similarity

[0956] Imbibed & Germinating Seeds genes from other plant species typically encode polypeptides that share amino acid similarity to the sequences encoded by corn and Arabidopsis Imbibed & Germinating Seeds genes. Groups of Imbibed & Germinating Seeds genes are identified in the Protein Group table. In this table, any protein group that comprises a peptide ID that corresponds to a cDNA ID member of a Imbibed & Germinating Seeds pathway or network is a group of proteins that also exhibits Imbibed & Germinating Seeds functions/utilities.

[0957] III.B.1.b. Use of Imbibition and Germination Genes, Gene Components and Products to Modulate Phenotypes

[0958] Imbibition and germination genes and gene products can be divided into those that act during primary events, secondary events, and/or termination. The genes and gene products of the instant invention are useful to modulate any one or more of the phenotypes described below:

[0959] I. Primary Events
[0960] A. Dormancy

[0961] Imbibition and germination genes and gene products of the invention can act to modulate different types of dormancy including:
[0962] 1. Primary dormancy—dormancy is established during seed development
[0963] 2. Seed coat-imposed dormancy—dormancy is imposed by blocking water uptake, mechanical restraint of embryo, blocking the exit of inhibitors
[0964] 3. Embryo dormancy—cotyledon mediated inhibition of embryonic axis growth
[0965] 4. Secondary dormancy—dormancy is induced when dispersed, mature seeds are exposed to unfavorable conditions for germination (e.g. anoxia, unsuitable temperature or illumination).
[0966] 5. Hormone-induced

[0967] B. Dormancy-Breaking Signal Perception and Transduction

[0968] Germination genes and gene products include those that are able to modulate the response to dormancy releasing signals such as fruit ripening and seed development; imbibition; temperature (low and high, range 0-23°); light, particularly for coat imposed dormancy (white light, intermittent illumination, orange and red region of the spectrum (longer than 700 or 730 nm), and phytochrome); coat softening; chemicals (respiratory inhibitors, sulfhydryl compounds, oxidants, nitrogenous compounds, growth regulators—ga, ba, ethylene, and various, ethanol, methylene blue, ethyl ether, fusicoccin); oxygen and carbon dioxide; and stress.

[0969] II. Secondary Events

[0970] During the secondary events of germination, dormancy-maintaining metabolism is repressed, dormancy-breaking metabolism is induced and structures surrounding the embryo weaken (where present). Germination genes and gene products are useful to modulate processes of the secondary events including water uptake, such as cell expansion and change in osmotic state (ion exchange); and respiration—(oxygen consumption). the genes and genes products of the invention can regulate the following pathways which resume during the first respiratory burst of germination including glycolysis, pentose phosphate, citric acid, and tricarboxylic acid cycle.

[0971] A. Mitochondrial Development

[0972] Tissues of the mature dry seed contain mitochondria, and although these organelles are poorly differentiated as a consequence of the drying, they contain sufficient Kreb's cycle enzymes and terminal oxidases to provide adequate amount of ATP to support metabolism for several hours after imbibition. During germination of embryos, there appears to be two distinct patterns of mitochondrial development. In starch-storing seeds, repair and activation of preexisting organelles predominate, whereas oil-storing seeds typically produce new mitochondria. Germination genes and gene products of the invention are useful to modulate the repair, activation and biogenesis pathways of mitochondria, including membrane formation and repair, DNA repair and synthesis, protein synthesis, and coordinated regulation of mitochondrial and nuclear genomes

[0973] B. Metabolism

[0974] In addition to respiration and organelle activity, enzyme activity, DNA repair, RNA synthesis and protein synthesis are fundamental cellular activities intimately involved in the completion of germination and the preparation for subsequent growth. Imbibition and germination genes and gene products of the invention can participate in or modulate these activities, including ABA response, GA response, ATP synthesis and adenylate energy charge during germination, and the synthesis and utilization of reducing power: pyridine nucleotides (NADH and NADPH)

[0975] III. Termination

[0976] The last stage of seed germination is characterized by the emergence of the radicle or root apex through the seed coat. Typically, the cell walls loosen and the radicle extends from the embryo during late germination. Germination genes and gene products are useful to modulate the mobilization of stored reserves, DNA synthesis and cell division that are typical of this stage of germination.

[0977] To regulate any of the phenotype(s) above, activities of one or more of the late germination genes or gene products can be modulated and tested by screening for the desired trait. Specifically, the gene, mRNA levels, or protein levels can be altered in a plant utilizing the procedures described herein and the phenotypes can be assayed. As an example, a plant can be transformed according to Bechtold and Pelletier (1998, Methods. Mol. Biol. 82:259-266) and/or screened for variants as in Winkler et al. (1998) Plant Physiol 118: 743-50 and visually inspected for the desired phenotype or metabolically and/or functionally assayed according to Dolan et al. (1993, Development 119: 71-84), Dolan et al. (1997, Development 124: 1789-98), Crawford and Glass (1998, Trends Plant Science 3: 389-95), Wang et al. (1998, PNAS USA 95: 15134-39), Gaxiola et al. (1998, PNAS USA 95: 4046-50), Apse et al. (1999, Science 285: 1256-58), Fisher and Long (1992, Nature 357: 655-60), Schneider et al. (1998, Genes Devel 12: 2013-21) and Hirsch (1999, Curr Opin Plant Biol. 2: 320-326).

[0978] III.B.1.c. Use of Imbibition and Germination Genes, Gene Components and Product to Modulate Biochemical Activities

[0979] The roles of the biochemical changes associated with imbibition and germination can be appreciated from a summary of the processes occurring.

[0980] Physiology

[0981] Water plays an important role throughout the plant life cycle. The most dramatic example of this is in seed germination. Although germination is triggered by water, the germination response is also positively regulated by the plant growth regulators the gibberellins and negatively affected by the growth regulator abscisic acid. Genes that are activated by water and genes that are activated by gibberellins can be identified through expression profiling experiments using arabidopsis mutants defective for gibberellin biosynthesis or perception (gal, gai), abscisic acid biosynthesis or perception (aba1, abi3, and abi4) in the presence or absence of exogenous gibberellins. These genes can be used to promote seedling growth and development and other phases of plant development.

[0982] Transcriptional Control of Gene Activity

[0983] At the end of seed development, dessication and dormancy have imposed a global state of repression on gene activity throughout the seed. Reactivation of the genome requires water and gibberellins. One function of the genes that are activated early by imbibition is the rapid and dramatic reversal of gene repression. For example, expression-profiling experiments revealed that several thousand genes are hyperactivated in arabidopsis upon imbibition. These include genes involved in metabolic pathways, genes that promote cell growth and division, and transcriptional control genes. Thus one class of genes expressed early in imbibition includes those that promote high levels of gene expression. Other early genes are responsible for regulating specific metabolic, cell, and developmental processes. The strategy for distinguishing these functions was outlined in the Introduction.

[0984] Mobilization of Storage Reserves

[0985] In contrast to the synthesis and accumulation of reserves during seed development an important function of genes expressed during imbibition and germination is the control of the mobilization and catabolism of seed storage reserves in the endosperm (in grasses and cereals) and the embryo. The mobilization of seed storage reserves is triggered by imbibition and may occur over several days. There are three classes of high molecular weight seed storage reserves: carbohydrates, triacylglycerols, and storage proteins. Upon imbibition seed storage reserves are converted into forms that can be transported and metabolized. Genes encoding enzymes for storage reserve catabolism are expressed shortly after imbibition. Starch for example is converted to sucrose. Triacylglycerols are converted into acetyl-CoA. Storage proteins are converted into amino acids or deaminated to provide carbon skeletons for oxidation.

### Carbohydrate Catabolism

[0986] Starch is the most common storage carbohydrate in seeds. The primary components of starch are amylose and amylopectin.

[0987] Mobilization

[0988] There are two pathways for starch catabolism—hydrolytic and phosphorolytic. The product of these pathways is the monosaccharide glucose. Examples of the enzymes responsible for hydrolytic catabolism of starch are: amylase, glucosidase, amylase, dextrinase, isoamylase. The enzyme responsible for phosphorolytic activity is starch phosphorylase.

[0989] Transport

[0990] The mobilization of starch involves the synthesis of sucrose from glucose, which can then be transported to sites for growth in the root and shoot. In some seeds, maltose may be a major form of transported carbohydrate. The production of sucrose-6-P from glucose involves the following enzymes: UDP-glucose pyrophosphorylase, sucrose-6-P synthetase, and sucrose phosphatase.

### Sucrose Catabolism

[0991] In target tissues sucrose is hydrolyzed by fructofuransidase (invertase) and/or sucrose synthetase. The synthesis of glucose from glucose-1-P involves sucrose synthetase.

[0992] Cell Biology

[0993] The lumen of the endoplasmic reticulum (ER) is target for other hydrolase activities including mannosidase, glucosaminidase, acid phosphatase, phosphodiesterase, and phospholipase D.

[0994] Triacylglycerol (TAG) Catabolism

[0995] Triacylglycerols are the major storage lipids of seeds. The products of TAG catabolism in imbibed and germinating seed are glycerol and free fatty acids. Most of the glycerol is converted to sucrose for export. Free fatty acids are catabolized through oxidation through the glyoxylate cycle and gluconeogenesis.

[0996] Mobilization

[0997] Hydrolysis of triacylglycerols is by lipases yielding glycerol and free fatty acids. Free fatty acids are oxidized to acetyl-CoA and propionyl-CoA via oxidation requiring ATP and coenzyme A. Catabolism of unsaturated fatty acids also requires cis, trans-isomerases, epimerases, and hydratases. Acetyl-CoA is oxidized through the citric acid cycle to CO2 and H2O. More importantly, acetyl-CoA can be utilized via the glyoxylate cycle and gluconeogenesis for glucose synthesis. Free fatty acids are also broken down via oxidation. Glycerol is converted via phosphorylation and oxidation to DHAP and G3P, which are used to synthesize glucose or oxidized via the citric acid cycle. Examples of other induced enzymes include isocitrate lyase and malate synthetase

[0998] Transport

[0999] Most of the glycerol, acetyl-CoA, and propionyl-CoA are converted to sucrose for transport. This requires the enzymes glycerol kinase and glycerol phosphate oxidoreductase.

[1000] Cell Biology

[1001] Glyoxysome biogenesis is required to support fatty acid catabolism and gluconeogenesis. Upon exposure to light there is a loss of glyoxysomes due to their conversion to peroxisomes.

### Storage Protein Catabolism

[1002] Mobilization

[1003] The hydrolysis of storage proteins to amino acids is performed by a diverse group of proteinases and peptidases. The peptidases include endopeptidases, aminopeptidases, and carboxypeptidases. They include the A and B class proteinases. The liberated amino acids are available for protein synthesis, for deamination and reutilization of ammonia via glutamine and asparagine synthesis, and to provide carbon skeletons for respiration. Several enzymes including, deaminase, asparagine synthetase, glutamine synthetase and glutamate dehydrogenase are important players in the mobilization and utilization of stored nitrogen in imbibed seed.

[1004] Transport

[1005] The major transported form of amino acid in germinated seeds is asparagine. In some species glutamine and/or homoserine are the major form of transported amino acid. Aspartate, glutamate, alanine, glycine, and serine can be converted to sucrose and transported as sucrose. Other amino acids are transported unchanged.

[1006] Cell Biology

[1007] Proteinases are sequestered in lumen of endoplasmic reticulum (ER) which then fuses with protein bodies.

[1008] While catabolism is high in the storage tissues of imbibed seed the products of catabolism are transported to sites of growth including the shoot and root apices fueling respiration, biosynthesis, cell division and differentiation.

[1009] Development

[1010] Imbibition triggers several key processes for seedling development. One is the activation of the shoot and root apical meristems. The shoot apical meristem is responsible for two primary growth activities. One is the production of the protoderm, procambium and ground meristem. The protoderm gives rise to the epidermal system of the plant, the procambium to the primary vascular tissues, and the ground meristem to the ground tissues including the cortex and pith. The second is the production of leaf primordia, which arise on the flanks of the apex. Thus, activation of the shoot apical meristem results in shoot growth and organogenesis.

[1011] The root apical meristem, by contrast is responsible for vegetative root development. The first primary growth activity of the root apical meristem is the production of the protoderm, procambium and ground meristem. The second primary growth activity is the production of the cells that give rise to the root cap.

[1012] Genes that govern shoot apical meristem activation and development can be identified in arabidopsis by gene profiling experiments comparing gene expression in wild-type imbibed seed and partial loss-of-function stm (shootmeristemless) mutants (see SAM). Genes governing root meristem activity can be identified by gene profiling experiments comparing gene expression in wild-type imbibed seed and rml (rootmeristemless) mutants.

[1013] Genes identified in this way are useful to promote or retard meristem growth, modify and strengthen shoot and root development, promote leaf development as described below.

[1014] Changes in the concentration of imbibition-germination activated polynucleotides result in the modulation of many other polynucleotides and polynucleotide products. Examples of such activated responsive polynucleotides and polynucleotide products relative to leaves and floral stem and to fruits at different development stages are shown in the Reference and Sequence Tables. These polynucleotides and/or products are responsible fore effects on traits such as seedling growth, seedling viability, and seedling vigor. The polynucleotides were discovered by isolating seeds from Arabidopsis wild-type ecotype “Wassilewskija” imbibed for 24 hours, and measuring the mRNAs expressed in them relative to those in a leaf and floral stem sample and to those in fruits at different developmental stages.

[1015] While imbibition-germination activated polynucleotides and polynucleotide products can act alone, combinations of these polynucleotides also affect germination. Useful combinations include different polynucleotides and/or polynucleotide products that have similar transcription profiles or similar biological activities, and members of the same or functionally similar biochemical pathways. In addition, the combination of imbibition germination activated polynucleotides and/or polynucleotide products with environmentally responsive polynucleotides is also useful because of the interactions that exist between development, hormone-regulated pathways, stress and pathogen induced pathways and nutritional pathways. Here, useful combinations include polynucleotides that may have different transcription profiles, and participate in common or overlapping pathways but combine to produce a specific, phenotypic change.

[1016] Such imbibition and germination activated polynucleotides and polynucleotide products can function to either increase or dampen the above phenotypes or activities either in response to transcript changes in fruit development or in the absence of fruit-specific polynucleotide fluctuations.

| | BIOCHEMICAL OR | |
|---|---|---|
| | METABOLIC ACTIVITIES | |
| | AND/OR PATHWAYS | CITATIONS INCLUDING |
| PROCESS | ALTERED | ASSAYS |
| Growth, Differentiation | Farnesylation Mediated Seed | Pei et al (1998) Science 282: |
| and Development | Dormancy | 287-290; Cutler et al. (1996) |
| | | Science 273: 1239 |
| Metabolic activity | Nitrogen metabolism | Goupil et al (1998) J Exptl |
| | | Botany 49: 1855-62 |
| Metabolic activity | —H+ export and membrane | Cerana et al. (1983) |
| | hyperpolarization | |
| Metabolic activity | Chloroplast functioning | Benkova et al (1999) Plant |
| | | Physil 121: 245-252 |
| Growth, Differentiation | Regulation of Morphogenesis | Riou-Khamlichi et al. (1999) |
| and development | | Science 283: 1541-44 |
| Metabolic activity | Cell Death | Lohman et al. (1994) Physiol |
| | | Plant 92: 322-328 |
| Growth and development | Promotion of cell division | Kakimoto (1996) Science |
| | Shoot formation in absence of | 274: 982-985 |
| | exogenous cytokinin | |
| Metabolic activity | Membrane repair | Heath et al. (1986) Planta 169: |
| | | 304-12 |
| | | Browse et al. (1986) Anal |
| | | Biochem 152: 141-5 |
| | | D'Aoust et al (1999) Plant |
| | | Cell 11: 2407-18 |
| Metabolism | Organic molecule export | Moody et al. (1988) |
| | | Phytochemistry 27: 2857-61 |
| Metabolic activity | Nutrient Uptake | Uozumio et al. (2000) Plant |
| | | Physiol 122: 1249-59 |
| Metabolic activity | Ion export | Uozumi et al. (2000) Plant |
| | | Physiol 122: 1249-59 |
| | | Frachisse et al. (2000) Plant J |
| | | 21: 361-71 |
| Growth, Differentiation | Division and/or elongation | Zhang and Forde (1998) |
| and development | | Science 279: 407-409. |
| | | Coruzzi et al. U.S. Pat. No. |
| | | 5,955,651 |
| Metabolic activity | Regulation of Molecular | Wisniewski et al. (1999) |
| | chaperones | Physiolgia Plantarum 105: |
| | | 600-608 |
| Metabolic activity | Reactivation of Aggregation | Lee and Vierling (2000) Plant |
| | and Protein Folding | Physiol. 122: 189-197 |
| Metabolic activity | Maintenance of Native | Queitsch et al. (2000) The |
| | Conformation (cytosolic proteins) | Plant Cell 12: 479-92 |
| Metabolic activity | Regulation of Translational | Wells et al. (1998) Genes and |
| | Efficiency | Development 12: 3236-51 |
| Metabolic activity | DNA Repair | Bewley (1997) Plant Cell 9: |
| | | 1055-66 |
| Metabolic activity | Protein Synthesis using stored | Heath et al. (1986) Planta 169: |
| | or newly synthesized mRNAs | 304-12 |
| Metabolic activity | Mitochondrial repair and | MacKenzie and McIntosh |
| | synthesis | (1999) Plant Cell 11: 571-86 |
| Metabolic activity | Commencement of respiration | Debeaujon et al. (2000) Plant |
| | | Physiol 122: 403-4132 |
| | Water Uptake | Debeaujon et al. (2000) Plant |
| | | Physiol 122: 403-4132 |

[1017] Other biological activities that are modulated by the imbibition-activated polynucleotides and polynucleotide products are listed in the Reference Tables. Assays for detecting such biological activities are described in the Table below as well as in the Domain section of the Reference Table.

[1018] III.B.1.d. Use of Imbibition and Germination Genes to Modulate the Transcription Levels of Other Genes

[1019] The expression of many genes is “upregulated” or “downregulated” during imbibition and germination because some imbibition and germination genes are integrated into complex networks that regulate transcription of many other genes. Some imbibition and germination genes are therefore useful for regulating other genes and hence complex phenotypes.

[1020] Imbibition-activated polynucleotides may also be differentially transcribed in response to fluctuating developmental-specific polynucleotide levels or concentrations, whether internal or external to a cell, at different times during the plant life cycle to promote associated biological activities. These activities are, by necessity, a small subset of the genes involved in the development process. Furthermore, because development is a continuous process with few clear demarcations between stages, the associated metabolic and biochemical pathways overlap. Some of the changes in gene transcription are summarized in the Table below:

| | | EXAMPLES OF |
|---|---|---|
| | | BIOCHEMICAL |
| | | REGULATORY |
| DEVELOPMENTAL | PHYSIOLOGICAL/METABOLIC | ACTIVITIES |
| PROCESS REGULATED | CONSEQUENCES OF | ASSOCIATED WITH |
| BY IMBIBITION- | MODIFYING GENE | IMBIBITION AND |
| GERMINATION GENES | PRODUCT LEVELS | GERMINATION |
| Tissue Specialization | Lipid Catabolism | Transcription Factors |
| Cotyledon Expansion | Lipoxygenase | Transporters |
| Endosperm (???) | Localization | Kinases |
| Activation of the Shoot | Starch Catabolism | Changes in cytoskeletal |
| Apical Meristem | Seed Protein Catabolism | protein activity |
| Activation of the Root | Growth Regulator Production, | modulating cell structure |
| Apical Meristem | Transport, Perception, | Stability of factors for |
| Radicle Growth | Signaling, Response (e.g., | protein translation |
| Vascular System | Gibberellins, Ethylene, | Changes in cell |
| Development | Auxin) | wall/membrane structure |
| | Global Gene Activation | Chromatin structure |
| | Transcription Initiation | and/or DNA topology |
| | Sucrose Synthesis and | Biosynthetic enzymes |
| | Partitioning | Metabolic enzymes |
| | Sucrose catabolism | |
| | Sucrose Signaling | |
| | Cell Wall Biosynthesis | |
| | Activators of Metabolic | |
| | Pathways | |
| | Protein Remodeling | |
| Organelle Differentiation | Cell Wall Biosynthesis | Transcription Factors |
| and Development | Membrane Repair and | Transporters |
| | Synthesis | Kinases |
| | Specific Gene Transcription | Chaperones |
| | Initiation | Changes in cytoskeletal |
| | Sucrose Mobilization and | protein activity |
| | Partitioning | modulating cell structure |
| | Sucrose Signaling | Stability of factors for |
| | Activators of Metabolic | protein translation |
| | Pathways | Changes in cell |
| | Auxin Perception, | wall/membrane structure |
| | Response and Signaling | Chromatin structure |
| | Protein Remodeling | and/or DNA topology |
| | Lipid Mobilization, | Biosynthetic enzymes |
| | Metabolism and Biosynthesis | Metabolic enzymes |
| | Protein Transport, | |
| | Metabolism, and Biosynthesis | |
| DNA Repair | Cell Division | Transcription Factors |
| | Cell Cycle Control | Transporters |
| | DNA Replication | Kinases |
| | Specific Gene Transcription | Chaperones |
| | Initiation | for protein translation |
| | Protein Remodeling | Changes in cell |
| | Protein Synthesis | wall/membrane structure |
| | Repressors of Senescence | Chromatin structure |
| | | and/or DNA topology |
| | | Biosynthetic enzymes |
| Cellular Metabolism | Lipid Catabolism | Transcription Factors |
| | oxidation | Transporters |
| | Glyoxylate cycle | Kinases |
| | Citric acid cycle | Chaperones |
| | Gluconeogenesis | Translation Initiation |
| | Sucrose Synthesis and | Factors |
| | Partitioning | Biosynthetic Enzymes |
| | Starch Catabolism | Metabolic Enzymes |
| | Seed Protein Catabolism | |
| | Asparagine Synthesis and | |
| | Transport | |
| | Sucrose catabolism | |
| | Sucrose Signaling | |
| | Ribosome/polysome | |
| | production and maintenance | |
| | Housekeeping genes | |
| | Respiration | |
| | Photosynthesis | |

[1021] Changes in the processes of germination are the result of modulation of the activities of one or more of these many germination genes and gene products. These genes and/or products are responsible for effects on traits such as fast germination, plant vigor and seed yield, especially when plants are growing in the presence of biotic or abiotic stresses or when they are growing in barren conditions or soils depleted of certain minerals.

[1022] Germination genes and gene products can act alone or in combination as described in the introduction. Of particular interest are combination of these genes and gene products with those that modulate stress tolerance and/or metabolism. Stress tolerance and metabolism genes and gene products are described in more detail in the sections below.

### Use of Promoters of Imbibition and Germination Genes

[1023] These promoters can be used to control expression of any polynucleotide, plant or non-plant, in a plant host. Selected promoters when operably linked to a coding sequence can direct synthesis of the protein in specific cell types or to loss of a protein product, for example when the coding sequence is in the antisense configuration. They are thus useful in controlling changes in imbibition and germination phenotypes or enabling novel proteins to be made in germinating seeds.

[1024] III.B.2. Early Seedling-Phase Specific Responsive Genes, Gene Components and Products

[1025] One of the more active stages of the plant life cycle is a few days after germination is complete, also referred to as the early seedling phase. During this period the plant begins development and growth of the first leaves, roots, and other organs not found in the embryo. Generally this stage begins when germination ends. The first sign that germination has been completed is usually that there is an increase in length and fresh weight of the radicle.

[1026] III.B.2.a. Identification of Early Seedling Phase Genes, Gene Components and Products

[1027] These genes defined and identified herein are capable of modulating one or more processes of development and growth of many plant organs as described below. These genes and gene products can regulate a number of plant traits to modulate yield. Examples of such early seedling phase genes and gene products are shown in the Reference and Sequence, Knock-in, Knock-out and MA-diff Tables. The functions of the protein of some of these genes are also given in these Tables.

[1028] Early Seedling Genes Identified by Phenotypic Observations

[1029] Some early seedling genes were discovered and characterized from a much larger set of genes by experiments designed to find genes that cause phenotypic changes in germinating seeds as the transitioned into seedlings.

[1030] In these experiments, leaf genes were identified by either (1) ectopic expression of a cDNA in a plant or (2) mutagenesis of the plant genome. The plants were then cultivated and one or more of the following leaf phenotypes, which varied from the parental “wild-type”, were observed:
[1031] Abnormal growth
[1032] Abnormal cotyledons or root growth
   [1033] Reduced growth
   [1034] Abnormal first leaf
   [1035] Abnormal hypocotyl
   [1036] Abnormal pigmentation
      The genes identified by these phenotypes are given in the Knock-in and Knock-out Tables.

[1037] Early Seedling Phase Genes Identified by Differential Expression

[1038] Such genes are active or potentially active to a greater extent in developing and rapidly growing cells, tissues and organs, as exemplified by development and growth of a seedling 3 or 4 days after planting a seed. These genes herein were also discovered and characterized from a much larger set of genes in experiments designed to find genes. Early seedling phase genes were identified by measuring the relative levels of mRNA products in a seedling 3 or 4 days after planting a seed versus a sterilized seed. Specifically, mRNA was isolated from aerial portion of a seedling 3 or 4 days after planting a seed and compared to mRNA isolated from a sterilized seed utilizing microarray procedures. The MA_diff Table(s) reports the transcript levels of the experiment (see EXPT ID: Sqn (relating to SMD 7133, SMD 7137)). For transcripts that had higher levels in the samples than the control, a “+” is shown. A “−” is shown for when transcript levels were reduced in root tips as compared to the control. For more experimental detail see the Example section below.

[1039] Early Seedling Phase genes are those sequences that showed differential expression as compared to controls, namely those sequences identified in the MA_diff tables with a “+” or “−” indication.

[1040] Early Seedling Phase Genes Identified by Cluster Analyses of Differential Expression

[1041] Early Seedling Phase Genes Identified by Correlation to Genes that are Differentially Expressed

[1042] As described above, the transcription profiles of genes that act together are well correlated. Applicants not only have identified the genes that are differentially expressed in the microarray experiments, but also have identified the genes that act in concert with them. The MA_clust table indicates groups of genes that have well correlated transcription profiles and therefore participate in the same pathway or network.

[1043] A pathway or network of Early Seedling Phase genes is any group in the MA_clust that comprises a cDNA ID that also appears in Expt ID Sqn (relating to SMD 7133, SMD 7137) of the MA_diff table(s).

[1044] Early Seedling Phase Genes Identified by Correlation to Genes that Cause Physiological Consequences

[1045] Additionally, the differential expression data and the phenotypic observations can be merged to identify pathways or networks of Early Seedling Phase genes. A group in the MA_clust is considered a Early Seedling Phase pathway or network if the group comprises a cDNA ID that also appears in Knock-in or Knock-out tables that causes one or more of the phenotypes described in section above.

[1046] Early Seedling Phase Genes Identified by Amino Acid Sequence Similarity

[1047] Early Seedling Phase genes from other plant species typically encode polypeptides that share amino acid similarity to the sequences encoded by corn and Arabidopsis Early Seedling Phase genes. Groups of Early Seedling Phase genes are identified in the Protein Group table. In this table, any protein group that comprises a peptide ID that corresponds to a cDNA ID member of a Early Seedling Phase pathway or network is a group of proteins that also exhibits Early Seedling Phase functions/utilities.

[1048] Of particular interest are early seedling phase genes that are differentially expressed 3 or 4 days after planting a seed but not differentially expressed germinating seeds and/or mature leaves.

[1049] Examples of phenotypes, biochemical activities, and transcription profiles that can be modulated by these genes and gene products are described above and below.

[1050] III.B.2.b. Use of Early Seedling Genes, Gene Components and Products to Modulate Phenotypes

[1051] Rapid, efficient establishment of a seedling is very important in commercial agriculture and horticulture. It is also vital that resources are approximately partitioned between shoot and root to facilitate adaptive growth. Phototropism and geotropism need to be established. All these require post-germination process to be sustained to ensure that vigorous seedlings are produced. Early seedling phase genes, gene components and products are useful to manipulate these and other processes.

[1052] I. Development

[1053] The early seedling phase genes, gene components and products of the instant invention are useful to modulate one or more processes of the stages of leaf morphogenesis including: stage 1—organogenesis that gives rise to the leaf primordium; stage 2—delimiting basic morphological domains; and stage 3—a coordinated processes of cell division, expansion, and differentiation. Early seedling phase genes include those genes that terminate as well as initiate leaf development. Modulating any or all of the processes leads to beneficial effects at specific locations.

[1054] Gene Sequences Affecting Types of Leaves—Applicants provide with these genes, gene components and gene products the means to modulate one or more of the types of leaves, and stem, including cotyledons and major leaves.

[1055] Gene sequences affecting cell properties—These genes, gene components and gene products are useful to modulate changes in cell size, cell division, rate and direction, cell elongation, cell differentiation, xylem and phloem cell numbers, cell wall composition, and all cell types.

[1056] Gene Sequences Affecting Leaf Architecture—Modifying leaf architecture is useful to modulate change in overall leaf architecture including veination, such as improvements in photosynthetic efficiency, stress tolerance efficiency of solute and nutrient movement to and from the leaf which are accomplished by increases or decreases in vein placement and number of cells in the vein and shape, such as elongated versus rounded and symmetry (around either abaxial-adaxial (dorsiventral) axis or apical-basal (proximodistal) axis, margin-blade-midrib (lateral) axis).

[1057] Genes Sequences Influencing Leaf Responses—Shoot apical meristem cells differentiate to become leaf primordia that eventually develop into leaves. The genes, gene components and gene products of this invention are useful to modulate any one or all of these growth and development processes, by affecting timing and rate or planes of cell divisions for example, in response to the internal plant stimuli and/or programs such as embryogenesis, germination, hormones (like Auxin), phototropism, coordination of leaf growth and development with that of other organs (like roots and stems), and stress-related program.

[1058] II. Interaction with the Environment

[1059] Successful seedling establishment demands successful interaction with the environment in the soil. Early vegetation genes orchestrate and respond to interactions with the environment. Thus early seedling phase genes are useful for improving interactions between a plant and the environment including pigment accumulation, oxygen gain/loss control, carbon dioxide gain/loss control, water gain/loss control, nutrient transport, light harvesting, chloroplast biogenesis, circadian rhythm control, light/dark adaptation, defense systems against biotic and abiotic stresses, metabolite accumulation, and secondary metabolite production

[1060] III. Organizing Tissues for Photosynthesis and Metabolism

[1061] Following germination and utilization of seed reserves, plant tissues prepare for photosynthesis and seedling metabolism. Leaf meristems, and root meristems participate in these changes before cell differentiation. Many of the uses for plants depend on the success of leaves as the powerhouses for plant growth, their ability to withstand stresses and their chemical composition. Leaves are organs with many different cell types and structures. Most genes of a plant are active in leaves and therefore leaves have very diverse of pathways and physiological processes. Examples of such pathways and processes that are modulated by early seedling phase genes, gene components and products include photosynthesis, sugar metabolism, starch synthesis, starch degradation, nitrate and ammonia metabolism, amino acid biosynthesis, transport, protein biosynthesis, DNA replication, repair, lipid biosynthesis and breakdown, protein biosynthesis, storage and breakdown, nucleotide transport and metabolism, cell envelope biogenesis, membrane formation, mitochondrial and chloroplast biogenesis, transcription and ma metabolism, vitamin biosynthesis, steroid and terpenoid biosynthesis, devise secondary metabolite synthesis, co-enzyme metabolism, flavonoid biosynthesis and degradation, synthesis of waxes, glyoxylate metabolism, and hormone perception and response pathways.

Use of Plants that are Modified as Described Above

[1062] Altering leaf genes or gene products in a plant modifies one or more the following plant traits, to make the plants more useful for specific purposes in agriculture, horticulture and for the production of valuable molecules. The useful plants have at least one of the following characteristics: More seedling vigor; a higher yield of early leaves and their molecular constituents due to different number, size, weight, harvest index, composition including and amounts and types of carbohydrates, proteins, oils, waxes, etc., photosynthetic efficiency, e.g. reduced photorespiration, absorption of water and nutrients to enhance yields, including under stresses such as high light, herbicides, and heat, pathways to accumulate new valuable molecules; more optimal leaf shape and architecture in early seedling-enhancing photosynthesis and enhancing appeal in ornamental species including size, number, or pigment; a better overall plant architecture—enhancing photosynthesis and enhancing appeal in ornamental species; reduced negative effects of high planting density, by altering leaf placement to be more vertical instead of parallel to the ground; for instance better stress tolerance, including drought resistance, by decreasing water loss, and pathogen resistance; better overall yield and vigor—Plant yield of biomass and of constituent molecules and plant vigor are modulated to create benefits by genetically changing the growth rate of seedling, coleoptile elongation, and young leaves.

[1063] To change any of the phenotype(s) above, activities of one or more of the early seedling phase genes or gene products are modulated in an organism and the consequence evaluated by screening for the desired trait. Specifically, the gene, mRNA levels, or protein levels are altered in a plant utilizing the procedures described herein and the phenotypes can be assayed. As an example, a plant can be transformed according to Bechtold and Pelletier (Methods. Mol. Biol. 82:259-266 (1998)) with leaf gene constructs and/or screened for variants as in Winkler et al., Plant Physiol. 118: 743-50 (1998) and visually inspected for the desired phenotype and metabolically and/or functionally assayed for altered levels of relevant molecules.

[1064] III.B.2.c. Use of Early Seedling Phase Genes, Gene Components and Products to Modulate Biochemical Activities

[1065] Seedlings are complex and their structure, function and properties result from the integration of many processes and biochemical activities. Some of these are known from the published literature and some can be deduced from the genes and their products described in this application. Early seedling phase genes, and gene components are used singly or in combination to modify these processes and biochemical activities and hence modify the phenotypic and trait characteristics described above. Examples of the processes and metabolic activities are given in the Table below. The resulting changes are measured according to the citations included in the Table.

| | BIOCHEMICAL OR | | |
|---|---|---|---|
| | METABOLIC | | |
| | ACTIVITIES | | |
| | AND/OR | | CITATIONS |
| PROCESS | PATHWAYS | | INCLUDING ASSAYS |
| Metabolism - anabolic | G. | Farnesylation | Pei et al., Science 282: 287-290 |
| and catabolic | H. | Cell | (1998); Cutler et al., Science 273: |
| | | Wall | 1239 (1996) |
| | | Biosynthesis | Goupil et al., J Exptl. Botany |
| | I. | Nitrogen | 49: 1855-62 (1998) |
| | | Metabolism | Walch-Liu et al., J Exppt. Botany |
| | J. | Secondary | 51, 227-237 (2000) |
| | | Metabolite | |
| | | Biosynthesis | |
| | | and | |
| | | Degradation | |
| Water Conservation And | A. | Production of | Allen et al., Plant Cell 11: 1785-1798 |
| Resistance To Drought | | polyols | (1999) |
| And Other Related | B. | Regulation of | Li et al., Science 287: 300-303 |
| Stresses | | salt | (2000) |
| Transport Anion and | | concentration | Burnett et al., J Exptl. Botany 51: |
| Cation Fluxes | C. | ABA | 197-205 (2000) |
| | | response(s) | Raschke, In: Stomatal Function, |

| | | |
|---|---|---|
| (i) | Ca2+ | Zeiger et al. Eds., 253-279 (1987) |
| | Accumulation | Lacombe et al., Plant Cell 12: 837-51 |

| | | | |
|---|---|---|---|
| | (a) | K+ Fluxes | (2000); |
| | (b) | Na+ Fluxes | Wang et al., Plant Physiol. |
| | 1. | Receptor - | 118: 1421-1429 (1998); |
| | | ligand binding | Shi et al., Plant Cell 11: 2393-2406 |
| | 2. | Anion and | (1999) |
| | | Cation fluxes | Gaymard et al., Cell 94: 647-655 |
| | | | (1998) |
| | | | Jonak et al., Proc. Natl. Acad. Sci. |
| | | | 93: 11274-79 (1996); |
| | | | Sheen, Proc. Natl. Acad. Sci. 95: |
| | | | 975-80 (1998); |
| | | | Allen et al., Plant Cell 11: 1785-98 |
| | | | (1999) |
| Carbon Fixation | 3. | Calvin Cycle | Wingler et al., Philo Trans R Soe |
| | 5. | Photorespiration | Lond B Biol Sci 355, 1517-1529 |
| | 6. | Oxygen | (2000); |
| | | evolution | Palecanda et al., Plant Mol Biol |
| | 7. | RuBisCO | 46, 89-97 (2001); |

| | | |
|---|---|---|
| 4. | Chlorophyll | Baker et al., J Exp Bot 52, 615-621 |
| | metabolism | (2001) |

| | | |
|---|---|---|
| (ii) | Chloroplast | Chen et al., Acta Biochim Pol 41, |
| | Biogenesis | 447-457 (1999) |
| | and | Imlau et al., PlantCell II, 309-322 |
| | Metabolism | (1999) |

| | |
|---|---|
| 5. | Fatty Acid and |
| | Lipid |
| | Biosynthesis |

| | | | |
|---|---|---|---|
| | (iii) | Glyoxylate | |
| | | metabolism | |
| | (iv) | Sugar | |
| | | Transport | |
| | (v) | Starch | |
| | | Biosynthesis | |
| | | and | |
| | | Degradation | |
| Hormone Perception and | (vi) | Hormone | Tieman et al., Plant J 26, 47-58 |
| Growth | | Receptors | (2001) |
| | | and | Hilpert et al., Plant J 26, 435-446 |
| | | Downstream | (2001) |
| | | Pathways | Wenzel et al., Plant Phys 124, |
| | | for | 813-822 (2000) |

| | | |
|---|---|---|
| (a) | ethylene | Dengler and Kang, Curr Opin |
| (b) | jasmonic acid | Plant Biol 4, 50-56 (2001) |
| (c) | brassinosteroid | Tantikanjana et al., Genes Dev 15, |
| (d) | gibberellin | 1577-1580 (2001) |
| (e) | Auxin | |
| (f) | cytokinin | |

Activation Of Specific
Kinases And
Phosphatases
See Imbibition, Shoot Apical Meristem, Root and Leaf sections for more details

[1066] Other biological activities that are modulated by the leaf genes and gene products are listed in the Reference tables. Assays for detecting such biological activities are described in the Protein Domain table, for example.

[1067] III.B.2.d. Use of Early Seedling Phase Genes, Gene Components and Products to Modulate Transcription Levels

[1068] The expression of many genes is “up regulated” or down regulated” in plants because some genes and their products are integrated into complex networks that regulate transcription of many other genes. Some early seedling phase genes, gene components and products are therefore useful for modifying the transcription of other genes and hence complex phenotypes, as described above. Profiles of leaf gene activities are described in the Table below with associated biological activities. “Up-regulated” profiles are those where the mRNA transcript levels are higher in young seedlings as compared to the sterilized seeds. “Down-regulated” profiles represent higher transcript levels in the plantlet as compared to sterilized seed only.

[1069] III.B.3. Size and Stature Genes, Gene Components and Products

[1070] Great agronomic value can result from modulating the size of a plant as a whole or of any of its organs. For example, the green revolution came about as a result of creating dwarf wheat plants, which produced a higher seed yield than taller plants because they could withstand higher levels and inputs of fertilizer and water. Size and stature genes elucidated here are capable of modifying the growth of either an organism as a whole or of localized organs or cells. Manipulation of such genes, gene components and products can enhance many traits of economic interest from increased seed and fruit size to increased lodging resistance. Many kinds of genes control the height attained by a plant and the size of the organs. For genes additional to the ones in this section other sections of the Application should be consulted.

[1071] III.B.3.a. Identification of Size and Stature Genes, Gene Components and Products

[1072] Size and stature genes identified herein are defined as genes, gene components and products capable of modulating one or more processes in growth and development, to produce changes in size of one or more organs. Examples of such stature genes and gene products are shown in the Reference, Sequence, Protein Group, Protein Group Matrix, Knock-in, Knock-out, MA-diff and MA-clust. The biochemical functions of the protein products of many of these genes determined from comparisons with known proteins are also given in the Reference tables.

[1073] Size and Stature Genes, Gene Components and Products Identified by Phenotypic Observations

[1074] Mutant plants exhibiting increased or decreased stature in comparison to parental wild-type plants were used to identify size and stature genes. In these experiments, size and stature genes were identified by either (1) the ectopic expression of a cDNA in a plant or (2) mutagenesis of the plant genome. The plants were then cultivated and stature genes were identified from plants that were smaller than the parental “wild-type”. The phenotypes and gene mutations associated with them are given in Tables Examples of phenotypes, biochemical activities, or transcript profiles that are modulated using these genes are described above and below.

### Use of Size and Stature Genes, Gene Components and Products to Modulate Phenotypes

[1075] Typically, these genes can cause or regulate cell division, rate and time; and also cell size and shape. Many produce their effects via meristems. These genes can be divided into three classes. One class of genes acts during cytokinesis and/or karyokinesis, such as mitosis and/or meiosis. A second class is involved in cell growth; examples include genes regulating metabolism and nutrient uptake pathways. Another class includes genes that control pathways that regulate or constrain cell division and growth. Examples of these pathways include those specifying hormone biosynthesis, hormone sensing and pathways activated by hormones.

[1076] Size and stature genes and gene components are useful to selectively alter the size of organs and stems and so make plants specifically improved for agriculture, horticulture and other industries. There are a huge number of utilities. For example, reductions in height of specific ornamentals, crops and tree species can be beneficial, while increasing height of others may be beneficial.

[1077] Increasing the length of the floral stems of cut flowers in some species would be useful, while increasing leaf size in others would be economically attractive. Enhancing the size of specific plant parts, such as seeds, to enhance yields by stimulating hormone (Brassinolide) synthesis specifically in these cells would be beneficial. Another application would be to stimulate early flowering by altering levels of gibberellic acid in specific cells. Changes in organ size and biomass also results in changes in the mass of constituent molecules. This makes the utilities of size and stature genes useful for the production of valuable molecules in parts of plants, for extraction by the chemical and pharmaceutical industries.

[1078] Examples of phenotypes that can be modulated by the genes and gene components include cell size, cell shape, cell division, rate and direction, cell elongation, cell differentiation, stomata number, and trichome number. The genes of the invention are useful to regulate the development and growth of roots (primary, lateral, root hairs, root cap, apical meristem, epidermis, cortex, and stele); stem (pholem, xylem, nodes, internodes, and shoot apical meristem); leaves (cauline, rosette, and petioles); flowers (receptacle, sepals, petals, and tepals, including color, shape, size, number, and petal drop, androecium, stamen, anther, pollen, sterility, size, shape, weight, color, filament, gynoecium, carpel, ovary, style, stigma, ovule, size, shape, and number, pedicel and peduncle, flowering time, and fertilization); seeds (placenta, embryo, cotyledon, endosperm, suspensor, and seed coat (testa)); and fruits (pericarp—thickness, texture, exocarp, mesocarp, and endocarp. Traits can be modulated with the genes and gene products of this invention to affect the traits of a plant as a whole include architecture (such as branching, ornamental architecture, shade avoidance, planting density effects, and wind resistance) and vigor (such as increased biomass and drought tolerance).

[1079] To regulate any of the phenotype(s) above, activities of one or more of the sizing genes or gene products are modulated in an organism and tested by screening for the desired trait. Specifically, the gene, mRNA levels, or protein levels can be altered in a plant utilizing the procedures described herein and the phenotypes can be assayed. As an example, a plant can be transformed according to Bechtold and Pelletier (Methods. Mol. Biol. 82:259-266 (1998)) and/or screened for variants as in Winkler et al., (Plant Physiol. 118: 743-50 1998) and visually inspected for the desired phenotype or metabolically and/or functionally assayed.

[1080] III.B.3.b. Use of Size and Stature Genes, Gene Components and Products to Modulate Biochemical Activities

[1081] Many metabolic and developmental processes can be modulated by size and stature genes and gene components to achieve the phenotypic characteristics exemplified above. Some of these are listed below. Such biological activities can be measured according to the citations included in the Table below:

| | BIOCHEMICAL OR | |
|---|---|---|
| | METABOLIC ACTIVITIES | CITATIONS INCLUDING |
| PROCESS | AND/OR PATHWAYS | ASSAYS |
| Growth and Development | Gibberellic Acid Biosynthesis | Swain SM, Tseng Ts, |
| | Gibberellic Acid Receptor and | Olszewski NE. Altered |
| | Downstream Pathways | expression of spindly affects |
| | | gibberellin response and plant |
| | | development. Plant Physiol |
| | | 2001 July; 126(3): 1174-85 |
| | | Hooley, R. Gibberellins: |
| | | perception, transduction, and |
| | | responses. Plant Mol. Biol. |
| | | 1994 26: 1529-1555. |
| | | Hooley, R. Gibberellins: |
| | | perception, transduction, and |
| | | responses. Plant Mol. Biol. |
| | | 1994 26: 1529-1555. |
| | | Perata, P, Matsukura, C, |
| | | Vernieri, P, Yamaguchi, J, |
| | | Sugar repression of a |
| | | gibberellin-dependent |
| | | signaling pathway in barley |
| | | embryos. Plant Cell 1997 |
| | | 9: 2197-2208. |
| | Brassinolide Biosynthesis | Noguchi T, Fujioka S, Choe S, |
| | Brassinolide Receptors, | Takatsuto S, Tax FE, Yoshida S, |
| | Degradation of Brassinolide | Feldmann KA. Biosynthetic |
| | Pathways affected by | pathways of brassinolide in |
| | Brassinolide | Arabidopsis. Plant Physiol |
| | | 2000 September; 124(1): 201-9 |
| | | Wang ZY, Seto H, Fujioka S, |
| | | Yoshida S, Chory J. BRI1 is a |
| | | critical component of a |
| | | plasma-membrane receptor for |
| | | plant steroids. Nature 2001 |
| | | Mar 15; 410(6826): 380-3 |
| | | Neff MM, Nguyen SM, |
| | | Malancharuvil EJ, Fujioka S, |
| | | Noguchi T, Seto H, Tsubuki M, |
| | | Honda T, Takatsuto S, |
| | | Yoshida S, Chory J. BAS1: A |
| | | gene regulating brassinosteroid |
| | | levels and light responsiveness |
| | | in Arabidopsis. Proc Natl Acad |
| | | Sci USA 1999 Dec |
| | | 21; 96(26): 15316-23 |
| | | Kang JG, Yun J, Kim DH, |
| | | Chung KS, Fujioka S, Kim JI, |
| | | Dae HW, Yoshida S, |
| | | Takatsuto S, Song PS, Park CM. |
| | | Light and brassinosteroid |
| | | signals are integrated via a |
| | | dark-induced small G protein |
| | | in etiolated seedling growth. |
| | | Cell 2001 Jun 1; 105(5): 625-36 |
| | Cytokinin biosynthesis | Mok DW, Mok MC. Cytokinin |
| | Cytokinin receptor | metabolism and action. Annu |
| | Degradation of Cytokinin | Rev Plant Physiol Plant Mol |
| | Pathways affected by Cytokinin | Biol 2001; 52: 89-118 |
| | | Schmulling T. CREam of |
| | | cytokinin signalling: receptor |
| | | identified. Trends Plant Sci |
| | | 2001 July; 6(7): 281-4 |
| | | Mok DW, Mok MC. Cytokinin |
| | | metabolism and action. Annu |
| | | Rev Plant Physiol Plant Mol |
| | | Biol 2001; 52: 89-118 |
| | | Seyedi M, Selstam E, Timko MP, |
| | | Sundqvist C. The |
| | | cytokinin 2-isopentenyladenine |
| | | causes partial reversion to |
| | | skotomorphogenesis and |
| | | induces formation of |
| | | prolamellar bodies and |
| | | protochlorophyllide657 in the |
| | | lip1 mutant of pea. Physiol |
| | | Plant 2001 June; 112(2): 261-272 |
| | Auxin Biosynthesis | Zhao Y, Christensen SK, |
| | Auxin Receptor | Fankhauser C, Cashman JR, |
| | Auxin Degradation | Cohen JD, Weigel D, Chory J. |
| | Pathways affected by Auxins | A role for flavin |
| | Auxin transport | monooxygenase-like enzymes |
| | | in Auxin biosynthesis. Science |
| | | 2001 Jan 12; 291(5502): 306-9 |
| | | Abel S, Ballas N, Wong LM, |
| | | Theologis A. DNA elements |
| | | responsive to Auxin. Bioessays |
| | | 1996 August; 18(8): 647-54 |
| | | del Pozo JC, Estelle M. |
| | | Function of the ubiquitin- |
| | | proteosome pathway in Auxin |
| | | response. Trends Plant Sci |
| | | 1999 March; 4(3): 107-112. |
| | | Rahman A, Amakawa T, Goto N, |
| | | Tsurumi S. Auxin is a |
| | | positive regulator for ethylene- |
| | | mediated response in the |
| | | growth of Arabidopsis roots. |
| | | Plant Cell Physiol 2001 March; |
| | | 42(3): 301-7 |
| | | Zhao Y, Christensen SK, |
| | | Fankhauser C, Cashman JR, |
| | | Cohen JD, Weigel D, Chory J. |
| | | A role for flavin |
| | | monooxygenase-like enzymes |
| | | in Auxin biosynthesis. Science |
| | | 2001 Jan 12; 291(5502): 306-9 |
| | | Abel S, Ballas N, Wong LM, |
| | | Theologis A. DNA elements |
| | | responsive to Auxin. Bioessays |
| | | 1996 August; 18(8): 647-54 |
| | | del Pozo JC, Estelle M. |
| | | Function of the ubiquitin- |
| | | proteosome pathway in Auxin |
| | | response. Trends Plant Sci |
| | | 1999 March; 4(3): 107-112. |
| | | Rahman A, Amakawa T, Goto N, |
| | | Tsurumi S. Auxin is a |
| | | positive regulator for ethylene- |
| | | mediated response in the |
| | | growth of Arabidopsis roots. |
| | | Plant Cell Physiol 2001 March; |
| | | 42(3): 301-7 |
| | | Gil P, Dewey E, Friml J, Zhao Y, |
| | | Snowden KC, Putterill J, |
| | | Palme K, Estelle M, Chory J. |
| | | BIG: a calossin-like protein |
| | | required for polar Auxin |
| | | transport in Arabidopsis. |
| | | Genes Dev. 2001 Aug |
| | | 1; 15(15): 1985-97 |
| | | Estelle M., Polar Auxin |
| | | transport. New support for an |
| | | old model. Plant Cell 1998 |
| | | November; 10(11): 1775-8 |
| | Cell wall growth | Cosgrove DJ., Loosening of |
| | | plant cell walls by expansins. |
| | | Nature 2000 Sep |
| | | 21; 407(6802): 321-6 |

[1082] Other biological activities that are modulated by the stature genes and gene products are listed in the Reference tables. Assays for detecting such biological activities are described in the Protein Domain table, for example.

[1083] Changes in the size, vigor, or yield of a plant are the result of modulation of the activities of one or more of these many size and stature genes and gene products. While size and stature polynucleotides and gene products can act alone, combinations of these polynucleotides and also with others that also affect growth and development are especially useful.

### Use of Promoters of “Size and Stature” Genes

[1084] Promoters of “size and stature” genes are useful for controlling the transcription of any desired polynucleotides, both plant and non-plant. They can be discovered from the “size and stature” genes in the Reference Tables, and their patterns of activity from the MA Tables. When operably linked to any polynucleotide encoding a protein, and inserted into a plant, the protein will be synthesized in those cells in which the promoter is active. Many “size and stature” genes will function in meristems, so the promoters will be useful for expressing proteins in meristems. The promoters can be used to cause loss of, as well as synthesis of, specific proteins via antisense and sense suppression approaches.

[1085] III.B.4. Shoot-Apical Meristem Genes, Gene Components and Products

[1086] New organs, stems, leaves, branches and inflorescences develop from the stem apical meristem (SAM). The growth structure and architecture of the plant therefore depends on the behavior of SAMs. Shoot apical meristems (SAMs) are comprised of a number of morphologically undifferentiated, dividing cells located at the tips of shoots. SAM genes elucidated here are capable of modifying the activity of SAMs and thereby many traits of economic interest from ornamental leaf shape to organ number to responses to plant density.

[1087] III.B.4.a. Identification of Sam Genes, Gene Components and Products

[1088] SAM genes identified herein are defined as genes, gene components and products capable of modulating one or more processes or functions of SAMs as described below. Regulation of SAM genes and gene products are useful to control many plant traits including architecture, yield and vigor. Examples of such SAM genes and gene products are shown in the Reference, Sequence, Protein Group, Protein Group Matrix, phenotype and MA-diff Tables. The functions of many of the protein products of these genes are also given in the Reference tables.

[1089] Sam Genes, Gene Components and Products Identified by Phenotypic Observations

[1090] SAM genes were discovered and characterized from a much larger set of genes by experiments designed to find genes that cause phenotypic changes in leaf morphology, such as cotyledon or leaf fusion. In these experiments, SAM genes were identified by either (1) ectopic expression of a cDNA in a plant or (2) mutagenesis of the plant genome. The plants were then cultivated and one or more of the following phenotypes, which varied from the parental “wild-type”, was observed:

[1091] I. Cotyledon
[1092] Fused

[1093] II. Leaves
[1094] Fused
[1095] Leaf placement on stems

[1096] III. Branching
[1097] Number

[1098] IV. Flowers
[1099] Petals fused
[1100] Altered bolting
[1101] Early bolting
[1102] Late bolting
[1103] Strong bolting
[1104] Weak bolting
[1105] Abnormal branching

[1106] For more experimental detail see the Example section below. The genes identified by these results of the phenotypes that are shown in Knock-in and Knock-out Tables.

[1107] Sam Genes, Gene Components and Products Identified by Differential Expression

[1108] SAM genes were also identified in experiments designed to find genes whose mRNA products are associated specifically or preferentially with SAMs. The concentration of mRNA products in the arabidopsis plant with the SHOOTMERISTEMLESS (STM) gene knocked-out was measured relative to the concentration in the parental, non-mutant plant. The Arabidopsis STM gene is required for embryonic SAM formation. The STM gene encodes a Knotted1 (Kn1) type of homeodomain protein. Homeodomain proteins regulate transcription of many genes in many species and have been shown to play a role in the regulation of translation as well. Seedlings homozygous for recessive loss-of-function alleles germinate with roots, a hypocotyl, and cotyledons, but no SAM is formed. The MA_diff Table(s) reports the transcript levels of the experiment (see EXPT ID: 108478, 108479, 108480, 108481, 108598, 108535, 108536, 108435). For transcripts that had higher levels in the samples than the control, a “+” is shown. A “−” is shown for when transcript levels were reduced in root tips as compared to the control. For more experimental detail see the Example section below.

[1109] Meristem genes are those sequences that showed differential expression as compared to controls, namely those sequences identified in the MA_diff tables with a “+” or “−” indication.

[1110] Meristem Genes Identified by Cluster Analyses of Differential Expression

[1111] Meristem Genes Identified by Correlation to Genes that are Differentially Expressed

[1112] As described above, the transcription profiles of genes that act together are well correlated. Applicants not only have identified the genes that are differentially expressed in the microarray experiments, but also have identified the genes that act in concert with them. The MA_clust table indicates groups of genes that have well correlated transcription profiles and therefore participate in the same pathway or network.

[1113] A pathway or network of Meristem genes is any group in the MA_clust that comprises a cDNA ID that also appears in Expt ID 108478, 108479, 108480, 108481, 108598, 108535, 108536, 108435 of the MA_diff table(s).

[1114] Meristem Genes Identified by Correlation to Genes that Cause Physiological Consequences

[1115] Additionally, the differential expression data and the phenotypic observations can be merged to identify pathways or networks of Meristem genes. A group in the MA_clust is considered a Meristem pathway or network if the group comprises a cDNA ID that also appears in Knock-in or Knock-out tables that causes one or more of the phenotypes described in section above.

[1116] Meristem Genes Identified by Amino Acid Sequence Similarity

[1117] Meristem genes from other plant species typically encode polypeptides that share amino acid similarity to the sequences encoded by corn and Arabidopsis Meristem genes. Groups of Meristem genes are identified in the Protein Group table. In this table, any protein group that comprises a peptide ID that corresponds to a cDNA ID member of a Meristem pathway or network is a group of proteins that also exhibits Meristem functions/utilities.

[1118] Examples of phenotypes, biochemical activities, and transcription profiles that can be modulated by SAM genes and gene products are described above and below.

[1119] III.B.4.b. Use of Sam Genes Gene Components and Products to Modulate Phenotypes

[1120] With the SAM genes and gene products of the invention, Applicants provide the means to modulate one or more of the following types of SAMs:

[1121] 1. Embryonic meristem

[1122] 2. Vegetative lateral SAMs

[1123] 3. Inflorescence lateral SAMs

[1124] 4. Floral meristems

[1125] 5. Adventitious SAM

[1126] The SAM genes of the instant invention are useful for modulating one or more processes of SAM structure and/or function including (I) cell size and division; (II) cell differentiation and organ primordia.

[1127] I. Cell Size and Division

[1128] A. Cell Properties

[1129] SAM genes and gene products can be used to modulate changes in cell size, cell division, rate and direction, and cell division symmetry.

[1130] A key attribute of the SAM is its capacity for self-renewal. The self-renewing initial cell population resides in the central zone of the SAM. A small number of slowly dividing initial cells (typically 2 to 4 per layer) act as a self-replenishing population, whereas some of their descendants, pushed out onto the flanks of the SAM, differentiate into leaves. Other descendants, displaced below the SAM, differentiate into stem. The immediate descendants of the initial cells divide further, amplifying the cell population before being incorporated into leaf or stem primordia.

[1131] The genes and gene components of this invention are useful for modulating any one or all of these cell division processes generally, as in timing and rate, for example. In addition, the polynucleotides and polypeptides of the invention can control the response of these processes to the internal plant programs associated with embryogenesis, hormone responses like cytokinin (inhibitory for root development, see section on cytokinin-responsive genes), coordination of growth and development with that of other plant organs (such as leaves, flowers, seeds, and fruits.

[1132] SAM genes can also be used to control the response of these processes to changes in the environment, including heat, cold, drought, high light and nutrition.

[1133] B. Sam Cell Patterns and Organization

[1134] Although SAMs appear as small regions of morphological undifferentiated dividing cells, a group of morphologically undifferentiated dividing cells does not necessarily constitute a SAM. Rather, evidence indicates that SAMs are highly organized or patterned regions of the plant in which many important events in early organogenesis occur. Thus, the term “SAM” is used to denote a highly organized structure and site of pattern formation. The invention also permits engineering of specific as well as overall features of SAM architecture including zones (central, peripheral, and rib), layers (l1, l2, and l3) and symmetry.

[1135] II Cell Differentiation and Organ Primordia

[1136] The apical meristem in many species first undergoes a vegetative phase whereby cells set aside from the apex become leaf primordia with an axillary vegetative meristem. Upon floral induction, the apical meristem is converted to an inflorescence meristem. The inflorescence meristem arises in the axils of modified leaves and is indeterminate, producing whorls or rings of floral organ primordia. In species which produce terminal flowers, the apical meristem is determinate and eventually adopts a third identity, that of a floral meristem. Examples of the plant properties that the genes and gene products of the invention can be used to modulate include indeterminacy (inhibiting or increasing differentiation and enhancing plant growth and yield), symmetry (symmetry of organs developed, and symmetry of arrangement of organs, such as leaves, petals, flowers, etc.), leaf fate and timing internode length modulation, such as longer internodes to increase shade avoidance and shorter internodes to favor leaf development), and floral fate and timing of flowering.

[1137] Uses of Plants Modified as Described Above Using Sam Genes, Gene Components and Products

[1138] Because SAMs determine the architecture of the plant, modified plants will be useful in many agricultural, horticultural, forestry and other industrial sectors. Plants with a different shape, numbers of flowers and seed and fruits will have altered yields of plant parts. For example, plants with more branches can produce more flowers, seed or fruits. Trees without lateral branches will produce long lengths of clean timber. Plants with greater yields of specific plant parts will be useful sources of constituent chemicals. Such plants will have, for example, more prolific leaf development, better optimized stem and shoot development, adventitious shoots, more flowers, seeds, and fruits, enhanced vigor (including growth rate of whole plant, including height, flowering time, etc., seedling, coleoptile elongation, young leaves, flowers, seeds, and fruit. higher yields based on biomass (fresh and dry weight during any time in plant life, including maturation and senescence), number of flowers, seed yield (number, size, weight, harvest index, content and composition, e.g. amino acid, jasmonate, oil, protein and starch) and fruit yield (number, size, weight, harvest index, content and composition, e.g. amino acid, jasmonate, oil, protein and starch).

[1139] To regulate any of the phenotype(s) above, activities of one or more of the SAM genes or gene products can be modulated and tested by screening for the desired trait. Specifically, the gene, mRNA levels, or protein levels can be altered in a plant utilizing the procedures described herein and the phenotypes can be assayed. As an example, a plant can be transformed according to Bechtold and Pelletier (1998, Methods. Mol. Biol. 82:259-266) and/or screened for variants as in Winkler et al. (1998) Plant Physiol 118: 743-50 and visually inspected for the desired phenotype or metabolically and/or functionally assayed according to Dolan et al. (1993, Development 119: 71-84), Dolan et al. (1997, Development 124: 1789-98), Crawford and Glass (1998, Trends Plant Science 3: 389-95), Wang et al. (1998, PNAS USA 95: 15134-39), Gaxiola et al. (1998, PNAS USA 95: 4046-50), Apse et al. (1999, Science 285: 1256-58), Fisher and Long (1992, Nature 357: 655-60), Schneider et al. (1998, Genes Devel 12: 2013-21) and Hirsch (1999, Curr Opin Plant Biol. 2: 320-326).

[1140] III.B.4.c. Use of Sam Genes and Gene Components to Modulate Biochemical Activities

[1141] SAM genes and gene components are useful for modulating biochemical or metabolic activities and/or pathways such as those noted below. Such biological activities can be measured according to the citations included in the Table below:

| | BIOCHEMICAL OR | |
|---|---|---|
| | METABOLIC ACTIVITIES | CITATIONS INCLUDING |
| PROCESS | AND/OR PATHWAYS | ASSAYS |
| Growth, Differentiation | Leaf shape and inflorescence and | Chuck, G. et al., 1996 Plant Cell |
| And Development | flower morphology systems | 8: 1227-1289. |
| | Activities of SAM | Schneeberger et al., 1998 |
| | transcriptional regulatory | Development 125: 2857-2865. |
| | proteins. | |
| | Meristem size and organ number | Kayes, J. M. and Clark, S. E. |
| | determinants | 1998 Development 125: 3843-3851. |
| | Regulated by Receptor Kinases | Jeong, S. et al., 1999 Plant |
| | Receptor kinase location and | Cell 11: 1925-1934. |
| | activity. | |
| | Meristem proliferation activities | Tantikanjana, T. Genes and |
| | | Development. Jun. 15, 2001. |
| | | 15(12): 1577-1588. |
| Internode elongation | Hormone signaling pathways | Yamamuro, C. et al., 2000 Plant |
| | | Cell. 12: 1591-1605. |
| Hormone | Levels of growth hormones | Kusaba, S. et al; 1998 Plant |
| Perception | including gibberellic acid, Auxin | Physiology 116(2): 471-476. |
| | and cytokinin. | |
| | Gibberellic acid biosynthesis | Modulation of GA perception |
| | GA biosynthetic enzyme GA-20 | and function can be assayed as |
| | oxidase is a required step in GA | described in Sakamoto, T. et al. |
| | biosynthesis. GA-20 oxidase is | 2001 Genes and Development |
| | Regulated by some SAM gene | 15: 581-590. |
| | products. | |
| | Over expression of SAM genes | Sakamoto, T. et al. 2001. |
| | can lead to reduced internode | Genes and Development 15: |
| | elongation, reduced cell | 581-590. |
| | elongation and reduced cell | |
| | expansion. | |
| | Cytokinin Receptor activity | Inoue, T. et al., Nature |
| | | 409: 1060-1063. |
| | SAM gene products can affect | Sieberer, T. et al., 2000 Current |
| | the activity of Auxin dependent | Biology 10: 1595-1598. |
| | postranscriptional gene protein | del Pozo, J. C.; Estelle, M. |
| | expression. | PNAS (USA) 1999. |
| | | 96(26): 15342-15347. |
| | SAM gene products can affect | Tantikanjana, T. Genes and |
| | Auxin Perception/metabolism in | Development. Jun. 15, 2001. |
| | the meristem to produce useful | 15(12): 1577-1588. |
| | changes in plant architecture. | |
| Leaf senescence | SAM gene products can increase | Ori, N. et al; Plant Cell. June, |
| | and decrease leaf senescence | 1999. 11(6): 1073-1080. |
| | rate. This can be done by | |
| | modulating cytokinin hormone | |
| | levels. | |
| | Cytokinin effect on cell division | Beemster, Gerrit T. S.; Baskin, |
| | and expansion. | Tobias I. 2000 Plant Physiology |
| | | 124: 1718-1727. |
| Adventitious shoot | Alter growth hormone status. | Kusaba, S. et al; 1998 Plant |
| formation | | Physiology 116(2): 471-476 |
| | Ectopic expression of SAM | Chuck, G. 1996 Plant Cell 8: |
| | genes in leaf or other non SAM | 1227-1289. |
| | organs or tissue can produce | |
| | shoots | |
| | Pathways comprising | |
| | isopentenyl transferase (ipt) | |

[1142] Other biological activities that can be modulated by the SAM genes and gene products are listed in the Reference tables. Assays for detecting such biological activities are described in the Protein Domain table.

[1143] III.B.4.d. Use of Sam Genes, Gene Components and Products to Modulate Transcription Levels of Other Genes

[1144] The expression of many genes is “upregulated” or “downregulated” in the SAM mutants because some of the SAM genes are integrated into complex networks that regulate the transcription of many other genes. Some SAM genes and gene components are therefore useful for modifying the transcription of other genes and hence complex phenotypes as described above. Profiles of genes altered by SAM mutations and genes are described in the Table below with associated biological activities. “Up-regulated” profiles are for genes whose mRNA levels are higher in the stm plants as compared to parental wild-type plants; and vice-versa for “down-regulated” profiles.

| | | PHYSIOLOGICAL | EXAMPLES OF |
|---|---|---|---|
| | TYPE OF GENES | CONSEQUENCES OF | BIOCHEMICAL |
| | WHOSE | MODIFYING SAM | ACTIVITIES WHOSE |
| TRANSCRIPT | TRANSCRIPTS ARE | GENE PRODUCT | TRANSCRIPTS ARE |
| LEVELS | CHANGED | LEVELS | CHANGED |
| Up Regulated | Genes repressed by | Altered | Transporters |
| Transcripts | SAMs directly or | Auxin/cytokinin | Metabolic Enzymes |
| | indirectly | hormone ratio and | Cell Membrane |
| | | perception. | Structure |
| | | Increased/decreased | Kinases, Phosphatases, |
| | | cell expansion - | G-Proteins |
| | | promoting effects of | Transcription |
| | | brassinosteroids and | Activators/Repressors |
| | | gibberellic acids, due | Transcription |
| | | to altered levels of | coactivators/corepressors |
| | | biosynthetic pathway | Chromatin Structure |
| | | enzymes and or the | And/Or Localized DNA |
| | | amount of functional | Topology Proteins |
| | | hormone receptor. | Cell Wall Proteins |
| | | Increased or | Translational |
| | | decreased rate of cell | activators/repressors |
| | | division. | Cell wall proteins |
| | | Altered planes of cell | involved in cell rigidity |
| | | division | e.g. extensin, glycine |
| | | Increased or | rich proteins. |
| | | decreased rate and | Cell cycle regulatory |
| | | extent of cell | proteins such as cyclins |
| | | expansion. | and cyclin dependent |
| | | Increased or | protein kinases (CDKs). |
| | | decreased rigidity of | |
| | | cell ways. | |
| Down-Regulated | Genes involved in SAM | Altered pattern of | Auxin transporter |
| Transcripts | cells and genes whose | organs immerging | proteins |
| | expression is induced by | from the meristem | Auxin receptor proteins |
| | SAMs | Increased or | Cytokinin receptor |
| | | decreased the number | proteins |
| | | of cells partitioned | Gibberellic acid receptor |
| | | into a lateral organ. | proteins |
| | | Altered apical | Brassinolide receptor |
| | | dominance due to | proteins |
| | | suppression of lateral | Hormone biosynthesis |
| | | bud growth. | proteins |
| | | Altered apical | Hormone degradation |
| | | dominance due to | proteins |
| | | releasing of axillary | Hormone conjugation |
| | | meristems from | proteins |
| | | repression. | Ubiquitin conjugating |
| | | Increased/or | enzymes. |
| | | decreased production | Receptor kinase signal |
| | | of adventitious | transduction |
| | | meristems. | |
| | | Increased potential to | |
| | | form somatic | |
| | | embryos. | |
| | | Altered cell signaling | |
| | | pathways | |
| | | Altered hormone | |
| | | levels | |

[1145] SAM genes and gene products can be modulated alone or in combination as described in the introduction. Of particular interest are combination of these genes and gene products with those that modulate hormone responsive pathways. Hormone responsive genes and gene products are described in more detail in the sections below.

### Use of Sam Gene Promoters to Modify SAMs

[1146] Promoters of SAM genes, as described in the Reference tables, for example, can be used to modulate transcription of coding sequences in SAM cells to influence growth, differentiation or patterning of development or any of the phenotypes or biological activities above. For example, any desired sequence can be transcribed in similar temporal, tissue, or environmentally specific patterns as a SAM gene when the desired sequence is operably linked to the promoter of the SAM gene.

[1147] A specific instance is linking of a SAM gene promoter normally active in floral meristem primordia, to a phytotoxic protein coding sequence to inhibit apical meristem switching into an inflorescence and/or floral meristem, thereby preventing flowering.

[1148] SAM gene promoters can also be used to induce transcription of antisense RNA copies of a gene or an RNA variant to achieve reduced synthesis of a specific protein in specific SAM cells. This provides an alternative way to the example above, to prevent flowering.

| | | | EXAMPLES OF |
|---|---|---|---|
| | | PHYSIOLOGICAL | BIOCHEMICAL |
| | TYPE OF GENES | CONSEQUENCES | ACTIVITIES OF |
| | WHOSE | OF MODIFYING | GENE PRODUCTS |
| TRANSCRIPT | TRANSCRIPTS | GENE PRODUCT | WITH MODIFIED |
| LEVELS | ARE CHANGED | LEVELS | LEVELS |
| Up regulated | Genes involved in | Leaf cells | Transcription |
| Transcripts | leaf, stem and root | proliferate and | factors, signal |
| | cell differentiation, | differentiate; | transduction |
| | cell division, cell | Leaf structures | proteins, kinase |
| | expansion | form and expand | and phosphatases |
| | Genes involved in | | Chromatin |
| | positive regulation of | | remodeling |
| | root, stem and leaf | | Hormone |
| | genes | | biosynthesis |
| | Repressors of root | | enzymes |
| | and other organ cell | | Receptors |
| | types e.g. flowers | | |
| | Genes involved in | Photosynthesis | Light harvesting |
| | photosynthesis | and plastid | coupled to ATP |
| | | differentiation | production |
| | | Calvin cycle | Chlorophyll |
| | | activated | biosynthesis |
| | | Chloroplast | Ribulose |
| | | biogenesis and | Bisphosphate |
| | | plastid | carboxylase |
| | | differentiation | Chloroplast |
| | | activated | membranes |
| | | | synthesis |
| | | | Chloroplast |
| | | | ribosome |
| | | | biogenesis |
| | Other genes involved in | Starch | Starch synthase |
| | metabolism | biosynthesis | Nitrate reductase |
| | | Lipid | Terpenoid |
| | | biosynthesis | biosynthesis |
| | | Nitrogen | Transcription |
| | | metabolism - | factors |
| | | NO3 reduced and | Transporters |
| | | amino acids made | Kinases |
| | | Secondary | Phosphatases and |
| | | metabolites | signal |
| | | produced | transduction |
| | | | protein |
| | | | Chromatin |
| | | | structure |
| | | | modulators |
| Down regulated | Genes involved in | Leaf genes | Transcription |
| genes | negative regulation | activated and leaf | factors |
| | of root, stem and leaf | functions induced | Signal |
| | genes | Other organs not | transduction |
| | Genes involved in | induced | proteins - kinases |
| | other organs e.g. | Leaf, stem and | and phosphatases |
| | flowers | root metabolic | Metabolic |
| | | pathways induced | enzymes |
| | | | Chromatin |
| | | | remodeling |
| | | | proteins |

[1149] While early seedling phase polynucleotides and gene products are used singly, combinations of these polynucleotides are often better to optimize new growth and development patterns. Useful combinations include different leaf polynucleotides and/or gene products with a hormone responsive polynucleotide. These combinations are useful because of the interactions that exist between hormone-regulated pathways, nutritional pathways and development.

### Use of Early Seedling Phase Gene Promoters

[1150] Promoters of early seedling phase genes are useful for transcription of desired polynucleotides, both plant and non-plant. If the gene is expressed only in the post-germination seedling, or in certain kinds of leaf cells, the promoter is used to drive the synthesis of proteins specifically in those cells. For example, extra copies of carbohydrate transporter cDNAs operably linked to a early seedling phase gene promoter and inserted into a plant increase the “sink” strength of leaves. Similarly, early seedling phase promoters are used to drive transcription of metabolic enzymes that alter the oil, starch, protein, or fiber contents of the seedling. Alternatively, the promoters direct expression of non-plant genes that can, for instance, confer resistance to specific pathogen. Additionally the promoters are used to synthesize an antisense mRNA copy of a gene to inactivate the normal gene expression into protein. The promoters are used to drive synthesis of sense RNAs to inactivate protein production via RNA interference.

[1151] III.B.5. Vegetative-Phase Specific Responsive Genes, Gene Components and Products

[1152] Often growth and yield are limited by the ability of a plant to tolerate stress conditions, including water loss. To combat such conditions, plant cells deploy a battery of responses that are controlled by a phase shift, from so called juvenile to adult. These changes at distinct times involve, for example, cotyledons and leaves, guard cells in stomata, and biochemical activities involved with sugar and nitrogen metabolism. These responses depend on the functioning of an internal clock, that becomes entrained to plant development, and a series of downstream signaling events leading to transcription-independent and transcription-dependent stress responses. These responses involve changes in gene expression.

[1153] Manipulation of the activation of one or more genes controlling the phase changes is useful to modulate the biological processes and/or phenotypes listed below. Phase responsive genes and gene products can act alone or in combination. Useful combinations include phase responsive genes and/or gene products with similar transcription profiles, similar biological activities, or members of the same or functionally related biochemical pathways. Whole pathways or segments of pathways are controlled by transcription factor proteins and proteins controlling the activity of signal transduction pathways. Therefore, manipulation of such protein levels is especially useful for altering phenotypes and biochemical activities of plants.

[1154] Phase responsive genes and gene products can function to either increase or dampen the above phenotypes or activities. Characterization of phase responsive genes was carried out using microarray technology. Microarray technology allows monitoring of gene expression levels for thousands of genes in a single experiment. This is achieved by hybridizing labeled fluorescent cDNA pools to glass slides that contain spots of DNA (Schena et al. (1995) Science 270: 467-70). The US Arabidopsis Functional Genomics Consortium (AFGC) has recently made public the results from such microarray experiments conducted with AFGC chips containing about 10,000 non-redundant ESTs, selected from about 37,000 randomly sequenced ESTs generated from mRNA of different tissues and developmental stages.

[1155] The sequences of the ESTs showing at least two-fold increases or decreases in a mutant of Arabidopsis thaliana, squint, that appears not to undergo phase changes and appears adult-like throughout its growth cycle, compared with wild type were identified, compared to the Ceres full length cDNA and genomic sequence databanks, and equivalent. Ceres clones identified. The MA_diff tables reports the results of this analysis, indicating those Ceres clones which are up or down regulated over controls, thereby indicating the Ceres clones which represent phase responsive genes. The MA_diff Table(s) reports the transcript levels of the experiment (see EXPT ID: Sqn (relating to SMD 7133, SMD 7137)). For transcripts that had higher levels in the samples than the control, a “+” is shown. A “−” is shown for when transcript levels were reduced in root tips as compared to the control. For more experimental detail see the Example section below.

[1156] Phase responsive genes are those sequences that showed differential expression as compared to controls, namely those sequences identified in the MA_diff tables with a “+” or “−” indication.

[1157] Phase Responsive Genes Identified by Cluster Analyses of Differential Expression

[1158] Phase Responsive Genes Identified by Correlation to Genes that are Differentially Expressed

[1159] As described above, the transcription profiles of genes that act together are well correlated. Applicants not only have identified the genes that are differentially expressed in the microarray experiments, but also have identified the genes that act in concert with them. The MA_clust table indicates groups of genes that have well correlated transcription profiles and therefore participate in the same pathway or network.

[1160] A pathway or network of phase responsive genes is any group in the MA_clust that comprises a cDNA ID that also appears in Expt ID Sqn (relating to SMD 7133, SMD 7137) of the MA_diff table(s).

[1161] Phase Responsive Genes Identified by Correlation to Genes that Cause Physiological Consequences

[1162] Additionally, the differential expression data and the phenotypic observations can be merged to identify pathways or networks of phase responsive genes. A group in the MA_clust is considered a phase responsive pathway or network if the group comprises a cDNA ID that also appears in Knock-in or Knock-out tables that causes one or more of the phenotypes described in section above.

[1163] Phase Responsive Genes Identified by Amino Acid Sequence Similarity

[1164] Phase responsive genes from other plant species typically encode polypeptides that share amino acid similarity to the sequences encoded by corn and Arabidopsis phase responsive genes. Groups of phase responsive genes are identified in the Protein Grouping table. In this table, any protein group that comprises a peptide ID that corresponds to a cDNA ID member of a phase responsive pathway or network is a group of proteins that also exhibits Phase responsive functions/utilities.

[1165] Further, promoters of phase responsive genes, as described in Reference tables, for example, are useful to modulate transcription that is induced by phase or any of the following phenotypes or biological activities below. Further, any desired sequence can be transcribed in similar temporal, tissue, or environmentally specific patterns as the phase responsive genes when the desired sequence is operably linked to a promoter of a phase responsive gene.

[1166] III.B.5.a. Use of Phase Responsive Genes to Modulate

[1167] PhenotypesPhase responsive genes and gene products are useful to or modulate one or more phenotype including timing phenotypes, dormancy, germination, cotyledon opening, first leaves, juvenile to adult transition, bolting, flowering, pollination, fertilization, seed development, seed set, fruit drop, senescence, epinasty, biomass, fresh and dry weight during any time in plant life, such as maturation, number of flowers, seeds, branches, and/or leaves, seed yield, including number, size, weight, and/or harvest index, fruit yield, including number, size, weight, and/or harvest index, plant development, time to fruit maturity, cell wall strengthening and reinforcement, stress tolerance, drought tolerance, flooding tolerance, and UV tolerance.

[1168] To regulate any of the phenotype(s) above, activities of one or more of the phase responsive genes or gene products can be modulated and the plants can be tested by screening for the desired trait. Specifically, the gene, mRNA levels, or protein levels can be altered in a plant utilizing the procedures described herein and the phenotypes can be screened for variants as in Anderson et al. (1997) Plant Cell 9: 1727-1743; Heintzen et al. (1997) Proc. Natl. Acad. Sci. USA 94: 8515-20; Schaffer et al. (1998) Cell 93:1219-1229; Somers et al. (1998) Development 125: 485-494; Somers et al. (1998) Science 282: 1488-1490; Wang and Tobin (1998) Cell 93: 1207-1217; Zhong et al. (1998) Plant Cell 10: 2005-2017; Sugano et al. (1998) Proc. Natl. Acad. Sci. USA 95: 11020-11025; Dowson-Day and Millar (1999) Plant J 17: 63-71; Green and Tobin (1999) Proc. Natl. Acad. Sci. USA 96: 4176-419; Staiger and Apel (1999) Mol. Gen. Genet. 261: 811-819; Strayer and Kay (1999) Curr. Opin. Plant Biol. 2:114-120; Strayer et. al. (2000) Science 289:768-771; Kreps et al. (2000) J Biol Rhythms (2000) 15:208-217; Nelson et al. (2000) Cell 101:331-340; Somers et al. (2000) Cell 101:319-329.

[1169] III.B.5.b. Use of Phase Responsive Genes to Modulate Biochemical Activities

[1170] The activities of one or more of the phase responsive genes can be modulated to change biochemical or metabolic activities and/or pathways such as those noted below. Such biological activities are documented and can be measured according to the citations above and included in the table below:

| | Biochemical Or Metabolic | |
|---|---|---|
| Process | Activities And/Or Pathways | Citations including assays |
| Germination And | Cold, Light And Water | Bognar et al. (1999) Proc. Natl. Acad. |
| Seedling | Modulated Signal Transduction | Sci. USA 96: 14652-14657; Sugano et |
| Development | Pathways, Receptors, Kinases, | al (1999) Proc. Natl. Acad. Sci. USA |
| | PAS Domain Proteins | 96: 12362-12366; Dowson-Day and |
| | | Millar (1999) Plant J 17: 63-71; |
| | | Somers et al. (2000) Cell 101: 319-329; |
| | | Zhong et al. (1998) Plant Cell |
| | | 10: 2005-2017 |
| Growth | Cold And Light Modulated | Nelson et al. (2000) Cell 101: 331-340; |
| Transitions And | Signal Transduction Pathways, | Fowler et al. (1999) EMBO J. |
| Flowering | Receptors, Kinases, PAS | 18: 4679-4688 |
| | Domain Protiens | |
| Tuber Formation | Cold And Light Modulated | Yanovsky et al. (2000) Plant J. 23: |
| | Signal Transduction Pathways | 223-232 |
| METABOLISM | | |
| Lipid Metabolism | Membrane Lipid Synthesis | Bradley and Reddy (1997) J. |
| | Including Omega-3 Fatty Acid | Bacteriol. 179: 4407-4410; Martin, M |
| | Desaturase, Lipases, Lipid | et al. 1999 Europe J. Biochem 262: |
| | Transfer Proteins | 283-290 |
| Sugar | Glycosylhydrolases, | Liu et al. (1996) Plant Physiol. |
| Metabolism | Glycosyltransferases, | 112: 43-51; Millar and Kay (1996) |
| | Amylases, Sucrose Synthase, | Proc Natl Acad Sci USA 93: 15491-15496; |
| | CAB, Rubisco, Light Signal | Wang et al. (1997) Plant Cell |
| | Transduction | 9: 491-507; Shinohara et al (1999) J. |
| | | Biol. Chem. 273: 446-452 |
| Nitrogen | Aminotransferases, Arginase, | Bradley and Reddy (1997) J. |
| Metabolism | Proteases And Vegetative | Bacteriol. 179: 4407-4410 |
| | Storage Proteins, Aromatic | |
| | Amino Acid Synthesis | |
| Photorespiration | Mitochondrial, Chloroplast And | Zhong and McClung (1996) Mol. Gen. |
| | Peroxisomal Photorespiratory | Genet. 251: 196-203; McClung (1997) |
| | Enzymes, Serine | Free. Radic. Biol. Med. 23: 489-496; |
| | Hydroxymethyl Transferases, | McClung et al. (2000) Plant Physiol. |
| | Catalase | 123: 381-392 |
| Responses To | Expression Of Genes Involved | McClung (1997) Free Radic Biol Med |
| Environmental | In Responses To Drought, Salt, | 23: 489-496; Shi et al. (2000) Proc. |
| Stress | UV | Natl. Acad. Sci. USA 97: 6896-6901 |

[1171] Other biological activities that can be modulated by the phase responsive genes and their products are listed in the Reference tables. Assays for detecting such biological activities are described in the Protein Domain table.

[1172] Phase responsive genes are characteristically differentially transcribed in response to maturity of the cell, organ or tissue which depends on a timing mechanism, which is internal to an organism or cell. The Intensity Table reports the changes in transcript levels of various phase responsive genes in a plant.

[1173] The data from this experiment reveal a number of types of phase responsive genes and gene products. Profiles of some classes of phase responsive genes are shown in the table below with examples of which associated biological activities are modulated when the activities of one or more such genes vary in plants.

| Transcript | | Physiological | Examples Of Biochemical |
|---|---|---|---|
| Levels | Type Of Genes | Consequences | Activity |
| Up Regulated | Responders To | Adult phase | Metabolic Enzymes |
| Transcripts | mutation that confers | adoption | Change In Cell |
| | adult like phase | Metabolisms | Membrane Structure |
| | Genes induced in | Affected By phase | And Potential |
| | adult-like phase | change | Kinases And |
| | | Synthesis Of | Phosphatases |
| | | Secondary | Transcription |
| | | Metabolites | Activators |
| | | And/Or Proteins | Change In Chromatin |
| | | Modulation Of | Structure And/Or |
| | | Phase Response | Localized DNA |
| | | Transduction | Topology |
| | | Pathways | |
| | | Specific Gene | |
| | | Transcription | |
| | | Initiation | |
| Down- | Responders To | Negative | Transcription Factors |
| Regulated | mutation that confers | Regulation of | Change In Protein |
| Transcripts | adult phase | adult phase | Structure By |
| | Genes repressed in | pathways | Phosphorylation |
| | adult-like phase | Changes In | (Kinases) Or |
| | Genes With | Pathways And | Dephosphoryaltion |
| | Discontinued | Processes | (Phosphatases) |
| | Expression Or | Operating In Cells | Change In Chromatin |
| | Unstable mRNA in | Changes In | Structure And/Or |
| | adult-like phase | Metabolic | DNA Topology |
| | | pathways other | Stability Factors For |
| | | than phase | Protein Synthesis And |
| | | specific pathways | Degradation |
| | | | Metabolic Enzymes |

### Use of Promoters of Phase Responsive Genes

[1174] Promoters of phase responsive genes are useful for transcription of any desired polynucleotide or plant or non-plant origin. Further, any desired sequence can be transcribed in a similar temporal, tissue, or environmentally specific patterns as the phase responsive genes where the desired sequence is operably linked to a promoter of a phase responsive gene. The protein product of such a polynucleotide is usually synthesized in the same cells, in response to the same stimuli as the protein product of the gene from which the promoter was derived. Such promoter are also useful to produce antisense mRNAs to down-regulate the product of proteins, or to produce sense mRNAs to down-regulate mRNAs via sense suppression.

[1175] III.C. Hormone Responsive Genes, Gene Components and Products

[1176] III.C.1. Abscissic Acid Responsive Genes, Gene Components and Products

[1177] Plant hormones are naturally occurring substances, effective in very small amounts, which act as signals to stimulate or inhibit growth or regulate developmental processes in plants. Abscisic acid (ABA) is a ubiquitous hormone in vascular plants that has been detected in every major organ or living tissue from the root to the apical bud. The major physiological responses affected by ABA are dormancy, stress stomatal closure, water uptake, abscission and senescence. In contrast to Auxins, cytokinins and gibberellins, which are principally growth promoters, ABA primarily acts as an inhibitor of growth and metabolic processes.

[1178] Changes in ABA concentration internally or in the surrounding environment in contact with a plant results in modulation of many genes and gene products. Examples of such ABA responsive genes and gene products are shown in the Reference, Sequence, Protein Group, Protein Group Matrix tables, MA_diff, and MA_clust tables. These genes and/or products are responsible for effects on traits such as plant vigor and seed yield. They were discovered and characterized from a much larger set of genes by experiments designed to find genes whose mRNA products changed in concentration in response to application of ABA to plants.

[1179] While ABA responsive polynucleotides and gene products can act alone, combinations of these polynucleotides also affect growth and development. Useful combinations include different ABA responsive polynucleotides and/or gene products that have similar transcription profiles or similar biological activities, and members of the same or similar biochemical pathways. Whole pathways or segments of pathways are controlled by transcription factor proteins and proteins controlling the activity of signal transduction pathways. Therefore, manipulation of such protein levels is especially useful for altering phenotypes and biochemical activities of plants. In addition, the combination of an ABA responsive polynucleotide and/or gene product with another environmentally responsive polynucleotide is also useful because of the interactions that exist between hormone-regulated pathways, stress and defence induced pathways, nutritional pathways and development. Here, in addition to polynucleotides having similar transcription profiles and/or biological activities, useful combinations include polynucleotides that may have different transcription profiles but which participate in common or overlapping pathways.

[1180] Such ABA responsive genes and gene products can function to either increase or dampen the above phenotypes or activities either in response to changes in ABA concentration or in the absence of ABA fluctuations. The MA_diff Table(s) reports the transcript levels of the experiment (see EXPT ID: 108560, 108561, 108513, 108597). For transcripts that had higher levels in the samples than the control, a “+” is shown. A “−” is shown for when transcript levels were reduced in root tips as compared to the control. For more experimental detail see the Example section below.

[1181] ABA genes are those sequences that showed differential expression as compared to controls, namely those sequences identified in the MA_diff tables with a “+” or “−” indication.

[1182] ABA Genes Identified by Cluster Analyses of Differential Expression

[1183] ABA Genes Identified by Correlation to Genes that are Differentially Expressed

[1184] As described above, the transcription profiles of genes that act together are well correlated. Applicants not only have identified the genes that are differentially expressed in the microarray experiments, but also have identified the genes that act in concert with them. The MA_clust table indicates groups of genes that have well correlated transcription profiles and therefore participate in the same pathway or network.

[1185] A pathway or network of ABA genes is any group in the MA_clust that comprises a cDNA ID that also appears in Expt ID 108560, 108561, 108513, 108597 of the MA_diff table(s).

[1186] ABA Genes Identified by Correlation to Genes that Cause Physiological Consequences

[1187] Additionally, the differential expression data and the phenotypic observations can be merged to identify pathways or networks of ABA genes. A group in the MA_clust is considered a ABA pathway or network if the group comprises a cDNA ID that also appears in Knock-in or Knock-out tables that causes one or more of the phenotypes described in section above.

[1188] ABA Genes Identified by Amino Acid Sequence Similarity

[1189] ABA genes from other plant species typically encode polypeptides that share amino acid similarity to the sequences encoded by corn and Arabidopsis ABA genes. Groups of ABA genes are identified in the Protein Group table. In this table, any protein group that comprises a peptide ID that corresponds to a cDNA ID member of a ABA pathway or network is a group of proteins that also exhibits ABA functions/utilities.

[1190] Further, promoters of ABA responsive genes, as described in the Reference tables, for example, are useful to modulate transcription that is induced by ABA or any of the following phenotypes or biological activities below.

[1191] III.C.1.a. Use of Abscissic Acid Responsive Genes to Modulate Phenotypes

[1192] ABA responsive genes and gene products are useful to or modulate one or more of the following phenotypes including development such as cell growth (promotion of leaf cell elongation), fruit development (fruit drop and inhibition of parthenocarpy and ovary growth), seed development (maturation of zygotic and somatic embryos, embryo development, seed development and maturation, acquisition of desiccation tolerance, dormancy including control rate and timing of germination, prolongation of seed storage and viability, and inhibition of hydrolytic enzyme synthesis); growth of roots such as inhibition of root elongation under low water potential), stems, buds (such as promotion of dormancy and lateral/axillary bud formation), leaves, and inhibition of aba-induced growth and elongation; biomass (such as fresh and dry weight during any time in plant life, such as maturation), number, size, and weight of flowers and seeds); senescence (including abscission, leaf fall, and flower longevity); differentiation (including plastid/chloroplast differentiation and regulation of sterility); and stress responses (such as mediation of response to desiccation, drought, salt and cold).

[1193] To regulate any of the phenotype(s) above, activities of one or more of the ABA responsive genes or gene products can be modulated in an organism and tested by screening for the desired trait. Specifically, the gene, mRNA levels, or protein levels can be altered in a plant utilizing the procedures described herein and the phenotypes can be assayed. As an example, a plant can be transformed according to Bechtold and Pelletier (1998, Methods. Mol. Biol. 82:259-266) and/or screened for variants as in Winkler et al. (1998) Plant Physiol 118: 743-50 and visually inspected for the desired phenotype or metabolically and/or functionally assayed according to Koorneef and Karssen (1994, Seed dormancy and germination, In: Arabidopsis, Cold Spring Harbor Lab. Press, pp 314-334), Cramer et al (1998, J. Exptl. Botany 49:191-198), and White and Rivin (2000, Plant Physiol 122: 1089-97). Phillips et al. (1997) EMBO J 16: 4489-96; Nambara et al (1995) Development 121: 629-636; Hays et al (1999) Plant Physiol. 119: 1065-72; Filonova et al (2000) J Exptl Botany 51: 249-64; White et al (2000) Plant Physiol. 122: 1081-88; and Visser et al. (1998) Plant Mol Biol 37: 131-40; Rohde et al. (2000) Plant Cell 12:35-52; and Cramer et al. (1998) J. experimental Botany. 49: 191-198.

[1194] III.C.1.b. Use of Abscissic Acid Responsive Genes to Modulate Biochemical Activities

[1195] The activities of one or more of the ABA responsive genes can be modulated to change biochemical or metabolic activities and/or pathways such as those noted below. Such biological activities can be measured according to the citations included in the Table below:

| | BIOCHEMICAL OR | |
|---|---|---|
| | METABOLIC ACTIVITIES | |
| PROCESS | AND/OR PATHWAYS | CITATIONS INCLUDING ASSAYS |
| Growth, | Farnesylation | Pei Et Al (1998) Science 282: 287-290; |
| Differentiation And | | Cutler Et Al. (1996) Science |
| Development | | 273: 1239 |
| | Nitrogen Metabolism | Goupil Et Al (1998) J Exptl Botany |
| | | 49: 1855-62 |
| Water Conservation | Stomatal Development | Allen Et Al. (1999) Plant Cell 11: |
| And Resistance To | And Physiology | 1785-1798 |
| Drought And Other | | Li Et Al. 2000 Science 287: 300-303 |
| Related Stresses | | Burnett Et Al 2000. J. Exptl Botany |
| | | 51: 197-205 |
| | | Raschke (1987) In: Stomatal |
| | | Function Zeiger Et Al. Eds., 253-279 |
| | Stress Response Pathways | Bush And Pages (1998) Plant Mol. |
| | | Biol. 37: 425-35 |
| | Inhibition Of Ethylene | Spollen Et Al (2000) Plant Physiol. |
| | Production Under Low | 122: 967-976 |
| | Water Potential | |
| | Proline And Other | Hare Et Al. (1998) Plant, Cell And |
| | Osmolite Synthesis And | Environment 21: 535-553; Hare Et Al. |
| | Degradation | (1999) J. Exptl. Botany 50: 413-434 |
| | Plasmalemma And | Macrobbie (1998) Philos Trans R Soc |
| | Tonoplast Ion Channel | Lond B Biol Sci 353: 1475-88; Li Et |
| | Changes | Al (2000) Science 287: 300-303; |
| | | Barkla Et Al. (1999) Plant Physiol. |
| | | 120: 811-819 |
| | Ca2+ Accumulation | Lacombe Et Al. (2000) Plant Cell 12: |
| | | 837-51; Wang Et Al. (1998) Plant |
| | | Physiol 118: 1421-1429; Shi Et Al. |
| | | (1999) Plant Cell 11: 2393-2406 |
| | K+ Efflux | Gaymard Et Al. (1998) Cell 94: 647-655 |
| | Activation Of Kinases | Jonak Et Al. (1996) Proc. Natl. Acad. |
| | And Phosphatases | Sci 93: 11274-79; Sheen (1998) Proc. |
| | | Natl. Acad. Sci. 95: 975-80; Allen Et |
| | | Al. (1999) Plant Cell 11: 1785-98 |

[1196] Other biological activities that can be modulated by the ABA responsive genes and gene products are listed in the Reference tables. Assays for detecting such biological activities are described in the Protein Domain table.

[1197] ABA responsive genes are characteristically differentially transcribed in response to fluctuating ABA levels or concentrations, whether internal or external to an organism or cell. The MA_diff reports the changes in transcript levels of various ABA responsive genes in entire seedlings at 1 and 6 hours after a plant was sprayed with a Hoagland's solution enriched with ABA as compared to seedlings sprayed with Hoagland's solution only.

[1198] The data from this time course can be used to identify a number of types of ABA responsive genes and gene products, including “early responders,” and “delayed ABA responders”, “early responder repressors” and “delayed repressors”. Profiles of these different ABA responsive genes are shown in the Table below together with examples of the kinds of associated biological activities.

| | | | EXAMPLES OF |
|---|---|---|---|
| TRANSCRIPT | TYPE OF | PHYSIOLOGICAL | BIOCHEMICAL |
| LEVELS | GENES | CONSEQUENCES | ACTIVITY |
| Up Regulated | Early Responders | ABA Perception | Transcription Factors |
| Transcripts | To ABA | ABA Uptake | Transporters |
| (Level At 1 Hr ≅6 Hr) | | Modulation Of ABA | Change In Cell Membrane |
| or | | Response | Structure |
| (Level At 1 Hr > 6 Hr) | | Transduction | Kinases And Phosphatases |
| | | Pathways | Transcription Activators |
| | | Specific Gene | Change In Chromatin |
| | | Transcription | Structure And/Or |
| | | Initiation | Localized DNA Topology |
| Up Regulated | Delayed | Maintenance Of | Transcription Factors |
| Transcripts | Responders | Response To ABA | Specific Factors (Initiation |
| (Level At 1 Hr < 6 Hr) | | Maintenance Of Seed | And Elongation) For |
| | | Dormancy, Stress | Protein Synthesis |
| | | Stomatal Closure, | Maintenance Of Mrna |
| | | Water Uptake | Stability |
| | | Control, Abscission | Maintenance Of Protein |
| | | And Senescence | Stability |
| | | Control Pathways | Maintenance Of Protein- |
| | | | Protein Interaction |
| Down-Regulated | Early Responder | Negative Regulation | Transcription Factors |
| Transcripts | Repressors Of | Of ABA Pathways | Change In Protein |
| (Level At 1 Hr ≅ 6 Hr) | ABA State Of | Released | Structure By |
| or | Metabolism | Changes In Pathways | Phosphorylation (Kinases) |
| (Level At 6 Hr > 1 Hr) | Genes With | And Processes | Or Dephosphoryaltion |
| | Discontinued | Operating In Cells | (Phosphatases) |
| | Expression Or | | Change In Chromatin |
| | UnsTable mRNA | | Structure And/Or DNA |
| | In Presence Of | | Topology |
| | ABA | | |
| Down-Regulated | Delayed | Negative Regulation | Transcription Factors |
| Transcripts | Repressors Of | Of ABA Pathways | Kinases And Phosphatases |
| (Level At 1 Hr > 6 Hr) | ABA State Of | Released | Stability Of Factors For |
| | Metabolism | Maintenance Of | Protein Synthesis And |
| | Genes With | Pathways Released | Degradation |
| | Discontinued | From Repression | |
| | Expression Or | | |
| | UnsTable mRNA | Changes In Pathways | |
| | In Presence Of | And Processes | |
| | ABA | Operating In Cells | |

### Use of Promoters of ABA Responsive Genes

[1199] Promoters of ABA responsive genes are useful for transcription of any desired polynucleotide or plant or non-plant origin. Further, any desired sequence can be transcribed in a similar temporal, tissue, or environmentally specific patterns as the ABA responsive genes where the desired sequence is operably linked to a promoter of a ABA responsive gene. The protein product of such a polynucleotide is usually synthesized in the same cells, in response to the same stimuli as the protein product of the gene from which the promoter was derived. Such promoter are also useful to produce antisense mRNAs to down-regulate the product of proteins, or to produce sense mRNAs to down-regulate mRNAs via sense suppression.

[1200] III.C.2. Auxin Responsive Genes, Gene Components and Products

[1201] Plant hormones are naturally occurring substances, effective in very small amounts that stimulate or inhibit growth or regulate developmental processes in plants. One of the plant hormones is indole-3-acetic acid (IAA), often referred to as Auxin.

[1202] Changes in Auxin concentration in the surrounding environment in contact with a plant or in a plant results in modulation of the activities of many genes and hence levels of gene products. Examples of such Auxin responsive genes and their products are shown in the Reference and Sequence Tables. These genes and/or products are responsible for effects on traits such as plant vigor and seed yield. The genes were discovered and characterized from a much larger set by experiments designed to find genes whose mRNA products changed in response to application of Auxin to plants.

[1203] Manipulation of one or more Auxin responsive gene activities are useful to modulate the biological activities and/or phenotypes listed below. Auxin response genes and gene products can act alone or in combination. Useful combinations include Auxin response genes and/or gene products with similar transcription profiles, similar biological activities, or members of the same or functionally related biochemical pathways. Whole pathways or segments of pathways are controlled by transcription factor proteins and proteins controlling the activity of signal transduction pathways. Therefore, manipulation of the levels of such proteins is especially useful for altering phenotypes and biochemical activities of plants. The MA_diff Table(s) reports the transcript levels of the experiment (see EXPT ID: 108564, 108565, 108516, 108554, 108466, 107886, 107891, SMD 3743, and NAA (relating to SMD 3749, SMD 6338, SMD 6339)). For transcripts that had higher levels in the samples than the control, a “+” is shown. A “−” is shown for when transcript levels were reduced in root tips as compared to the control. For more experimental detail see the Example section below.

[1204] NAA genes are those sequences that showed differential expression as compared to controls, namely those sequences identified in the MA_diff tables with a “+” or “−” indication.

[1205] NAA Genes Identified by Cluster Analyses of Differential Expression

[1206] NAA Genes Identified by Correlation to Genes that are Differentially Expressed

[1207] As described above, the transcription profiles of genes that act together are well correlated. Applicants not only have identified the genes that are differentially expressed in the microarray experiments, but also have identified the genes that act in concert with them. The MA_clust table indicates groups of genes that have well correlated transcription profiles and therefore participate in the same pathway or network.

[1208] A pathway or network of NAA genes is any group in the MA_clust that comprises a cDNA ID that also appears in Expt ID 108564, 108565, 108516, 108554, 108466, 107886, 107891, SMD 3743, and NAA (relating to SMD 3749, SMD 6338, SMD 6339) of the MA_diff table(s).

[1209] NAA Genes Identified by Correlation to Genes that Cause Physiological Consequences

[1210] Additionally, the differential expression data and the phenotypic observations can be merged to identify pathways or networks of NAA genes. A group in the MA_clust is considered a NAA pathway or network if the group comprises a cDNA ID that also appears in Knock-in or Knock-out tables that causes one or more of the phenotypes described in section above.

[1211] NAA Genes Identified by Amino Acid Sequence Similarity

[1212] NAA genes from other plant species typically encode polypeptides that share amino acid similarity to the sequences encoded by corn and Arabidopsis NAA genes. Groups of NAA genes are identified in the Protein Group table. In this table, any protein group that comprises a peptide ID that corresponds to a cDNA ID member of a NAA pathway or network is a group of proteins that also exhibits NAA functions/utilities.

[1213] Such Auxin responsive genes and gene products can function to either increase or dampen the above phenotypes or activities either in response to changes in Auxin concentration or in the absence of Auxin fluctuations. Further, promoters of Auxin responsive genes, as described in the Reference tables, for example, are useful to modulate transcription that is induced by Auxin or any of the following phenotypes or biological activities below.

[1214] III.C.2.a. Use of Auxin Responsive Genes, Gene Components and Products to Modulate Phenotypes

[1215] Auxin responsive genes and gene products are useful to or modulate one or more phenotypes including growth, apical dominance, vascular growth, roots, inhibition of primary root elongation, increased lateral root formation, stems, lateral buds, lateral branching, reduction of branching, for high density growth per acre, for increased wood production, lateral organ initiation and/or positioning in apical meristem, organ formation, for example, fruit number in tomatoes, leaves, height/stature, e.g., taller crops or increase wood production, regeneration and differentiation of cultured cells or plantlets, biomass, fresh and dry weight during any time in plant life, such as maturation; number of flowers; number of seeds; number of branches; number of leaves; starch content, seed yield, including number, size, weight, harvest index, starch content, fruit yield, number, size, weight, harvest index, starch content, development, orienting cell growth, establishment and maintenance of plant axis, apical dominance, cell plate placement, polarised growth, initiation and/or development, of embryos morphogenic progression, e.g., from early radial to late axialized torpedo stages, differentiation of cells into morphologically different cell layers, cotyledon separation, fruit development, abscission, leading to modulation of fruit drop, parthenocarpy, seedless crops resulting from lack of seed set, vascularization, e.g. hypocotyl and cotyledon tissues, genetic control of vascular patterning and influences its maturation; specification of the sites where vascular differentiation will occur; determination of the direction and extent of vascular tissue formation, maintenance of the continuity of vascular development with plant growth, tropic responses, gravitropic responses, e.g. affecting roots and shoots, and modulation of phototropic sensitivity, e.g. increase growth under a reduced light spectrum.

[1216] Further, any desired sequence can be transcribed in similar temporal, tissue, or environmentally specific patterns as the Auxin responsive genes when the desired sequence is operably linked to a promoter of an Auxin responsive gene.

[1217] To modulate any of the phenotype(s) above, activities of one or more of the Auxin response genes or gene products can be modulated and the plants can be tested by screening for the desired trait. Specifically, the gene, mRNA levels, or protein levels can be altered in a plant utilizing the procedures described herein and the phenotypes can be screened for variants as in Winkler et al. (1998) Plant Physiol 118: 743-50 and assayed, for example, in accordance with Bechtold and Pelletier (1998). Methods Mol. Biol. 82: 259-266; Clough and Bent (1998). 16: 735-743; Krysan et al. (1999). Plant Cell 11:2283-2290.

[1218] III.C.2.b. Use of Auxin Responsive Genes, Gene Components and Products to Biochemical Activities:

[1219] The activities of one or more of the Auxin responsive genes can be modulated to change biochemical or metabolic activities and/or pathways such as those noted below. Such biological activities are documented and can be measured according to the citations included in the Table below:

| | BIOCHEMICAL OR | |
|---|---|---|
| | METABOLIC ACTIVITIES | CITATIONS INCLUDING |
| PROCESS | AND/OR PATHWAYS | ASSAYS |
| Cell Growth and | Protein Ubiquitination | Gray et al. (1999) Genes and |
| Differentiation | | Develop, 13: 1678-1691 |
| | | Bechtold and Pelletier (1998). |
| | | Methods. Mol. Biol. 82: 259-266 |
| | Cell Wall loosening and | Catala et al. (2000). Plant Physiol. |
| | Expansion | 122: 527-534. |
| | | Cosgrove, D. (1993). New Phytol. |
| | | 124: 1-23. |
| Auxin/Cytokinin Ratio | Changing Auxin and/or | Chen et al. (1988). Plant Physiol. |
| | cytokinin synthesis and/or | 86: 822-825 |
| | turnover | Tam et al. (2000). Plant Physiol. |
| | | 123: 589-595 |
| | | Bartel and Fink. (1995). Science |
| | | 268: 1745-1748. |
| | | Prinsen et al. (1995). Quantifying |
| | | phytohormones in transformed |
| | | plants. In: Methods in Molecular |
| | | Biology. 44: 245-262. |
| Auxin Transport | Channeling of polar Auxin | Reed et al. (1998). Plant Physiol. |
| | Transport | 118: 1369-1378. |
| | | Estelle, M. (1998). Plant Cell |
| | | 10: 1775-1778 |
| | Auxin Efflux Between Cells | Reed et al. (1998). Plant Physiol. |
| | | 118: 1369-1378. |
| | | Marchant et al. (1999). EMBO J. |
| | | 18: 2066-2073. |
| | Auxin Influx In and Out of a | Reed et al. (1998). Plant Physiol. |
| | Cell | 118: 1369-1378. |
| | | Marchant et al. (1999). EMBO J. |
| | | 18: 2066-2073. |
| | Electogenic Proton Symport | Young et al. (1999). Biochim |
| | of Auxin | Biophys Acta. 1415(2): 306-22 |
| Signal Transduction | K+ Accumulation | Philippar et al. (1999). Proc. Natl. |
| | | Acad. Sci. 96: 12186-12191 |
| | Permeability of Cell | Marchant et al. (1999). EMBO J. |
| | Membranes | 18: 2066-2073. |
| | Guanine-Nucleotide | Steinmann et al. (1999). Science |
| | Exchange | 286: 316-318. |
| | | Peyroche et al. (1996). Nature |
| | | 384: 479-481. |
| | Protein Phosphorylation | Christensen et al. (2000). Cell |
| | | 100: 469-478. |
| | | Hirt (2000). Proc. Natl. Acad Sci. |
| | | 97: 2405-2407. |
| | Interaction with Ethylene | Madlung et al. (1999). Plant |
| | mode of action | Physiol. 120: 897-906. |
| | | Xu et al. (1998). Plant Physiol. |
| | | 118: 867-874. |
| Protein Turnover | Localization of Polypeptides | Grebe et al. (2000). Plant Cell. |
| | with the basal End of Cells | 12: 343-356 |

[1220] Other biological activities that can be modulated to by the Auxin responsive genes and their products are listed in the Reference Tables. Assays for detecting such biological activities are described in the Domain section of the Reference Tables.

[1221] Auxin responsive genes are characteristically differentially transcribed in response to fluctuating Auxin levels or concentrations, whether internal or external to an organism or cell. The MA_diff(s) report(s) the changes in transcript levels of various Auxin responsive genes in the aerial parts of a seedling at 1 and 6 hours after the seedling was sprayed with a solution enriched with Auxin as compared to aerial parts of a seedling sprayed with water.

[1222] The data from this time course can be used to identify a number of types of Auxin responsive genes and gene products, including “early responders,” and “delayed responders.” Profiles of these different classes of Auxin responsive genes are shown in the Table below together with examples of the kinds of associated biological activities.

| | | | EXAMPLES OF |
|---|---|---|---|
| | | | BIOCHEMICAL |
| TRANSCRIPT | TYPE OF | PHYSIOLOGICAL | ACTIVITY OF GENE |
| LEVEL | GENES | CONSEQUENCES | PRODUCTS |
| Upregulated | Early | Auxin perception | Transcription factors |
| transcripts | responders to | Auxin | Transporters; channeling |
| (level at 1 hr | Auxin | Uptake/transport | of polar Auxin transport |
| ≅6 hours) | | Modulation of | Kinases and |
| (level at 1 hr > 6 | | Auxin response | phosphatases; protein |
| hours) | | transduction | ubiqutination; guanine |
| | | pathways | nucelotide exchange; |
| | | Initiating | changing Auxin and/or |
| | | transcription of | cytokininin synthesis |
| | | specific gene(s) | and/or turnover; |
| | | Modification of cell | interaction with ethylene |
| | | walls | mode of action |
| | | Modification of cell | Auxin metabolic |
| | | structures | pathways |
| | | Modification of | Change in chromatin |
| | | metabolism | structure and/or DNA |
| | | | topology |
| | | | Transcriptional activators |
| | | | Change in activity of |
| | | | protein-protein |
| | | | interactions |
| | | | Cell wall and cell growth |
| | | | promoting pathways |
| | | | Change in activity of |
| | | | cytoskeletal proteins |
| | | | modulating cell structure |
| | | | Metabolic enzymes |
| | | | Coordination and control |
| | | | of central carbon and |
| | | | Auxin metabolism |
| Upregulated | “Delayed” | Completion and/or | Transcription factors |
| transcripts (level | Responders | Maintenance of | Changes in membrane |
| at 1 hr < 6 hr) | | Auxin response | protein, membrane channel |
| | | Initiating | and/or transporter protein |
| | | transcription of | activity |
| | | specific gene(s) | Change in chromatin |
| | | Modification of cell | structure and/or DNA |
| | | walls | topology |
| | | Modification of cell | Transcriptional activators |
| | | structures | Change in activity of |
| | | Modification of | protein-protein interactions |
| | | metabolism | Cell wall proteins |
| | | | Change(s) in activity of |
| | | | cytoskeletal proteins |
| | | | modulating cell structure |
| | | | Coordination and control of |
| | | | central carbon and Auxin |
| | | | metabolism |
| | | | metabolic enzymes |
| Downregulated | Early repressor | Repression of | Transcription factors |
| transcripts | responders to | Auxin induced | Changes in activity of |
| (level at 1 hour ≅ | Auxin | proteins released | cytoskeletal proteins |
| 6 hours) | Genes for | Reorientation of | modulating cell structure |
| (level at 1 hour > | pathways | metabolism in | Changes in chromatin |
| 6 hours) | diminished in | certain cells | structure and/or DNA |
| | presence of | | topology |
| | Auxin | | Changes in protein |
| | | | structure and/or function |
| | | | by phosphorylation |
| | | | (kinases) and/or |
| | | | dephosphorylation |
| | | | (phosphatases) |
| | | | Stability of factors for |
| | | | protein translation |
| | | | Changes in cell |
| | | | membrane structure |
| | | | Changes in chromatin |
| | | | and/or localized DNA |
| | | | topology |
| | | | Changes in protein- |
| | | | protein interaction |
| | | | Metabolic enzymes |
| Down-regulated | “Delayed” | Maintenance of | Transcription factors |
| transcripts | repressor | Auxin stimulated | Change in activity of |
| (level at 1 hour < | responders to | state(s) in certain | cytoskeletal proteins |
| 6 hours) | Auxin | cells | modulating cell structure |
| | Genes for | Reorientation of | Changes in chromatin |
| | pathways | metabolism in | structure and/or DNA |
| | diminished in | certain cells | topology |
| | presence of | | Changes in protein |
| | Auxin | | structure and/or function |
| | | | by phosphorylation |
| | | | (kinases) and/or |
| | | | dephosphorylation |
| | | | (phosphatases) |
| | | | Stability of factors for |
| | | | protein translation |
| | | | Changes in cell |
| | | | membrane structure |
| | | | Changes in chromatin |
| | | | and/or localized DNA topology |
| | | | Changes in protein- |
| | | | protein interaction |
| | | | Metabolic enzymes |

### Use of Promoters of NAA Responsive Genes

[1223] Promoters of NAA responsive genes are useful for transcription of any desired polynucleotide or plant or non-plant origin. Further, any desired sequence can be transcribed in a similar temporal, tissue, or environmentally specific patterns as the NAA responsive genes where the desired sequence is operably linked to a promoter of a NAA responsive gene. The protein product of such a polynucleotide is usually synthesized in the same cells, in response to the same stimuli as the protein product of the gene from which the promoter was derived. Such promoter are also useful to produce antisense mRNAs to down-regulate the product of proteins, or to produce sense mRNAs to down-regulate mRNAs via sense suppression.

[1224] III.C.3. Brassinosteroid Responsive Genes, Gene Components and Products:

[1225] Plant hormones are naturally occurring substances, effective in very small amounts, which act as signals to stimulate or inhibit growth or regulate developmental processes in plants. Brassinosteroids (BRs) are the most recently discovered, and least studied, class of plant hormones. The major physiological response affected by BRs is the longitudinal growth of young tissue via cell elongation and possibly cell division. Consequently, disruptions in BR metabolism, perception and activity frequently result in a dwarf phenotype. In addition, because BRs are derived from the sterol metabolic pathway, any perturbations to the sterol pathway can affect the BR pathway. In the same way, perturbations in the BR pathway can have effects on the later part of the sterol pathway and thus the sterol composition of membranes.

[1226] Changes in BR concentration in the surrounding environment or in contact with a plant result in modulation of many genes and gene products. Examples of such BR responsive genes and gene products are shown in the Reference and Sequence Tables. These genes and/or products are responsible for effects on traits such as plant biomass and seed yield. These genes were discovered and characterized from a much larger set of genes by experiments designed to find genes whose mRNA abundance changed in response to application of BRs to plants.

[1227] While BR responsive polynucleotides and gene products can act alone, combinations of these polynucleotides also affect growth and development. Useful combinations include different BR responsive polynucleotides and/or gene products that have similar transcription profiles or similar biological activities, and members of the same or functionally related biochemical pathways. Whole pathways or segments of pathways are controlled by transcription factors and proteins controlling the activity of signal transduction pathways. Therefore, manipulation of such protein levels is especially useful for altering phenotypes and biochemical activities of plants. In addition, the combination of a BR responsive polynucleotide and/or gene product with another environmentally responsive polynucleotide is useful because of the interactions that exist between hormone-regulated pathways, stress pathways, nutritional pathways and development. Here, in addition to polynucleotides having similar transcription profiles and/or biological activities, useful combinations include polynucleotides that may have different transcription profiles but which participate in common or overlapping pathways. The MA_diff Table(s) reports the transcript levels of the experiment (see EXPT ID: 108580, 108581, 108557, 108478, 108479, 108480, 108481). For transcripts that had higher levels in the samples than the control, a “+” is shown. A “−” is shown for when transcript levels were reduced in root tips as compared to the control. For more experimental detail see the Example section below.

[1228] BR genes are those sequences that showed differential expression as compared to controls, namely those sequences identified in the MA_diff tables with a “+” or “−” indication.

[1229] BR Genes Identified by Cluster Analyses of Differential Expression

[1230] BR Genes Identified by Correlation to Genes that are Differentially Expressed

[1231] As described above, the transcription profiles of genes that act together are well correlated. Applicants not only have identified the genes that are differentially expressed in the microarray experiments, but also have identified the genes that act in concert with them. The MA_clust table indicates groups of genes that have well correlated transcription profiles and therefore participate in the same pathway or network.

[1232] A pathway or network of BR genes is any group in the MA_clust that comprises a cDNA ID that also appears in Expt ID 108580, 108581, 108557, 108478, 108479, 108480, 108481 of the MA_diff table(s).

[1233] BR Genes Identified by Correlation to Genes that Cause Physiological Consequences

[1234] Additionally, the differential expression data and the phenotypic observations can be merged to identify pathways or networks of BR genes. A group in the MA_clust is considered a BR pathway or network if the group comprises a cDNA ID that also appears in Knock-in or Knock-out tables that causes one or more of the phenotypes described in section above.

[1235] BR Genes Identified by Amino Acid Sequence Similarity

[1236] BR genes from other plant species typically encode polypeptides that share amino acid similarity to the sequences encoded by corn and Arabidopsis BR genes. Groups of BR genes are identified in the Protein Group table. In this table, any protein group that comprises a peptide ID that corresponds to a cDNA ID member of a BR pathway or network is a group of proteins that also exhibits BR functions/utilities.

[1237] Such BR responsive genes and gene products can function to either increase or dampen the above phenotypes or activities either in response to changes in BR concentration or in the absence of BR fluctuations. Further, promoters of BR responsive genes, as described in the Reference tables, for example, are useful to modulate transcription that is induced by BR or any of the following phenotypes or biological activities below.

[1238] III.C.3.a. Use of Brassinosteroid Responsive Genes to Modulate Phenotypes

[1239] Brassinosteroid responsive genes and gene products are useful to modulate one or more phenotypes including growth (promotes cell elongation, elongation accelerated at low temperatures for increased plant growth in marginal lands, acts in concert with other hormones to promote cell division); roots (inhibitory to root growth, and expression in roots would inhibit bud breaking due to higher auxin:cytokinin ratio in epicotyl); stems (inhibits radial growth while causing stem elongation, in low concentrations, promotes radial expansion, and increases biomass); height; seeds; promotes cell expansion in embryo and thus enhances germination; leaves; increase biomass; flowers, increase reproduction; biomass; fresh and dry weight during any time in plant life, such as maturation; number of flowers; number of seeds; number of branches; number of leaves; starch content; seed yield (including number, size, weight, harvest index, starch content; fruit yield, number, size, weight, harvest index, and starch content); development; morphogenesis; control of organ size and shape; development of new ornamentals; control of leaf size and shape; promotes leaf unrolling and enlargement; for development of new leafy ornamentals; seed development; inhibition of de-etiolation; dormancy; accelerated germination at low temperatures; root; gravitropism; senescence; promoted in light grown plants; inhibiting synthesis or perception could extend life span of desired tissues/organs; differentiation; vascularization; promotes xylem differentiation; increases xylem fiber length; resistance responses; increases resistance to pathogens; and tropic responses.

[1240] Gravitropic Responses Affecting Roots

[1241] Further, any desired sequence can be transcribed in similar temporal, tissue, or environmentally specific patterns as the BR responsive genes when the desired sequence is operably linked to a promoter of a BR responsive gene.

[1242] To improve any of the desired phenotype(s) above, activities of one or more of the BR response genes or gene products can be modulated and the plants tested by screening for the desired trait. Specifically, the gene, mRNA levels, or protein levels can be altered in a plant utilizing the procedures described herein and the phenotypes can be assayed. As an example, a plant can be transformed according to Bechtold and Pelletier (1998, Methods. Mol. Biol. 82:259-266, and/or screened for variants as in Winkler et al. (1998) Plant Physiol 118: 743-50, visually inspected for the desired phenotype and metabolically and/or functionally assayed according to Choe et al. (1999, Plant Cell 11:207-21 and Plant Physiol 119: 897-907), Yamamoto et al. (1997, Plant Cell Physiol 38:980-3), Asami and Yshida (1999, Trends in Plant Sciences, 4:348-353) and Azpiroz et al. (1998, Plant Cell 10:219-230)

[1243] III.C.3.b. Use of Brassinosteroid Responsive Genes to Modulate Biochemical Activities

[1244] The activities of one or more of the BR responsive genes can be modulated to change biochemical or metabolic activities and/or pathways such as those noted below. Such biological activities are documented and can be measured according to the citations included in the Table below:

| | BIOCHEMICAL OR | CITATIONS |
|---|---|---|
| | METABOLIC ACTIVITIES | INCLUDING |
| PROCESS | AND/OR PATHWAYS | ASSAYS |
| BR Transport | BR Efflux Between Cells | B. Schulz and |
| | | K. Feldmann, unpub. |
| | | results |
| | BR Influx In And Out Of A | B. Schulz and K. |
| | Cell | Feldmann, unpub. |
| | | results |
| Signal | Permeability Of Cell | |
| Transduction | Membranes | |
| | Protein Phosphorylation | |
| Metabolism | Major Growth Coordinating | |
| | Pathways | |

[1245] Other biological activities that can be modulated by the BR responsive genes and gene products are listed in the Reference Tables. Assays for detecting such biological activities are described in the Domain section of the Reference Tables.

[1246] BR responsive genes are differentially transcribed in response to fluctuating BR levels or concentrations, whether internal or external to an organism or cell. The MA_diff table(s) report(s) the changes in transcript levels of various BR responsive genes in the aerial parts of a seedling at 1 and 6 hours after a plant was sprayed with a solution enriched with BR as compared to seedlings sprayed with water. The data from this time course can be used to identify a number of types of BR responsive genes and gene products, including “early responders,” “delayed responders.” Profiles of these different categories of BR responsive genes are shown in the Table below together with examples of the kinds of associated biological activities.

| | | | EXAMPLES OF |
|---|---|---|---|
| TRANSCRIPT | | PHYSIOLOGICAL | BIOCHEMICAL |
| LEVELS | TYPE OF GENES | CONSEQUENCES | ACTIVITY |
| Up Regulated | Early | BR Perception | Transcription |
| Transcripts | Responders To | | Factors |
| (Level At 1 Hr ≈ 6 Hr) | BR | BR Transport | Receptors |
| (Level At 1 Hr > 6 Hr) | | | Transporters |
| | | | Change In Cell |
| | | | Membrane Structure |
| | | BR Biosynthesis | Feedback Regulated |
| | | Feedback | Biosynthetic Genes |
| | | | Kinases And |
| | | | Phosphatases |
| | | Modulation Of | 2^{nd} Messengers, Eg., |
| | | BR Response | Calmodulin |
| | | Transduction | |
| | | Pathways | |
| | | Specific Gene | Transcription |
| | | Transcription | Activators |
| | | Initiation | Change In |
| | | | Chromatin Structure |
| | | | And/Or Localized |
| | | | DNA Topology |
| Up Regulated | Delayed | Maintenance Of | Transcription |
| Transcripts | Responders | Response To Br | Factors |
| (Level At 1 Hr < 6 Hr) | | | BR Biosynthetic |
| | | | Genes |
| | | | Specific Factors |
| | | | (Initiation And |
| | | | Elongation) For |
| | | | Protein Synthesis |
| | | | Maintenance Of |
| | | | Mrna Stability |
| | | | Maintenance Of |
| | | | Protein Stability |
| | | | Maintenance Of |
| | | | Protein-Protein |
| | | | Interaction |
| | | Cell And Organ | Cell Wall |
| | | Elongation | Elongation |
| | | Gravitropism | |
| Down-Regulated | Early Responder | Negative | Transcription |
| Transcripts | Repressors Of BR | Regulation Of | Factors |
| (Level At 1 Hr ≈ 6 Hr) | State Of Metabolism | BR Pathways | Change In Protein |
| (Level At 6 Hr > 1 Hr) | Genes With | Released | Structure By |
| | Discontinued | Changes In | Phosphorylation |
| | Expression Or | Pathways And | (Kinases) Or |
| | UnsTable Mrna In | Processes | Dephosphoryaltion |
| | Presence Of | Operating In | (Phosphatases) |
| | BR | Cells | Change In |
| | | | Chromatin Structure |
| | | | And/Or DNA |
| | | | Topology |
| Down-Regulated | Delayed | Negative | Transcription |
| Transcripts | Repressors Of | Regulation Of | Factors |
| (Level At 1 Hr > 6 Hr) | BR State Of | BR Pathways | Kinases And |
| | Metabolism | Released | Phosphatases |
| | Genes With | Maintenance Of | Stability Of Factors |
| | Discontinued | Pathways | For Protein |
| | Expression Or | Released From | Synthesis And |
| | UnsTable Mrna | Repression | Degradation |
| | In Presence Of | Changes In | |
| | BR | Pathways And | |
| | | Processes | |
| | | Operating In | |
| | | Cells | |

### Use of Promoters of BR Responsive Genes

[1247] Promoters of BR responsive genes are useful for transcription of any desired polynucleotide or plant or non-plant origin. Further, any desired sequence can be transcribed in a similar temporal, tissue, or environmentally specific patterns as the BR responsive genes where the desired sequence is operably linked to a promoter of a BR responsive gene. The protein product of such a polynucleotide is usually synthesized in the same cells, in response to the same stimuli as the protein product of the gene from which the promoter was derived. Such promoter are also useful to produce antisense mRNAs to down-regulate the product of proteins, or to produce sense mRNAs to down-regulate mRNAs via sense suppression.

[1248] III.C.4. Cytokinin Responsive Genes, Gene Components and Products

[1249] Plant hormones are naturally occurring substances, effective in very small amounts, which act as signals to stimulate or inhibit growth or regulate developmental processes in plants. Cytokinins (BA) are a group of hormones that are best known for their stimulatory effect on cell division, although they also participate in many other processes and pathways. All naturally occurring BAs are aminopurine derivatives, while nearly all synthetic compounds with BA activity are 6-substituted aminopurine derivatives. One of the most common synthetic BAs used in agriculture is benzylaminopurine (BAP).

[1250] Changes in BA concentration in the surrounding environment or in contact with a plant results in modulation of many genes and gene products. Examples of such BA responsive genes and gene products are shown in the Reference, Sequence, Protein Group, Protein Group Matrix tables, MA_diff and MA_clust. These genes and/or products are responsible for effects on traits such as plant vigor and seed yield. They were discovered and characterized from a much larger set by experiments designed to find genes whose mRNA products changed in response to application of BA to plants.

[1251] While cytokinin responsive polynucleotides and gene products can act alone, combinations of these polynucleotides also affect growth and development. Useful combinations include different BA responsive polynucleotides and/or gene products that have similar transcription profiles or similar biological activities, and members of the same or functionally related biochemical pathways. Whole pathways or segments of pathways are controlled by transcription factor proteins and proteins controlling the activity of signal transduction pathways. Therefore, manipulation of such protein levels is especially useful for altering phenotypes and biochemical activities of plants. In addition, the combination of a BA responsive polynucleotide and/or gene product with another environmentally responsive polynucleotide is also useful because of the interactions that exist between hormone-regulated pathways, stress pathways, nutritional pathways and development. Here, in addition to polynucleotides having similar transcription profiles and/or biological activities, useful combinations include polynucleotides that may have different transcription profiles but which participate in common or overlapping pathways. The MA_diff Table(s) reports the transcript levels of the experiment (see EXPT ID: 108566, 108567, 108517). For transcripts that had higher levels in the samples than the control, a “+” is shown. A “−” is shown for when transcript levels were reduced in root tips as compared to the control. For more experimental detail see the Example section below.

[1252] BA genes are those sequences that showed differential expression as compared to controls, namely those sequences identified in the MA_diff tables with a “+” or “−” indication.

[1253] BA Genes Identified by Cluster Analyses of Differential Expression

[1254] BA Genes Identified by Correlation to Genes that are Differentially Expressed

[1255] As described above, the transcription profiles of genes that act together are well correlated. Applicants not only have identified the genes that are differentially expressed in the microarray experiments, but also have identified the genes that act in concert with them. The MA_clust table indicates groups of genes that have well correlated transcription profiles and therefore participate in the same pathway or network.

[1256] A pathway or network of BA genes is any group in the MA_clust that comprises a cDNA ID that also appears in Expt ID 108566, 108567, 108517 of the MA_diff table(s).

[1257] BA Genes Identified by Correlation to Genes that Cause Physiological Consequences

[1258] Additionally, the differential expression data and the phenotypic observations can be merged to identify pathways or networks of BA genes. A group in the MA_clust is considered a BA pathway or network if the group comprises a cDNA ID that also appears in Knock-in or Knock-out tables that causes one or more of the phenotypes described in section above.

[1259] BA Genes Identified by Amino Acid Sequence Similarity

[1260] BA genes from other plant species typically encode polypeptides that share amino acid similarity to the sequences encoded by corn and Arabidopsis BA genes. Groups of BA genes are identified in the Protein Group table. In this table, any protein group that comprises a peptide ID that corresponds to a cDNA ID member of a BA pathway or network is a group of proteins that also exhibits BA functions/utilities.

[1261] Such BA responsive genes and gene products can function to either increase or dampen the above phenotypes or activities either in response to changes in BA concentration or in the absence of BA fluctuations.

[1262] Further, promoters of BA responsive genes, as described in the Reference tables, for example, are useful to modulate transcription that is induced by BA or any of the following phenotypes or biological activities below.

[1263] III.C.4.a. Use of Ba-Responsive Genes to Modulate Phenotypes

[1264] BA responsive genes and gene products are useful to or modulate one or more phenotypes including growth, roots (such as inhibition of elongation of root); stems (such as inhibition of elongation of hypocotyl); lateral buds (such as promotion of outgrowth for rapid production of multiple shoots as a source for grafting); leaves such as development (including cell growth, such as expansion of cotyledon and promotes cell enlargement for increased yield from leaf crops, chloroplast development such as delayed degradation of chloroplasts for increased photosynthesis and crop yield, cell division and senescence such as delays for delayed conversion from photosynthesis to salvage programs in leaves and for increased crop yield); differentiation such as regulation of morphogenesis for manipulating callus growth and shoot/root formation in culture; maintenance of shoot meristem such as for increased usable wood production, and reduced tiller number for denser crop planting regimes; nutrient metabolism for effects on seed size and effects on rate of seed set for increased seed yield; induction of ethylene biosynthesis for control of fruit ripening; and parthenocarpy for control of sexual reproduction and production of seedless fruits.

[1265] To regulate any of the phenotype(s) above, activities of one or more of the BA responsive genes or gene products can be modulated and the plants tested by screening for the desired trait. Specifically, the gene, mRNA levels, or protein levels can be altered in a plant utilizing the procedures described herein and the phenotypes can be assayed. As an example, a plant can be transformed according to Bechtold and Pelletier (1998, Methods. Mol. Biol. 82:259-266) and/or screened for variants as in Winkler et al. (1998) Plant Physiol 118: 743-50 and visually inspected for the desired phenotype or molecularly or metabolically or functionally assayed according to Lohman et al (1994, Physil. Plant 92:322-328), Woolhouse (1983, In Agricultural Research-Strategies of Plant reproduction, Meudt, ed., 201-236), Medford et al. (1989, Plant Cell 1: 403-13), Vogel et al. (1998, Genetics 149:417-27), Ehnes and Roitsch (1997, Plant J 1: 539-48), Rotino et al. (1997, Nat. Biotchnol. 15: 1398-1401).

[1266] III.C.4.b. Use of Ba-Responsive Genes to Modulate Biochemical Activities

[1267] The activities of one or more of the BA responsive genes can be modulated to change biochemical or metabolic activities and/or pathways such as those noted below. Such biological activities can be measured according to the citations included in the Table below:

| | BIOCHEMICAL OR | |
|---|---|---|
| | METABOLIC | |
| | ACTIVITIES AND/ | CITATIONS |
| PROCESS | OR PATHWAYS | INCLUDING ASSAYS |
| Chloroplast | Photosynthesis | Benkova et al (1999) Plant |
| Functioning | | Physil 121: 245-252 |
| Induction And | Cell Cycle Phase | Riou-Khamlichi et al. |
| Maintenance | Transition | (1999) Science 283: 1541-44 |
| Of Cell Division | | |
| Senescence | Cell Death/Apoptosis | Lohman et al. (1994) |
| | | Physiol Plant 92: 322-328 |
| Signal | Sensing Endogenous | Kakimoto (1996) Science |
| Transduction | Stimuli To Trigger | 274: 982-985 |
| | Growth And Shoot | |
| | Formation | |

[1268] Other biological activities that can be modulated by the BA responsive genes and gene products are listed in the Reference tables. Assays for detecting such biological activities are described in the Domain section above.

[1269] BA responsive genes are characteristically differentially transcribed in response to fluctuating BA levels or concentrations, whether internal or external to an organism or cell. The MA_diff table reports the changes in transcript levels of various BA responsive genes in the aerial parts of a seedling at 1 and 6 hours after a plant was sprayed with a Hoagland's solution enriched with BA as compared to seedlings sprayed with Hoagland's solution only.

[1270] The data from this time course can be used to identify a number of types of BA responsive genes and gene products, including “early responders,” and “delayed responders.” Profiles of these different BA responsive genes are shown in the Table below together with examples of the kinds of associated biological activities.

| GENE | FUNCTIONAL | TYPE OF | EXAMPLES OF |
|---|---|---|---|
| EXPRESSION | CATEGORY OF | BIOLOGICAL | BIOCHEMICAL |
| LEVELS | GENES | ACTIVITY | ACTIVITY |
| Up Regulated | Early | BA Perception | Transcription Factors |
| Transcripts | Responders To | BA Uptake | Transporters |
| (Level At 1 h ≅ 6 h) | BA | Modulation Of BA | Kinase, Receptor-Like |
| Or | | Response | Protein Kinase |
| (Higher At 1 h | | Transduction | |
| Than 6 h) | | Pathways | |
| | | Specific Gene | Ovule-Specific Homeotic |
| | | Transcription | Protein, Secretory |
| | | Initiation | Pathway |
| | | Initiate And | Cell Division Control |
| | | Coordinate Cell | Protein, Cyclins, Cyclin- |
| | | Division | Dependent Protein |
| | | | Kinase (Cdpk), Cell |
| | | | Cycle Phosphatases, |
| | | | Mitosis-Specific |
| | | | Chromosome |
| | | | Segregation Protein, |
| | | | Mitotic Phosphoprotein, |
| | | | Dna Replication Proteins, |
| | | | Helicase Telomerase, |
| | | | Centromere Protein, |
| | | | tRNA Synthase |
| | | Regulation Of | Senescence-Associated |
| | | Pathways To | Protein, Bifunctional |
| | | Senescence | Nuclease, Aba Pathway |
| | | | Genes, Ethylene Pathway |
| | | | Genes, Proteases, |
| | | | Nucleases, Pcd Genes |
| | | Modulation Of | Calvin Cycle, |
| | | Chloroplast Gene | Chlorophyll A/B Binding |
| | | Expression And | Protein (Cab), |
| | | Photosysthesis | Transketolase, |
| | | | Lipoxygenase, |
| | | | Chloroplast Rna |
| | | | Processing Protein, |
| | | | Chloroplast Envelope |
| | | | Membrane Protein. |
| | | Modulation Of | Glutamate Synthase, |
| | | Photorespiration And | Gogat, Asparagine |
| | | Primary Nitrogen | Synthase, Catalase, |
| | | Assimilation In | Peroxidase |
| | | Leaves | |
| | | Expression | |
| | | Stress Response | Heat Shock Proteins, |
| | | | Gst |
| | | Wax Biosynthesis | Fatty Acid Elongase- |
| | | | Like Protein, Very-Long- |
| | | | Chain Fatty Acid |
| | | | Condensing Enzyme, Coa |
| | | | Synthase |
| | | Nutrient Metabolism | Vicilin Storage Protein |
| | | Embryogenesis | Homeobox Domain |
| | | | Proteins |
| | | Glycolysis, | Mutase, |
| | | Gluconeogenesis | Phosphoglycerate Mutase |
| | | Ripening | Pectate Lyase, Ethylene |
| | | | Pathway Genes |
| Upregulated | BA Late | BA Responsive | Transfactors, Kinases, |
| Transcripts | Responders | Pathways | Phosphatases, LRR's, |
| (Higher At 6 h | | | Dna Remodelling |
| Than 1 h) | | | Proteins, Cu-Binding |
| | | | Proteins |
| | | Cell Wall Extension | Expansins, Extensins, |
| | | | Proline Rich Proteins |
| | | Organogenesis | AP2 Domain Containing |
| | | | Proteins |
| | | Modulate Activation | Transfactors Interacting |
| | | Of Disease Defense | With Resistant Genes |
| | | Genes | |
| | | Modulate Responses | Glycin-Rich Proteins, |
| | | To External Stimuli | Wall-Associated |
| | | | Receptor Kinase (Wak) |
| | | Osmotic Stress | Proline Oxidase |
| | | Tolerance | |
| Down-Regulated | Repressors Of BA | Regulation Of | Transfactors (Such As |
| Transcripts (Low | Pathway | Senescence-Related | Zinc-Finger Type), |
| At Both 1 h and | | Gene Expression | Kinases, Phosphatases, |
| 6 h) | | | G-Proteins, LRR |
| | | | Proteins, DNA |
| | | | Remodeling Protein |
| | | | Carbonyl Reductases |
| | | Regulation Of Genes | Atpases |
| | | Involved In | Oxygenase |
| | | Maintenance Of | Octaprenyltransferase |
| | | Apical Dominance. | Auxin Pathway Genes |
| | | | Auxin Binding Proteins |

[1271] Further, any desired sequence can be transcribed in similar temporal, tissue, or environmentally specific patterns as the BA responsive genes when the desired sequence is operably linked to a promoter of a BA responsive gene.

[1272] III.C.5. Gibberellic Acid Responsive Genes, Gene Components and Products

[1273] Plant hormones are naturally occurring substances, effective in very small amounts, which act as signals to stimulate or inhibit growth or regulate developmental processes in plants. Gibberellic acid (GA) is a hormone in vascular plants that is synthesized in proplastids (giving rise to chloroplasts or leucoplasts) and vascular tissues. The major physiological responses affected by GA are seed germination, stem elongation, flower induction, anther development and seed and pericarp growth. GA is similar to Auxins, cytokinins and gibberellins, in that they are principally growth promoters.

[1274] Changes in GA concentration in the surrounding environment or in contact with a plant result in modulation of many genes and gene products. Examples of such GA responsive genes and gene products are shown in the Reference and Sequence Tables. These genes and/or products are responsible for effects on traits such as plant vigor and biomass and seed yield. They were discovered and characterized from a much larger set of genes by experiments designed to find genes whose mRNA products changed in concentration in response to application of nitrogen to plants.

[1275] While GA responsive polynucleotides and gene products can act alone, combinations of these polynucleotides also affect growth and development. Useful combinations include different GA responsive polynucleotides and/or gene products that have similar transcription profiles or similar biological activities, and members of the same or similar biochemical pathways. Whole pathways and/or segments of pathways are controlled by transcription factors and proteins that affect the activity of signal transduction pathways. Therefore, manipulation of such protein levels is especially useful for altering phenotypes and biochemical activities of plants. In addition, the combination of a GA responsive polynucleotide and/or gene product with another environmentally responsive polynucleotide is also useful because of the interactions that exist between hormone-regulated pathways, stress pathways, nutritional pathways and development. Here, in addition to polynucleotides having similar transcription profiles and/or biological activities, useful combinations include polynucleotides that may have different transcription profiles but which participate in common overlapping pathways. The MA_diff Table(s) reports the transcript levels of the experiment (see EXPT ID: 108562, 108563, 108519, 108520, 108521, 108484, 108485, 108486). For transcripts that had higher levels in the samples than the control, a “+” is shown. A “−” is shown for when transcript levels were reduced in root tips as compared to the control. For more experimental detail see the Example section below.

[1276] GA genes are those sequences that showed differential expression as compared to controls, namely those sequences identified in the MA_diff tables with a “+” or “−” indication.

[1277] GA Genes Identified by Cluster Analyses of Differential Expression

[1278] GA Genes Identified by Correlation to Genes that are Differentially Expressed

[1279] As described above, the transcription profiles of genes that act together are well correlated. Applicants not only have identified the genes that are differentially expressed in the microarray experiments, but also have identified the genes that act in concert with them. The MA_clust table indicates groups of genes that have well correlated transcription profiles and therefore participate in the same pathway or network.

[1280] A pathway or network of GA genes is any group in the MA_clust that comprises a cDNA ID that also appears in Expt ID 108562, 108563, 108519, 108520, 108521, 108484, 108485, 108486 of the MA_diff table(s).

[1281] GA Genes Identified by Correlation to Genes that Cause Physiological Consequences

[1282] Additionally, the differential expression data and the phenotypic observations can be merged to identify pathways or networks of GA genes. A group in the MA_clust is considered a GA pathway or network if the group comprises a cDNA ID that also appears in Knock-in or Knock-out tables that causes one or more of the phenotypes described in section above.

[1283] GA Genes Identified by Amino Acid Sequence Similarity

[1284] GA genes from other plant species typically encode polypeptides that share amino acid similarity to the sequences encoded by corn and Arabidopsis GA genes. Groups of GA genes are identified in the Protein Group table. In this table, any protein group that comprises a peptide ID that corresponds to a cDNA ID member of a GA pathway or network is a group of proteins that also exhibits GA functions/utilities.

[1285] Such GA responsive genes and gene products can function to either increase or dampen the above phenotypes or activities either in response to changes in GA concentration or in the absence of GA fluctuations. Further, promoters of GA responsive genes, as described in the Reference tables, for example, are useful to modulate transcription that is induced by GA or any of the following phenotypes or biological activities below.

[1286] III.C.5.a. Use of GA Responsive Genes to Modulate Phenotypes:

[1287] GA responsive genes and gene products are useful to or modulate one or more phenotypes including growth, promotes root growth, promotes cell division, promotes stem elongation, secondary (woody) growth, promotes growth in leaves, biomass, increase in stem and leaf mass, increase in xylem fiber length and biomass production, development, cell growth, fruit development, seed development, dormancy, breaks dormancy in seeds and buds, promotes trichome formation, decrease senescence, regulation of fertility, stress responses, and flowering time.

[1288] Further, any desired sequence can be transcribed in similar temporal, tissue, or environmentally specific patterns as the GA responsive genes when the desired sequence is operably linked to a promoter of a GA responsive gene.

[1289] To regulate any of the phenotype(s) above, activities of one or more of the GA response genes or gene products can be modulated and tested by screening for the desired trait. Specifically, the gene, mRNA levels, or protein levels can be altered in a plant utilizing the procedures described herein and the phenotypes can be assayed. As an example, a plant can be transformed according to Bechtold and Pelletier (1998, Methods. Mol. Biol. 82:259-266) and visually inspected for the desired phenotype or metabolically and/or functionally assayed according to Hedden and Proebsting (1999, Plant Physiol. 119:365-370), Hedden and Phillips (1999, Current Opinion in Plant Biotech. 11:130-137), Perazza et al (1998, Plant Physiol. 117:375-383), Kende and Zeevart (1997, Plant Cell 9:1197-1210) and van der Knaap et al. (2000, Plant Physiol. 122:695-704).

[1290] III.C.5.b. Use of GA-Responsive Genes to Modulate Biochemical Activities:

[1291] The activities of one or more of the GA responsive genes can be modulated to change biochemical or metabolic activities and/or pathways such as those noted below. Such biological activities can be measured according to the citations included in the Table below:

| | BIOCHEMICAL OR | |
|---|---|---|
| | METABOLIC | |
| | ACTIVITIES | CITATIONS INCLUDING |
| PROCESS | AND/OR PATHWAYS | ASSAYS |
| Cell Growth | Biosynthesis of Gas | Hedden and Proebsting |
| and | Cell wall loosening and | (1999, Plant Physiol. |
| Differentiation | cell expansion | 119: 365-370) |
| | GA deactivation | Cosgrove (1993, New |
| | Major growth promoting | Phytol. 124: 1-23) |
| | metabolic pathways | Hedden and Proebsting |
| | | (1999, Plant Physiol. |
| | | 119: 365-370) |
| Perception | Receptors | Koornneef and van der Veen |
| and Signal | | (1980, TAG 58: 257-263) |
| Transduction | | |
| | Synthesis of | Bethke and Jones (1998, |
| | transcriptional regulators | Curr. Opin. Plant Biol. |
| | Calcium and Calmodulin | 1: 440-446) |

[1292] Other biological activities that can be modulated by the GA responsive genes and gene products are listed in the Reference Tables. Assays for detecting such biological activities are described in the Protein Domain table.

[1293] GA responsive genes are characteristically differentially transcribed in response to fluctuating GA levels or concentrations, whether internal or external to an organism or cell. The MA_diff table(s) report(s) the changes in transcript levels of various GA responsive genes in entire seedlings at 1 and 6 hours after a plant was sprayed with a Hoagland's solution enriched with GA as compared to seedlings sprayed with Hoagland's solution only.

[1294] The data from this time course can be used to identify a number of types of GA responsive genes and gene products, including “early responders,” and “delayed responders.” Profiles of some GA responsive genes are shown in the Table below with examples of associated biological activities.

| | | | EXAMPLES OF |
|---|---|---|---|
| TRANSCRIPT | | PHYSIOLOGICAL | BIOCHEMICAL |
| LEVELS | TYPE OF GENES | CONSEQUENCES | ACTIVITY |
| Up regulated | Early responders to | GA perception | Transcription factors |
| transcripts | GA | GA transport | Transporters |
| (level at 1 hr ≈ 6 hr) | Genes induced by | Modulation of GA | Change in cell |
| (level at 1 hr > 6 hr) | GA | response | membrane structure |
| | | transduction | Kinases and |
| | | pathways | phosphatases |
| | | Specific gene | Transcription activators |
| | | transcription | Change in chromatin |
| | | initiation | structure and/or |
| | | Growth stimulating | localized DNA topology |
| | | pathway induction | Cell wall proteins |
| | | | Metabolic Enzymes |
| Up regulated | Maintenance of GA | Maintenance of | Transcription factors |
| transcripts | response | response to GA | Specific factors |
| (level at 1 hr < 6 hr) | “Delayed” responders | Induction of GA | (initiation and |
| | | metabolic pathways | elongation) for protein |
| | | | synthesis |
| | | | Maintenance of mRNA |
| | | | stability |
| | | | Metabolic enzymes |
| Down-regulated | Early repressor | Negative regulation | Transcription factors |
| transcripts | responders to GA | of GA pathways | Calmodulin |
| (level at 1 hr ≈ 6 hr) | Genes repressed by | released | Change in protein |
| (level at 6 hr > 1 hr) | GA | Reduced activity of | structure by phosphorylation |
| | Genes whose | repressed pathways | (kinases) or |
| | activities are | | dephosphoryaltion |
| | diminished or | | (phosphatases) |
| | mRNAs are unsTable | | Change in chromatin |
| | in the presence of GA | | structure and/or DNA |
| | | | topology |
| Down-regulated | Delayed responders | Maintenance or GA | Transcription factors |
| transcripts | Genes repressed by | repressed pathways | Kinases and |
| (level at 1 hr > 6 hr) | GA | | phosphatases |
| | Genes whose | | Stability factors for |
| | activities are | | protein translation |
| | diminished or | | Metabolic enzymes |
| | mRNAs are unsTable | | |
| | in the presence of GA | | |

### Use of Promoters of GA Responsive Genes

[1295] Promoters of GA responsive genes are useful for transcription of any desired polynucleotide or plant or non-plant origin. Further, any desired sequence can be transcribed in a similar temporal, tissue, or environmentally specific patterns as the GA responsive genes where the desired sequence is operably linked to a promoter of a GA responsive gene. The protein product of such a polynucleotide is usually synthesized in the same cells, in response to the same stimuli as the protein product of the gene from which the promoter was derived. Such promoter are also useful to produce antisense mRNAs to down-regulate the product of proteins, or to produce sense mRNAs to down-regulate mRNAs via sense suppression.

[1296] III.D. Metabolism Affecting Genes, Gene Components and Products

[1297] III.D.1. Nitrogen Responsive Genes, Gene Components and Products

[1298] Nitrogen is often the rate-limiting element in plant growth, and all field crops have a fundamental dependence on exogenous nitrogen sources. Nitrogenous fertilizer which is usually supplied as ammonium nitrate, potassium nitrate, or urea, typically accounts for 40% of the costs associated with crops, such as corn and wheat in intensive agriculture. Increased efficiency of nitrogen use by plants should enable the production of higher yields with existing fertilizer inputs and/or enable existing yields of crops to be obtained with lower fertilizer input, or better yields on soils of poorer quality. Also, higher amounts of proteins in the crops could also be produced more cost-effectively.

[1299] Changes in nitrogen concentration in the surrounding environment or in contact with a plant results in modulation of the activities of many genes and hence levels of gene products. Examples of such “nitrogen responsive” genes and gene products with these properties are shown in the Reference, Sequence, Protein Group, Protein Group Matrix tables, MA_diff, MA_clust, Knock-in and Knock-out tables. These genes and/or products are responsible for effects on traits such as plant vigor and seed yield. They were discovered and characterized from a much larger set by experiments designed to find genes whose mRNA products changed in response to changing levels of available nitrogen to plants.

[1300] Manipulation of one or more “nitrogen responsive” gene activities is useful to modulate the biological activities and/or phenotypes listed below. “Nitrogen responsive” genes and gene products can act alone or in combination. Useful combinations include nitrogen responsive genes and/or gene products with similar transcription profiles, similar biological activities, or members of the same or functionally related biochemical pathways. Whole pathways or segments of pathways are controlled by transcription factor proteins and proteins controlling the activity of signal transduction pathways. Therefore, manipulation of the levels of such proteins is especially useful for altering phenotypes and biochemical activities of plants. The MA_diff Table(s) reports the transcript levels of the experiment (see EXPT ID: 108592, 108593, 108588, 108589, 108590, 108591, 108532, 108548, 108549, 108550, 108551, 108454, 108455, 108487, 108488, 108489, and Nitrogen (relating to SMD 3787, SMD 3789)). For transcripts that had higher levels in the samples than the control, a “+” is shown. A “−” is shown for when transcript levels were reduced in root tips as compared to the control. For more experimental detail see the Example section below.

[1301] Nitrogen genes are those sequences that showed differential expression as compared to controls, namely those sequences identified in the MA_diff tables with a “+” or “−” indication.

[1302] Nitrogen Genes Identified by Cluster Analyses of Differential Expression

[1303] Nitrogen Genes Identified by Correlation to Genes that are Differentially Expressed

[1304] As described above, the transcription profiles of genes that act together are well correlated. Applicants not only have identified the genes that are differentially expressed in the microarray experiments, but also have identified the genes that act in concert with them. The MA_clust table indicates groups of genes that have well correlated transcription profiles and therefore participate in the same pathway or network.

[1305] A pathway or network of Nitrogen genes is any group in the MA_clust that comprises a cDNA ID that also appears in Expt ID 108592, 108593, 108588, 108589, 108590, 108591, 108532, 108548, 108549, 108550, 108551, 108454, 108455, 108487, 108488, 108489, and Nitrogen (relating to SMD 3787, SMD 3789) of the MA_diff table(s).

[1306] Nitrogen Genes Identified by Correlation to Genes that Cause Physiological Consequences

[1307] Additionally, the differential expression data and the phenotypic observations can be merged to identify pathways or networks of Nitrogen genes. A group in the MA_clust is considered a Nitrogen pathway or network if the group comprises a cDNA ID that also appears in Knock-in or Knock-out tables that causes one or more of the phenotypes described in section above.

[1308] Nitrogen Genes Identified by Amino Acid Sequence Similarity

[1309] Nitrogen genes from other plant species typically encode polypeptides that share amino acid similarity to the sequences encoded by corn and Arabidopsis Nitrogen genes. Groups of Nitrogen genes are identified in the Protein Group table. In this table, any protein group that comprises a peptide ID that corresponds to a cDNA ID member of a Nitrogen pathway or network is a group of proteins that also exhibits Nitrogen functions/utilities.

[1310] Such “nitrogen responsive” genes and gene products can function either to either increase or dampen the phenotypes and activities below, either in response to changes in nitrogen concentration or in the absence of nitrogen fluctuations.

[1311] Further, promoters of nitrogen responsive genes, as described in the Reference tables, for example, are useful to modulate transcription that is induced by nitrogen or any of the following phenotypes or biological activities below.

[1312] III.D.5.a. Use of Nitrogen-Responsive Genes to Modulate Phenotypes

[1313] “Nitrogen responsive” genes and gene products can be used to alter or modulate one or more phenotypes including plant development, initiation of the reproduction cycle from a vegetative state (such as flower development time and time to fruit maturity); root development and initiation (such as root branching, lateral root, initiation and/or development, nodule formation and nitrogen assimilation from any nitrogen-fixing symbions), growth rate, whole plant (including height, flowering time, etc.), organs (such as flowers, fruits, stems, leaves, roots, and lateral roots), biomass (such as fresh and dry weight during any time in plant life, such as maturation); number, size, and weight of flowers; seeds; branches, and leaves); total plant nitrogen content, amino acid/protein content of whole plant or parts, seed yield (such as number, size, weight, harvest index and content and composition, e.g., amino acid, nitrogen, oil, protein, and carbohydrate) and fruit yield (such as number, size, weight, harvest index, content and composition, e.g., amino acid, nitrogen, oil, protein, carbohydrate, and water.

[1314] To regulate any of the phenotype(s) above, activities of one or more of the nitrogen responsive genes or gene products can be modulated and the plants can be tested by screening for the desired trait. Specifically, the gene, mRNA levels, or protein levels can be altered in a plant utilizing the procedures described herein and the phenotypes can be screened for variants as in Winkler et al. (1998) Plant Physiol 118: 743-50 and assayed, for example, in accordance to Zhang (1999) Proc. Natl. Acad. Sci. 96(11): 6529-34; or Zhang and Forde (1998) Science 279(5349):407-9; Scheible, W., Lauerer, M., Schultze, E.-D., Caboche, M., and Sitt, M. (1997). Plant J. 11, 671-691; Chevalier C, Bourgeois E, Just D, Raymond P. Plant J. 1996 January; 9(1):1-11.

[1315] III.D.5.b. Use of Nitrogen-Responsive Genes to Modulate Biochemical Activities

[1316] The activities of one or more of the nitrogen responsive genes can be modulated to change biochemical or metabolic activities and/or pathways such as those noted below. Such biological activities are documented and can be measured according to the citations included in the Table below:

| | Biochemical Or Metabolic | |
|---|---|---|
| Process | Activities And/Or Pathways | Citations including assays |
| Nitrate And Ammonium | NO₃⁻ Influx And Efflux | Lejay et al. (1999) Plant J. 18(5): |
| Uptake and Assimilation | | 509-519 |
| | Nitrate Channels | Liu et al. (1999) Plant Cell 11: 865-874; |
| | | and |
| | | Wang et al.(1998) Proc. Natl. Acad. |
| | | Sci. USA 95: 15134-15139 |
| | Changes In Membrane- | Meharg et al. (1995) J. Membr. |
| | Potential | Biol. 145: 49-66; and |
| | | Wang et al. (1998), supra |
| Amino Acid Synthesis | Glutamine Synthesis And | Coruzzi et al. U.S. Pat. No. |
| | Then Biosynthesis Of Other | 5,955,651; and |
| | Amino Acids | Oliveira et al. (1999) Plant. Phys. |
| | | 121: 301-309 |
| | Asparagine Synthesis And | LAM ET AL. (1998) PLANT J. |
| | Then Biosynthesis Of Other | 16(3): 345-353 |
| | Amino Acids | |
| Coordination Of Carbon | Light-Regulation Of Major | Lam et al. (1998), supra; |
| And Nitrogen Metabolism | Central Carbon And | Lejay et al. (1999), supra; and |
| | Nitrogen Metabolic | Oliveira et al. (1999), supra |
| | Pathways To Coordinate | |
| | Growth | |
| | Carbohydrate And Nitrogen | Lam et al. (1998) supra; |
| | Control Of Carbohydrate | Lejay et al. (1999) supra; and |
| | And Organic Nitrogen | Oliveira et al. (1999) supra |
| | Accumulation Pathways | |
| Nitrogen Loading And | Nitrogen Transport From | Walker et al. (1999) 210(1): 9-18 |
| Unloading | Source To Sinks | Elsheikh et al. (1997) |
| | | 51(2): 137-44. |
| Nitrogen Storage | Accumulation Of Amino | Johnson et al. (1990) Plant Cell |
| | Acids And/Or Storage | 2(6): 525-32. |
| | Proteins In Vacuoles | Herman and Larkins (1999) Plant |
| | | Cell. 11(4): 601-14. |
| Ammonium | Plastid Ammonium | Crawford (1995) Plant Cell |
| Detoxification | Storage/Glutamine | 7(7): 859-68. |
| | Synthesis | Zhang and Forde (1998) Science |
| | | 279: 407-409. |
| Cell Growth | DIVISION AND/OR | Zhang and Forde (1998) Science |
| | ELONGATION | 279: 407-409. |
| | | Coruzzi et al. U.S. Pat. No. |
| | | 5,955,651 |

[1317] Other biological activities that can be modulated by the nitrogen responsive genes and their products are listed in the Reference tables. Assays for detecting such biological activities are described in the Domain section above.

[1318] Nitrogen responsive genes are characteristically differentially transcribed in response to fluctuating nitrogen levels or concentrations, whether internal or external to an organism or cell. The MA_diff table reports the changes in transcript levels of various nitrogen responsive genes in the aerial parts of a seedling at 2, 6, 9 and 12 hours after a plant was sprayed with a solution enriched with ammonium nitrate as compared to seedlings sprayed with water. The MA_diff reports the changes in transcript levels of various nitrogen responsive genes in roots at 12 and 24 hours that were cut from seedlings transferred from a high to low potassium nitrate environment compared to control seedlings transferred to a high potassium nitrate environment.

[1319] The data from this time course reveal a number of types of nitrogen responsive genes and gene products, including “early responders,” and “delayed nitrogen responders”. Profiles of the individual categories of nitrogen responsive genes are shown in the Tables below together with examples of the kinds of associated biological activities that are modulated when the activities of one or more such genes vary in plants.

### Low to High Ammonium Nitrate Experiment

| | Functional | | |
|---|---|---|---|
| Gene Expression | Category Of | Physiological | |
| Levels | Gene | Consequences | Examples Of Gene Products |
| Upregulated | Early | Perception Of | Transcription Factors |
| Transcripts | Responders To | Nitrogen | Transporters |
| (Level At 2 h ≅ 6, | Nitrogen | Induced Nitrogen | Inhibitors Of Nitrogen |
| 9 Or 12 h) Or | | Uptake Into Cells | Fixation |
| (Level At 2 h > 6, | | Induction Of Nitrogen | Components Of Pathways |
| 9 Or 12 h) | | Response Transduction | Released From Repression |
| | | Pathways | Transaminases |
| | | Initiation Of Specific | Amino Acid Biosynthetic |
| | | Gene Transcription | Enzymes |
| Upregulated | Delayed | Maintenance Of High | Nitrogen Metabolic |
| Transcripts | Nitrogen | Nitrogen Metabolism | Pathway Enzymes |
| (Level At 2 h < 6, | Responders | And Growth | Transaminases |
| 9, Or 12 h | | | Amino Acid Biosynthetic |
| | | | Enzymes |
| | | | Factors Induced In |
| | | | Coordination And Control |
| | | | Of Central Carbon And |
| | | | Nitrogen Metabolism |
| | | | Cell Wall And Cell |
| | | | Growth-Promoting |
| | | | Pathway Enzymes |
| | | | Storage Proteins |
| Down Regulated | Early | Negative Regulation | Transcription Factors |
| Transcripts | Responder | Of Nitrogen Utilization | Kinases And Phosphatases |
| (Level At 2 h ≅ 6, | Repressors Of | Pathways Released | Cytoskeletal Proteins |
| 9 Or 12 h) Or | Nitrogen | | Modulating Cell Structure |
| (Level At 6, 9 Or | Utilization | Pathways Of C And N | Chromatin Structure |
| 12 h > 2 h) | Pathways | Metabolism Required | Regulatory Proteins |
| | Genes With | At Lower Levels | Metabolic Enzymes |
| | Discontinued | Decline In Presence Of | Transporters |
| | Expression Or | High Nitrogen | Proteins And Rna |
| | UnsTable Mrna | | Turnover Systems |
| | Following | | |
| | Nitrogen | | |
| | Uptake | | |
| Level At 2 Hours > | Delayed | Negative Regulation | Transcription Factors |
| 6, 9 Or 12 Hours | Response | Of Nitrogen Utilization | Kinases And Phosphatases |
| | Repressors Of | Pathways Released | Cytoskeletal Proteins |
| | Nitrogen | | Modulating Cell Structure |
| | Utilization | Pathways Of C And N | Chromatin Structure |
| | Pathways | Metabolism Required | Regulatory Proteins |
| | Genes With | At Lower Levels | Metabolic Enzymes |
| | Discontinued | Decline In Presence Of | Transporters |
| | Expression Or | High Nitrogen | Protein And Rna Turnover |
| | UnsTable Mrna | | Systems |
| | Following | | |
| | Nitrogen | | |
| | Uptake | | |

### High to Low Potassium Nitrate Experiment

| | | | Examples Of Biochemical |
|---|---|---|---|
| Gene Expression | Functional | Type Of Biological | Activities Of Gene |
| Levels | Category Of Gene | Activity | Products |
| Upregulated | Early Responders | Perception Of Low | Transcription Factors - |
| Transcripts (Level | To Low Nitrate | Nitrate | Controlling Transcription |
| At 12 h~ 24 h) | | Nitrogen Uptake Into | Transporters - Facilitating |
| (Level At | | Cells | Transport |
| 12 h > 24 h) | | Low Nitrogen Signal | Cell Wall/Membrane |
| | | Transduction Response | Structure Determining |
| | | Pathways | Proteins |
| | | Initiation Of Specific | Kinases And |
| | | Gene Transcription | Phosphatases- |
| | | Initiation Of Nitrogen | Regulating Signal |
| | | Fixation | Transduction Pathways |
| | | | Cytoskeletal |
| | | | Proteins-Modulating Cell |
| | | | Structure |
| | | | Chromatin |
| | | | Structure And/Or Dna |
| | | | Topology Proteins |
| | | | Protein-Protein Interaction |
| | | | Participants |
| | | | Metabolic Enzymes- |
| | | | Nitrogen Turnover Enzymes |
| | | | And Pathway Components |
| Upregulated | Delayed Low | Maintenance Of Low | Transcription Factors - |
| Transcripts | Nitrate | Nitrogen Response | Controlling Transcription |
| (Level 12 h < 24 h) | Responders | Pathways (See the Table | Transporters - Facilitating |
| | | Above) | Transport |
| | | | Cell Wall/Membrane |
| | | | Structure Determining |
| | | | Proteins |
| | | | Kinases And |
| | | | Phosphatases- |
| | | | Regulating Signal |
| | | | Transduction Pathways |
| | | | Cytoskeletal |
| | | | Proteins-Modulating Cell |
| | | | Structure |
| | | | Chromatin |
| | | | Structure And/Or Dna |
| | | | Topology Proteins |
| | | | Protein-Protein Interaction |
| | | | Participants |
| | | | Metabolic Enzymes- |
| | | | Nitrogen Turnover Enzymes |
| | | | And Pathway Components |
| Down-Regulated | Early Repressor | Negative Regulation Of | Transcription Factors |
| Transcripts (Level | Responders To | Low Nitrogen-Mediated | Cell |
| At 12 h~24 h) | Low Nitrate | Pathways And/Or | Wall/Membrane Structure |
| (Level At | Genes Whose | Responses Released | Determining Proteins |
| 12 h > 24 h) | Expression Is | Pathways In C And N | Factors For |
| | Discontinued Or | Metabolism Required At | Promoting Protein |
| | Mrna Is UnsTable | Lower Levels Decline In | Translation |
| | In Presence Of | The Presence Of Low | Kinases And |
| | Low Nitrate | Nitrate | Phosphatases |
| | | | Cytoskeletal Proteins- |
| | | | Modulating Cell Structure |
| | | | Protein And Rna Turnover |
| | | | Systems |
| Down-Regulated | Delayed | Negative Regulation Of | Transcription Factors |
| Transcripts | Repressor | Low Nitrogen-Mediated | Cell |
| (Level At | Responders To | Pathways And/Or | Wall/Membrane Structure |
| 12 h < 24 h) | Low Nitrate | Responses Released | Determining Proteins |
| | Genes Whose | Pathways In C And N | Factors For |
| | Expression Is | Metabolism Required At | Promoting Protein |
| | Discontinued Or | Lower Levels Decline In | Translation |
| | mRNA Is | The Presence Of Low | Kinases And |
| | UnsTable In | Nitrate | Phosphatases |
| | Presence Of Low | | Cytoskeletal Proteins- |
| | Nitrate | | Modulating Cell Structure |
| | | | Protein And Rna Turnover |
| | | | Systems |
| | | | Chromatin Structure |
| | | | And/Or Dna Topology |
| | | | Proteins |

[1322] Further, any desired sequence can be transcribed in similar temporal, tissue, or environmentally specific patterns as the nitrogen responsive genes when the desired sequence is operably linked to a promoter of a nitrogen responsive gene.

[1323] III.D.2. Circadian Rhythm (Clock) Responsive Genes, Gene Components and Products

[1324] Often growth and yield are limited by the ability of a plant to tolerate stress conditions, including water loss. To combat such conditions, plant cells deploy a battery of responses that are controlled by an internal circadian clock, including the timed movement of cotyledons and leaves, timed movements in guard cells in stomata, and timed biochemical activities involved with sugar and nitrogen metabolism. These responses depend on the functioning of an internal circadian clock, that becomes entrained to the ambient light/dark cycle, and a series of downstream signaling events leading to transcription independent and transcription dependent stress responses.

[1325] A functioning circadian clock can anticipate dark/light transitions and prepare the physiology and biochemistry of a plant accordingly. For example, expression of a chlorophyll a/b binding protein (CAB) is elevated before daybreak, so that photosynthesis can operate maximally as soon as there is light to drive it. Similar considerations apply to light/dark transitions and to many areas of plant physiology such as sugar metabolism, nitrogen metabolism, water uptake and water loss, flowering and flower opening, epinasty, germination, perception of season, and senescence.

[1326] Manipulation of one or more clock gene activities is useful to modulate the biological processes and/or phenotypes listed below. Clock responsive genes and gene products can act alone or in combination. Useful combinations include clock responsive genes and/or gene products with similar transcription profiles, similar biological activities, or members of the same or functionally related biochemical pathways. Whole pathways or segments of pathways are controlled by transcription factor proteins and proteins controlling the activity of signal transduction pathways. Therefore, manipulation of such protein levels is especially useful for altering phenotypes and biochemical activities of plants. The MA_diff Table(s) reports the transcript levels of the experiment (see EXPT ID: Circadian (relating to SMD 2344, SMD 2359, SMD 2361, SMD 2362, SMD 2363, SMD 2364, SMD 2365, SMD 2366, SMD 2367, SMD 2368, SMD 3242)). For transcripts that had higher levels in the samples than the control, a “+” is shown. A “−” is shown for when transcript levels were reduced in root tips as compared to the control. For more experimental detail see the Example section below.

[1327] Circadian genes are those sequences that showed differential expression as compared to controls, namely those sequences identified in the MA_diff tables with a “+” or “−” indication.

[1328] Circadian Genes Identified by Cluster Analyses of Differential Expression

[1329] Circadian Genes Identified by Correlation to Genes that are Differentially Expressed

[1330] As described above, the transcription profiles of genes that act together are well correlated. Applicants not only have identified the genes that are differentially expressed in the microarray experiments, but also have identified the genes that act in concert with them. The MA_clust table indicates groups of genes that have well correlated transcription profiles and therefore participate in the same pathway or network;

[1331] A pathway or network of Circadian genes is any group in the MA_clust that comprises a cDNA ID that also appears in Expt ID Circadian (relating to SMD 2344, SMD 2359, SMD 2361, SMD 2362, SMD 2363, SMD 2364, SMD 2365, SMD 2366, SMD 2367, SMD 2368, SMD 3242) of the MA_diff table(s).

[1332] Circadian Genes Identified by Correlation to Genes that Cause Physiological Consequences

[1333] Additionally, the differential expression data and the phenotypic observations can be merged to identify pathways or networks of Circadian genes. A group in the MA_clust is considered a Circadian pathway or network if the group comprises a cDNA ID that also appears in Knock-in or Knock-out tables that causes one or more of the phenotypes described in section above.

[1334] Circadian Genes Identified by Amino Acid Sequence Similarity

[1335] Circadian genes from other plant species typically encode polypeptides that share amino acid similarity to the sequences encoded by corn and Arabidopsis Circadian genes. Groups of Circadian genes are identified in the Protein Group table. In this table, any protein group that comprises a peptide ID that corresponds to a cDNA ID member of a Circadian pathway or network is a group of proteins that also exhibits Circadian functions/utilities.

[1336] Such clock responsive genes and gene products can function to either increase or dampen the above phenotypes or activities either in response to changes in daylength or in response to changes in light quality. Further, promoters of cirdadian (clock) responsive genes, as described in the Reference tables, for example, are useful to modulate transcription that is induced by circadian or any of the following phenotypes or biological activities below. Further, any desired sequence can be transcribed in similar temporal, tissue, or environmentally specific patterns as the circadian (clock) responsive genes when the desired sequence is operably linked to a promoter of a circadian (clock) responsive gene.

[1337] The expression of many genes is modulated by the clock. Microarray technology allows monitoring of gene expression levels for thousands of genes in a single experiment. This is achieved by hybridizing labeled fluorescent cDNA pools to glass slides that contain spots of DNA (Schena et al. (1995) Science 270: 467-70). The US Arabidopsis Functional Genomics Consortium (AFGC) has recently made public the results from such microarray experiments conducted with AFGC chips containing some 10,000 non-redundant ESTs, selected from about 37,000 randomly sequenced ESTs generated from mRNA of different tissues and developmental stages.

[1338] The sequences of the ESTs showing at least two-fold increases or decreases in response to the circadian rhythm clock at various times through the 24 hour cycle relative to the controls were identified, compared to the Ceres full length cDNA and genomic sequence databanks, and equivalent Ceres clones identified. The MA_diff table reports the results of this analysis, indicating those Ceres clones which are up or down regulated over controls, thereby indicating the Ceres clones which represent clock responsive genes.

[1339] III.D.2.a. Use of Circadian Rhythm (Clock) Responsive Genes to Modulate Phenotypes

[1340] Clock responsive genes and gene products are useful to or modulate one or more phenotypes including timing phenotypes, dormancy, germination, cotyledon opening, first leaves, juvenile to adult transition, bolting, flowering, pollination, fertilization, seed development, seed set, fruit drop, senescence, epinasty, biomass, fresh and dry weight during any time in plant life, such as maturation, number of flowers, seeds, branches, and/or leaves, seed yield, including number, size, weight, and/or harvest index, fruit yield, including number, size, weight, and/or harvest index, plant development, time to fruit maturity, cell wall strengthening and reinforcement, stress tolerance, drought tolerance, flooding tolerance, and uv tolerance

[1341] To regulate any of the phenotype(s) above, activities of one or more of the clock responsive genes or gene products can be modulated and the plants can be tested by screening for the desired trait. Specifically, the gene, mRNA levels, or protein levels can be altered in a plant utilizing the procedures described herein and the phenotypes can be screened for variants as in Anderson et al. (1997) Plant Cell 9: 1727-1743; Heintzen et al. (1997) Proc. Natl. Acad. Sci. USA 94: 8515-20; Schaffer et al. (1998) Cell 93:1219-1229; Somers et al. (1998) Development 125: 485-494; Somers et al. (1998) Science 282: 1488-1490; Wang and Tobin (1998) Cell 93: 1207-1217; Zhong et al. (1998) Plant Cell 10: 2005-2017; Sugano et al. (1998) Proc. Natl. Acad. Sci. USA 95: 11020-11025; Dowson-Day and Millar (1999) Plant J 17: 63-71; Green and Tobin (1999) Proc. Natl. Acad. Sci. USA 96: 4176-419; Staiger and Apel (1999) Mol. Gen. Genet. 261: 811-819; Strayer and Kay (1999) Curr. Opin. Plant Biol. 2:114-120; Strayer et. al. (2000) Science 289:768-771; Kreps et al. (2000) J Biol Rhythms (2000) 15:208-217; Nelson et al. (2000) Cell 101:331-340; Somers et al. (2000) Cell 101:319-329.

[1342] III.D.2.b. Use of Active Clock Responsive Genes to Modulate Biochemical Activities

[1343] The activities of one or more of the clock responsive genes can be modulated to change biochemical or metabolic activities and/or pathways such as those noted below. Such biological activities are documented and can be measured according to the citations above and included in the Table below:

| | BIOCHEMICAL OR | |
|---|---|---|
| | METABOLIC ACTIVITIES | CITATIONS INCLUDING |
| | AND/OR PATHWAYS | ASSAYS |
| PROCESS | | |
| Germination and seedling | Cold, light and water modulated | Bognar et al. (1999) Proc. |
| development | signal transduction pathways, | Natl. Acad. Sci. USA |
| | receptors, kinases, PAS domain | 96: 14652-14657; Sugano et al |
| | | (1999) Proc. Natl. Acad. Sci. |
| | | USA 96: 12362-12366; |
| | | Dowson-Day and Millar |
| | | (1999) Plant J 17: 63-71; |
| | | Somers et al. (2000) Cell |
| | | 101: 319-329; Zhong et al. |
| | | (1998) Plant Cell 10: 2005-2017 |
| Growth transitions and | Cold and light modulated signal | Nelson et al. (2000) Cell |
| flowering | transduction pathways, | 101: 331-340; Fowler et al. |
| | receptors, kinases, PAS domain | (1999) EMBO J. 18: 4679-4688 |
| Tuber formation | Cold and light modulated signal | Yanovsky et al. (2000) Plant |
| | transduction pathways | J. 23: 223-232 |
| METABOLISM | | |
| Lipid metabolism | Membrane lipid synthesis | Bradley and Reddy (1997) J. |
| | including omega-3 fatty acid | Bacteriol. 179: 4407-4410; |
| | desaturase, lipases, lipid | Martin, M et al. 1999 Europe |
| | transfer proteins | J. Biochem 262: 283-290 |
| Sugar metabolism | Glycosylhydrolases, | Liu et al. (1996) Plant |
| | glycosyltransferases, amylases, | Physiol. 112: 43-51; Millar |
| | sucrose synthase, CAB, | and Kay (1996) Proc Natl |
| | Rubisco, light signal | Acad Sci USA 93: 15491-15496; |
| | transduction | Wang et al. (1997) |
| | | Plant Cell 9: 491-507; |
| | | Shinohara et al (1999) J. Biol. |
| | | Chem. 273: 446-452 |
| Nitrogen metabolism | Aminotransferases, arginase, | Bradley and Reddy (1997) J. |
| | proteases and vegetative storage | Bacteriol. 179: 4407-4410 |
| | proteins, aromatic amino acid | |
| | synthesis | |
| Photorespiration | Mitochondrial, chloroplast and | Zhong and McClung (1996) |
| | peroxisomal photorespiratory | Mol. Gen. Genet. 251: 196-203; |
| | enzymes, serine hydroxymethyl | McClung (1997) Free. |
| | transferases, catalase | Radic. Biol. Med. 23: 489-496; |
| | | McClung et al. (2000) |
| | | Plant Physiol. 123: 381-392 |
| Responses to Environmental | Expression of genes involved in | McClung (1997) Free Radic |
| Stress | responses to drought, salt, UV | Biol Med 23: 489-496; Shi et |
| | | al. (2000) Proc. Natl. Acad. |
| | | Sci. USA 97: 6896-6901 |

[1344] Other biological activities that can be modulated by the clock responsive genes and their products are listed in the Reference tables. Assays for detecting such biological activities are described in the Protein Domain table.

[1345] Clock responsive genes are characteristically differentially transcribed in response to fluctuations in an entrained oscillator, which is internal to an organism and cell. The MA_diff table(s) report(s) the changes in transcript levels of various clock responsive genes in a plant.

[1346] Profiles of clock responsive genes are shown in the table below with examples of which associated biological activities are modulated when the activities of one or more such genes vary in plants.

| | | | EXAMPLES OF |
|---|---|---|---|
| | | PHYSIOLOGICAL | BIOCHEMICAL |
| TRANSCRIPT LEVELS | TYPE OF GENES | CONSEQUENCES | ACTIVITY |
| Up regulated | Responders to | Circadian rhythm | Metabolic enzymes |
| transcripts | circadian rhythm | perception | |
| | Genes induced by | Metabolisms | Change in cell |
| | rythm | affected by | membrane structure |
| | | Circadian rhythm | and potential |
| | | Synthesis of | Kinases and |
| | | secondary | phosphatases |
| | | metabolites | Transcription |
| | | and/or proteins | activators |
| | | Modulation of | Change in |
| | | clock response | chromatin structure |
| | | transduction | and/or localized |
| | | pathways | DNA topology |
| | | Specific gene | Enzymes in lipid, |
| | | transcription | sugar and nitrogen |
| | | initiation | metabolism |
| | | | Enzymes in |
| | | | photorespiration |
| | | | and photosynthesis |
| Down-regulated | Responders to | Negative | Transcription |
| transcripts | circadian rhythm. | regulation of | factors |
| | Repressors of | circadian | Change in protein |
| | circadian “state” of | pathways released | structure by |
| | metabolism | Changes in | phosphorylation |
| | Genes repressed by | pathways and | (kinases) or |
| | rhythm | processes | dephosphoryaltion |
| | Genes with | operating in cells | (phosphatases) |
| | discontinued | Changes in | Change in |
| | expression or | metabolism other | chromatin structure |
| | unsTable mRNA in | than circadian | and/or DNA |
| | presence of zinc | pathways | topology |
| | | | Stability of factors |
| | | | for protein |
| | | | synthesis and |
| | | | degradation |
| | | | Metabolic enzymes |
| | | | in light, sugar, lipid |
| | | | and nitrogen |
| | | | metabolism |

### Use of Promoters of Clock Responsive Genes

[1347] Promoters of Clock responsive genes are useful for transcription of any desired polynucleotide or plant or non-plant origin. Further, any desired sequence can be transcribed in a similar temporal, tissue, or environmentally specific patterns as the Clock responsive genes where the desired sequence is operably linked to a promoter of a Clock responsive gene. The protein product of such a polynucleotide is usually synthesized in the same cells, in response to the same stimuli as the protein product of the gene from which the promoter was derived. Such promoter are also useful to produce antisense mRNAs to down-regulate the product of proteins, or to produce sense mRNAs to down-regulate mRNAs via sense suppression.

[1348] III.D.3. Blue Light (Phototropism) Responsive Genes, Gene Components and Products

[1349] Phototropism is the orientation or growth of a cell, an organism or part of an organism in relation to a source of light. Plants can sense red (R), far-red (FR) and blue light in their environment and respond differently to particular ratios of these. For example, a low R:FR ratio enhances cell elongation and favors flowering over leaf production, but blue light regulated cryptochromes also appear to be involved in determining hypocotyl growth and flowering time.

[1350] Phototropism of Arabidopsis thaliana seedlings in response to a blue light source is initiated by nonphototropic hypocotyl 1 (NPH1), a blue light-activated serine-threonine protein kinase, but the downstream signaling events are not entirely known. Blue light treatment leads to changes in gene expression. These genes have been identified by comparing the levels of mRNAs of individual genes in dark-grown seedlings, compared with in dark grown seedlings treated with 1 hour of blue light. Auxin also affects blue light phototropism. The effect of Auxin on gene expression stimulated by blue light has been explored by studying mRNA levels in a mutant of Arabidopsis thaliana nph4-2, grown in the dark and, treated with blue light for 1 hour compared with wild type seedlings treated similarly. This mutant is disrupted for Auxin-related growth and Auxin-induced gene transcription. Gene expression was studied using microarray technology.

[1351] Microarray technology allows monitoring of gene expression levels for thousands of genes in a single experiment. This is achieved by hybridizing labeled fluorescent cDNA pools to glass slides that contain spots of DNA (Schena et al. (1995) Science 270: 467-70). The US Arabidopsis Functional Genomics Consortium (AFGC) has recently made public the results from such microarray experiments conducted with AFGC chips containing some 10,000 non-redundant ESTs, selected from about 37,000 randomly sequenced ESTs generated from mRNA of different tissues and developmental stages.

[1352] The sequences of the ESTs showing at least two-fold increases or decreases over the controls were identified, compared to the Ceres full-length cDNA and genomic sequence databanks, and the equivalent Ceres clones identified. The MA_diff table(s) report(s) the results of this analysis, indicating those Ceres clones which are up or down regulated over controls, thereby indicating the Ceres clones which represent blue light responsive genes and of those which are blue light responsive in the absence of nph4 gene activity. The MA_diff Table(s) reports the transcript levels of the experiment (see EXPT ID: Phototropism (relating to SMD 4188, SMD 6617, SMD 6619)). For transcripts that had higher levels in the samples than the control, a “+” is shown. A “−” is shown for when transcript levels were reduced in root tips as compared to the control. For more experimental detail see the Example section below.

[1353] Blue Light genes are those sequences that showed differential expression as compared to controls, namely those sequences identified in the MA_diff tables with a “+” or “−” indication.

[1354] Blue Light Genes Identified by Cluster Analyses of Differential Expression

[1355] Blue Light Genes Identified by Correlation to Genes that are Differentially Expressed

[1356] As described above, the transcription profiles of genes that act together are well correlated. Applicants not only have identified the genes that are differentially expressed in the microarray experiments, but also have identified the genes that act in concert with them. The MA_clust table indicates groups of genes that have well correlated transcription profiles and therefore participate in the same pathway or network.

[1357] A pathway or network of Blue Light genes is any group in the MA_clust that comprises a cDNA ID that also appears in Expt ID Phototropism (relating to SMD 4188, SMD 6617, SMD 6619) of the MA_diff table(s).

[1358] Blue Light Genes Identified by Correlation to Genes that Cause Physiological Consequences

[1359] Additionally, the differential expression data and the phenotypic observations can be merged to identify pathways or networks of Blue Light genes. A group in the MA_clust is considered a Blue Light pathway or network if the group comprises a cDNA ID that also appears in Knock-in or Knock-out tables that causes one or more of the phenotypes described in section above.

[1360] Blue Light Genes Identified by Amino Acid Sequence Similarity

[1361] Blue Light genes from other plant species typically encode polypeptides that share amino acid similarity to the sequences encoded by corn and Arabidopsis Blue Light genes. Groups of Blue Light genes are identified in the Protein Group table. In this table, any protein group that comprises a peptide ID that corresponds to a cDNA ID member of a Blue Light pathway or network is a group of proteins that also exhibits Blue Light functions/utilities.

[1362] III.D.3.a. Use of Blue Light Responsive Genes, Gene Components and Products to Modulate Phenotypes

[1363] Changes in blue light in a plant's surrounding environment result in modulation of many genes and gene products. Examples of such blue light response genes and gene products are shown in the REFERENCE and SEQUENCE Tables. These genes and/or products are responsible for effects on traits such as plant vigor and seed yield.

[1364] While blue light responsive polynucleotides and gene products can act alone, combinations of these polynucleotides also affect growth and development. Useful combinations include different blue light responsive polynucleotides and/or gene products that have similar transcription profiles or similar biological activities, and members of the same or similar biochemical pathways. Whole pathways or segments of pathways are controlled by transcription factor proteins and proteins controlling the activity of signal transduction pathways. Therefore, manipulation of such protein levels is especially useful for altering phenotypes and biochemical activities of plants. In addition, the combination of a blue light responsive polynucleotides and/or gene product with other environmentally responsive polynucleotide is also useful because of the interactions that exist between hormone-regulated pathways, stress and pathogen induced pathways, nutritional pathways and development. Here, in addition to polynucleotides having similar transcription profiles and/or biological activities, useful combinations include polynucleotides that may have different transcription profiles but which participate in common or overlapping pathways.

[1365] III.D.3.b. Use of Blue Light Responsive Genes, Gene Components and Products to Modulate Phenotypes

[1366] Blue light responsive genes and gene products can function to either increase or dampen the above phenotypes or activities either in response to changes in blue light response concentration or in the absence of blue light responsive fluctuations. Further, promoters of blue light responsive genes, as described in the Reference tables, for example, are useful to modulate transcription that is induced by blue light or any of the following phenotypes or biological activities below. Further, any desired sequence can be transcribed in similar temporal, tissue, or environmentally specific patterns as the blue light responsive genes when the desired sequence is operably linked to a promoter of a blue light responsive gene.

[1367] Blue light responsive genes and gene products can be used to alter or modulate one or more phenotypes including growth, roots (elongation or gravitropism) and stems (such as elongation), development of cell (such as growth or elongation), flower (including flowering time), seedling (including elongation), plant yield, and seed and fruit yield.

[1368] To regulate any of the phenotype(s) above, activities of one or more of the blue light responsive genes or gene products can be modulated and the plants tested by screening for the desired trait. Specifically, the gene, mRNA levels, or protein levels can be altered in a plant utilizing the procedures described herein and the phenotypes can be assayed. As an example, a plant can be transformed according to Bechtold and Pelletier (1998, Methods. Mol. Biol. 82:259-266) and/or screened for variants as in Winkler et al. (1998) Plant Physiol 118: 743-50 and visually inspected for the desired phenotype or metabolically and/or functionally assayed according to Liscum and Briggs (1995, Plant Cell 7: 473-85), Vitha et al. (2000, Plant Physiol 122: 453-61), Stowe-Evance et al. (1998, Plant Physiol 118: 1265-75), Baum et al. (1999, PNAS USA 96: 13554-9), Huala et al. (1997) Science 278: 2120-2123), Kanegae et al. (2000, Plant Cell Physiol 41: 415-23), Khanna et al. (1999, Plant Mol Biol 39: 231-42), Sakai et al. (2000, Plant Cell 12: 225-36), Parks et al (1996, Plant Physiol 110: 155-62) and Janoudi et al. (1997, Plant Physiol 113: 975-79).

[1369] III.D.3.c. Use of Blue Light Responsive Genes, Gene Components and Products to Modulate Biochemical Activities

[1370] The activities of one or more of the blue light responsive genes can be modulated to change biochemical or metabolic activities and/or pathways such as those noted below. Such biological activities can be measured according to the citations included in the Table below:

| | BIOCHEMICAL OR | |
|---|---|---|
| | METABOLIC | |
| | ACTIVITIES AND/OR | CITATIONS INCLUDING |
| PROCESS | PATHWAYS | ASSAYS |
| Cell Growth | Cell Elongation | Liscum and Briggs (1995) Plant |
| and | Seedling | Cell 7: 473-85 |
| Development | Stem | |
| | Root | Vitha et al. (2000) Plant Physiol |
| | | 122: 453-61 |
| Signalling | UV light | Liscum and Briggs (1996) Plant |
| | Perception | Physiol 112: 291-96 |
| | Far-red/Red light | Parks et al. (1996) Plant Physiol |
| | Perception | 110: 155-62 |
| | Phosphorylation of | Liscum and Briggs (1996) Plant |
| | cellular and nuclear- | Physiol 112: 291-96 |
| | localized proteins | |
| | Activation and Synthesis | Sakae et al. (2000) Plant |
| | of Transcription Factors | Cell 12: 225-36 |
| | Ca+2 levels | Baum et al. (1999) PNAS USA |
| | | 96: 13554-9 |
| | | Pu and Robinson (1998) J Cell |
| | | Sci 111: 3197-3207 |
| | Auxin Concentration | Estelle (1998) Plant Cell 10: |
| | | 1775-8 |
| | | Reed et al. (1998) Plant Physiol |
| | | 118: 1369-78 |
| | Inter-photoreceptors | Janoudi et al. (1997) Plant |
| | | Physiol 113: 975-79 |

[1371] Other biological activities that can be modulated by blue light response genes and their products are listed in the REF Tables. Assays for detecting such biological activities are described in the Domain section of the REF Table.

[1372] The specific genes modulated by blue light, in wild type seedlings and in the mutant deficient in transmitting Auxin effects are given in the Reference and Sequence Tables. The kinds of genes discovered and some of their associated effects are given in the Table below.

| | | | EXAMPLES OF |
|---|---|---|---|
| TRANSCRIPT | | PHYSIOLOGICAL | BIOCHEMICAL |
| LEVELS | TYPE OF GENES | CONSEQUENCES | ACTIVITY |
| Up regulated | Responders to no | Blue light | Transporters |
| transcripts | blue light in wild type | perception | Metabolic enzymes |
| | or to blue light in | Metabolism | Change in cell |
| | mutant lacking Auxin | affected by blue | membrane structure |
| | effects | light | and potential |
| | | Synthesis of | Kinases and |
| | | secondary | phosphatases |
| | | metabolites and/or | Transcription |
| | | proteins | activators |
| | | Modulation of blue | Change in chromatin |
| | | light transduction | structure and/or |
| | | pathways | localized DNA |
| | | Specific gene | topology |
| | | transcription | |
| | | initiation | |
| Down-regulated | Responders to no | Blue light | Transcription factors |
| transcripts | blue light in wild type | perception | Change in protein |
| | or to blue light in | Metabolism | structure by |
| | mutants lacking | affected by blue | phosphorylation |
| | Auxin effects | light | (kinases) or |
| | Genes with | Synthesis of | dephosphorylation |
| | discontinued | secondary | (phosphatases) |
| | expression or | metabolites and/or | Change in chromatin |
| | unsTable mRNA | proteins | structure and/or |
| | during response | Modulation of blue | DNA topology |
| | | light transduction | Stability factors for |
| | | pathways | protein synthesis and |
| | | Specific gene | degradation |
| | | transcription | Metabolic enzymes |
| | | initiation | |
| | | Changes in | |
| | | pathways and | |
| | | processes | |
| | | operating in cells | |
| | | Changes in | |
| | | metabolic | |
| | | pathways other | |
| | | than phototropic | |
| | | blue light | |
| | | responsive | |
| | | pathways | |

### Use of Promoters of Blue Light Responsive Genes

[1373] Promoters of Blue Light responsive genes are useful for transcription of any desired polynucleotide or plant or non-plant origin. Further, any desired sequence can be transcribed in a similar temporal, tissue, or environmentally specific patterns as the Blue Light responsive genes where the desired sequence is operably linked to a promoter of a Blue Light responsive gene. The protein product of such a polynucleotide is usually synthesized in the same cells, in response to the same stimuli as the protein product of the gene from which the promoter was derived. Such promoter are also useful to produce antisense mRNAs to down-regulate the product of proteins, or to produce sense mRNAs to down-regulate mRNAs via sense suppression.

[1374] III.D.4 Responsive Genes, Gene Components and Products

[1375] There has been a recent and significant increase in the level of atmospheric carbon dioxide. This rise in level is projected to continue over the next 50 years. The effects of the increased level of carbon dioxide on vegetation are just now being examined, generally in large scale, whole plant (often trees) experiments. Some researchers have initiated physiological experiments in attempts to define the biochemical pathways that are either affected by and/or are activated to allow the plant to avert damage from the elevated carbon dioxide levels. A genomics approach to this issue, using a model plant system, allows identification of those pathways affected by and/or as having a role in averting damage due to the elevated carbon dioxide levels and affecting growth. Higher agronomic yields can be obtained for some crops grown in elevated CO₂.

[1376] Microarray technology allows monitoring of gene expression levels for thousands of genes in a single experiment. This is achieved by hybridizing labeled fluorescent cDNA pools to glass slides that contain spots of DNA (Schena et al. (1995) Science 270: 467-70). The U.S. Arabidopsis Functional Genomics Consortium (AFGC) has recently made public the results from such microarray experiments conducted with AFGC chips containing about 10,000 non-redundant ESTs, selected from about 37,000 randomly sequenced ESTs generated from mRNA of different tissues and developmental stages.

[1377] The sequences of the ESTs showing at least two-fold increases or decreases in plants grown in higher CO₂ levels compared with plants grown at more normal CO₂ levels, were compared to the Ceres full length cDNA and genomic sequence databanks, and equivalent Ceres clones were identified. The MA_diff table reports the results of this analysis, indicating those Ceres clones which are up or down regulated over controls, thereby indicating the Ceres clones cDNA sequences that change in response to CO₂.

[1378] Examples of CO₂ responsive genes and gene products are shown in the Reference, Sequence, Protein Group, Protein Group Matrix tables, MA_diff and MA_clust tables. While CO₂ responsive polynucleotides and gene products can act alone, combinations of these polynucleotides also affect growth and development. Useful combinations include different CO₂ responsive polynucleotides and/or gene products that have similar transcription profiles or similar biological activities, and members of the same or similar biochemical pathways. Whole pathways or segments of pathways are controlled by transcription factor proteins and proteins controlling the activity of signal transduction pathways. Therefore, manipulation of such protein levels is especially useful for altering phenotypes and biochemical activities of plants.

[1379] Manipulation of one or more CO₂ responsive gene activities is useful to modulate the biological processes and/or phenotypes listed below. CO₂ responsive genes and gene products can act alone or in combination. Useful combinations include genes and/or gene products with similar transcription profiles, similar biological activities, or members of the same or functionally related biochemical pathways. Here, in addition to polynucleotides having similar transcription profiles and/or biological activities, useful combinations include polynucleotides that may have different transcription profiles but which participate in common or overlapping pathways.

[1380] CO₂ responsive genes and gene products can function to either increase or dampen the above phenotypes or activities. Further, promoters of CO₂ responsive genes, as described in the Reference tables, for example, are useful to modulate transcription that is induced by CO₂ or any of the following phenotypes or biological activities below. Further, any desired sequence can be transcribed in similar temporal, tissue, or environmentally specific patterns as the CO₂ responsive genes when the desired sequence is operably linked to a promoter of a CO₂ responsive gene. The MA_diff Table(s) reports the transcript levels of the experiment (see EXPT ID: CO2 (relating to SMD 7561, SMD 7562, SMD 7261, SMD 7263, SMD 3710, SMD 4649, SMD 4650)). For transcripts that had higher levels in the samples than the control, a “+” is shown. A “−” is shown for when transcript levels were reduced in root tips as compared to the control. For more experimental detail see the Example section below.

[1381] CO2 genes are those sequences that showed differential expression as compared to controls, namely those sequences identified in the MA_diff tables with a “+” or “−” indication.

[1382] CO2 Genes Identified by Cluster Analyses of Differential Expression

[1383] CO2 Genes Identified by Correlation to Genes that are Differentially Expressed

[1384] As described above, the transcription profiles of genes that act together are well correlated. Applicants not only have identified the genes that are differentially expressed in the microarray experiments, but also have identified the genes that act in concert with them. The MA_clust table indicates groups of genes that have well correlated transcription profiles and therefore participate in the same pathway or network.

[1385] A pathway or network of CO2 genes is any group in the MA_clust that comprises a cDNA ID that also appears in Expt ID CO2 (relating to SMD 7561, SMD 7562, SMD 7261, SMD 7263, SMD 3710, SMD 4649, SMD 4650) of the MA_diff table(s).

[1386] CO2 Genes Identified by Correlation to Genes that Cause Physiological Consequences

[1387] Additionally, the differential expression data and the phenotypic observations can be merged to identify pathways or networks of CO2 genes. A group in the MA_clust is considered a CO2 pathway or network if the group comprises a cDNA ID that also appears in Knock-in or Knock-out tables that causes one or more of the phenotypes described in section above.

[1388] CO2 Genes Identified by Amino Acid Sequence Similarity

[1389] CO2 genes from other plant species typically encode polypeptides that share amino acid similarity to the sequences encoded by corn and Arabidopsis CO2 genes. Groups of CO2 genes are identified in the Protein Group table. In this table, any protein group that comprises a peptide ID that corresponds to a cDNA ID member of a CO2 pathway or network is a group of proteins that also exhibits CO2 functions/utilities.

[1390] III.D.4.a. Use of Co2 Responsive Genes to Modulate Phenotypes

[1391] CO₂ responsive genes and gene products are useful to or modulate one or more phenotypes including catabolism, energy generation, atp, etc., metabolism, carbohydrate synthesis, growth rate, whole plant, including height, flowering time, etc., organs, flowers, fruits, stems, leaves, roots, lateral roots, biomass, fresh and dry weight during any time in plant life, such as maturation; number, size, and weight of flowers; seeds; branches; leaves; total plant nitrogen content, amino acid/protein content of whole plant or parts, seed yield (such as number, size, weight, harvest index, and content and composition, e.g., amino acid, nitrogen, oil, protein, and carbohydrate); fruit yield; number, size, weight, harvest index; content and composition, e.g., amino acid, nitrogen, oil, protein, carbohydrate, water; and photosynthesis (such as carbon dioxide fixation).

[1392] To improve any of the phenotype(s) above, activities of one or more of the CO₂ responsive genes or gene products can be modulated and the plants tested by screening for the desired trait. Specifically, the gene, mRNA levels, or protein levels can be altered in a plant utilizing the procedures described herein and the phenotypes can be assayed. As an example, a plant can be transformed according to Bechtold and Pelletier (1998, Methods. Mol. Biol. 82:259-266) and/or screened for variants as in Winkler et al. (1998) Plant Physiol 118: 743-50 and visually inspected for the desired phenotype or metabolically and/or functionally assayed according to Saito et al. (1994, Plant Physiol. 106: 887-95), Takahashi et al (1997, Proc. Natl. Acad. Sci. USA 94: 11102-07) and Koprivova et al. (2000, Plant Physiol. 122: 737-46).

[1393] III.D.2. Use of CO₂ Responsive Genes to Modulate Biochemical Activities

[1394] The activities of one or more of the CO₂ responsive genes can be modulated to change biochemical or metabolic activities and/or pathways such as those noted below. Such biological activities can be measured according to the citations included in the Table below:

| | BIOCHEMICAL OR | |
|---|---|---|
| | METABOLIC | |
| GENERAL | ACTIVITIES AND/OR | CITATIONS INCLUDING |
| CATEGORY | PATHWAYS | ASSAYS |
| Cell Division | Cell Cycle Control Genes | Masle (2000) Plant |
| | | Physiol. 122: 1399-1415 |
| Starch | Starch Biosynthesis | Ludewig et al., (1998) |
| Biosynthesis | Enzymes And Pathways | FEBS Lett. 429: 147-151 |
| Photosynthesis | Photosynthetic Enzymes, | Cheng et al., (1998) Plant |
| | e.g., Rubisco | Physiol 166: 715-723 |
| Respiration | Energy Metabolism | Musgrave et al., (1986) |
| | Pathways | Proc. Natl. Acad. Sci. USA |
| | | 83: 8157-8161 |
| CO₂ Uptake | Guard Cell Stomata | Allen et al., Plant Cell |
| | Control Systems | (1999) 11(9): 1785-1798 |
| | | Ichida et al., Plant Cell |
| | | (1997) 9(10): 1843-1857 |
| | | Hedrich et al., EMBO J |
| | | (1993) 12(3): 897-901 |
| Coordination | Light-Regulation Of Major | Lam et al. (1998) Plant J. |
| Of Carbon | Central Carbon And | 16(3): 345-353 |
| And Nitrogen | Nitrogen Metabolic | Lejay et al. (1999) Plant J. |
| Metabolism | Pathways To Coordinate | 18(5): 509-519; and |
| | Growth | Oliveira et al. (1999) Plant. |
| | | Phys. 121: 301-309 |
| | Carbohydrate And | Lam et al. (1998) supra; |
| | Nitrogen Control Of | Lejay et al. (1999) supra; |
| | Carbohydrate And Organic | and |
| | Nitrogen Accumulation | Oliveira et al. (1999) supra |
| | Pathways | |

[1395] Other biological activities that can be modulated by the CO₂ responsive genes and gene products are listed in the Reference tables. Assays for detecting such biological activities are described in the Protein Domain table.

[1396] CO₂ responsive genes are characteristically differentially transcribed in response to fluctuating CO₂ levels or concentrations, whether internal or external to an organism or cell. The MA_diff tables report the changes in transcript levels of various CO₂ responsive genes that are differentially expressed in response to high CO₂ levels.

[1397] Profiles of these different CO₂ responsive genes are shown in the Table below with examples of associated biological activities.

| | | | EXAMPLES |
|---|---|---|---|
| TRANSCRIPT | TYPE OF | PHYSIOLOGICAL | OF BIOCHEMICAL |
| LEVELS | GENES | CONSEQUENCES | ACTIVITY |
| Up Regulated | Responders | Changes In Generation Of | Transporters |
| Transcripts | To Higher | ATP | Catabolic And |
| | Levels Of | Changes In Catabolism | Anabolic Enzymes |
| | CO₂ | And Anabolism Enzymes and | Change In Cell |
| | Genes | Pathways | Membrane Structure |
| | Induced By | Activation Of Krebs Cycle | And Potential |
| | CO₂ | Specific Gene | Kinases And |
| | | Transcription Initiation | Phosphatases |
| | | Changes In Carbohydrate | Transcription |
| | | Synthesis | Activators And |
| | | Changes In Chloroplast | Repressors |
| | | Structure | Change In |
| | | Changes In Photosynthesis | Chromatin Structure |
| | | Changes In Respiration | And/Or Localized |
| | | | DNA Topology |
| | | | Redox Control |
| Down- | Responders | Changes In Pathways And | Transcription |
| Regulated | To Higher | Processes Operating In | Factors |
| Transcripts | Levels Of | Cells | Change In Protein |
| | CO₂ | Changes In Catabolism and | Structure By |
| | Genes | Anabolism | Phosphorylation |
| | Repressed By | Changes in Chloroplast | (Kinases) Or |
| | CO₂ | Structure | Dephosphorylation |
| | | | (Phosphatases) |
| | | | Change In |
| | | | Chromatin Structure |
| | | | And/Or DNA |
| | | | Topology |
| | | | Stability Of Factors |
| | | | For Protein |
| | | | Synthesis And |
| | | | Degradation |
| | | | Metabolic Enzymes |

### Use of Promoters of CO2 Responsive Genes

[1398] Promoters of CO2 responsive genes are useful for transcription of any desired polynucleotide or plant or non-plant origin. Further, any desired sequence can be transcribed in a similar temporal, tissue, or environmentally specific patterns as the CO2 responsive genes where the desired sequence is operably linked to a promoter of a CO2 responsive gene. The protein product of such a polynucleotide is usually synthesized in the same cells, in response to the same stimuli as the protein product of the gene from which the promoter was derived. Such promoter are also useful to produce antisense mRNAs to down-regulate the product of proteins, or to produce sense mRNAs to down-regulate mRNAs via sense suppression.

[1399] III.D.5. Mitochondria Electron Transport (Respiration) Genes, Gene Components and Products

[1400] One means to alter flux through metabolic pathways is to alter the levels of proteins in the pathways. Plant mitochondria contain many proteins involved in various metabolic processes, including the TCA cycle, respiration, and photorespiration and particularly the electron transport chain (mtETC). Most mtETC complexes consist of nuclearly-encoded mitochondrial proteins (NEMPs) and mitochondrially-encoded mitochondrial proteins (MEMPs). NEMPs are produced in coordination with MEMPs of the same complex and pathway and with other proteins in multi-organelle pathways. Enzymes involved in photorespiration, for example, are located in chloroplasts, mitochondria, and peroxisomes and many of the proteins are nuclearly-encoded. Manipulation of the coordination of protein levels within and between organelles can have critical and global consequences to the growth and yield of a plant. Genes which are manipulated by interfering with the mtETC have been characterized using microarray technology.

[1401] Microarray technology allows monitoring of gene expression levels for thousands of genes in a single experiment. This is achieved by hybridizing labeled fluorescent cDNA pools to glass slides that contain spots of DNA (Schena et al. (1995) Science 270: 467-70). The US Arabidopsis Functional Genomics Consortium (AFGC) has recently made public the results from such microarray experiments conducted with AFGC chips containing about 10,000 non-redundant ESTs, selected from about 37,000 randomly sequenced ESTs generated from mRNA of different tissues and developmental stages.

[1402] The sequences of the ESTs showing at least two-fold increases or decreases in the presence of the ETC inhibitor, 10 mM antimycin A compared with the control lacking antimycin A. were identified, compared to the Ceres full length cDNA and genomic sequence databanks, and equivalent Ceres clones identified. The MA_diff table reports the results of this analysis, indicating those Ceres clones which are up or down regulated over controls, thereby indicating the Ceres clones that represent respiration responsive genes.

[1403] Examples of genes and gene products that are responsive to antimycin A block of respiration are shown in the Reference, Sequence, Protein Group, Protein Group Matrix, MA_diff and MA_clust tables. While respiration responsive polynucleotides and gene products can act alone, combinations of these polynucleotides also affect growth and development. Useful combinations include different respiration responsive polynucleotides and/or gene products that have similar transcription profiles or similar biological activities, and members of the same or similar biochemical pathways. Here, in addition to polynucleotides having similar transcription profiles and/or biological activities, useful combinations include polynucleotides that may have different transcription profiles but which participate in common or overlapping pathways. Whole pathways or segments of pathways are controlled by transcription factor proteins and proteins controlling the activity of signal transduction pathways. Therefore, manipulation of such protein levels is especially useful for altering phenotypes and biochemical activities of plants. Manipulation of one or more respiration responsive gene activities are useful to modulate the biological processes and/or phenotypes listed below.

[1404] Such respiration responsive genes and gene products can function to either increase or dampen the phenotypes or activities below. Further, promoters of respiration responsive genes, as described in the Reference tables, for example, are useful to modulate transcription that is induced by respiration or any of the following phenotypes or biological activities below. Further, any desired sequence can be transcribed in similar temporal, tissue, or environmentally specific patterns as the respiration responsive genes when the desired sequence is operably linked to a promoter of a respiration responsive gene. The MA_diff Table(s) reports the transcript levels of the experiment (see EXPT ID: Mitchondria-Electron Transport (relating to SMD 8061, SMD 8063)). For transcripts that had higher levels in the samples than the control, a “+” is shown. A “−” is shown for when transcript levels were reduced in root tips as compared to the control. For more experimental detail see the Example section below.

[1405] Mitchondria-Electron Transport genes are those sequences that showed differential expression as compared to controls, namely those sequences identified in the MA_diff tables with a “+” or “−” indication.

[1406] Mitchondria-Electron Transport Genes Identified by Cluster Analyses of Differential Expression

[1407] Mitchondria-Electron Transport Genes Identified by Correlation to Genes that are Differentially Expressed

[1408] As described above, the transcription profiles of genes that act together are well correlated. Applicants not only have identified the genes that are differentially expressed in the microarray experiments, but also have identified the genes that act in concert with them. The MA_clust table indicates groups of genes that have well correlated transcription profiles and therefore participate in the same pathway or network.

[1409] A pathway or network of Mitchondria-Electron Transport genes is any group in the MA_clust that comprises a cDNA ID that also appears in Expt ID Mitchondria-Electron Transport (relating to SMD 8061, SMD 8063) of the MA_diff table(s).

[1410] Mitchondria-Electron Transport Genes Identified by Correlation to Genes that Cause Physiological Consequences

[1411] Additionally, the differential expression data and the phenotypic observations can be merged to identify pathways or networks of Mitchondria-Electron Transport genes. A group in the MA_clust is considered a Mitchondria-Electron Transport pathway or network if the group comprises a cDNA ID that also appears in Knock-in or Knock-out tables that causes one or more of the phenotypes described in section above.

[1412] Mitchondria-Electron Transport Genes Identified By Amino Acid Sequence Similarity

[1413] Mitchondria-Electron Transport genes from other plant species typically encode polypeptides that share amino acid similarity to the sequences encoded by corn and Arabidopsis Mitchondria-Electron Transport genes. Groups of Mitchondria-Electron Transport genes are identified in the Protein Group table. In this table, any protein group that comprises a peptide ID that corresponds to a cDNA ID member of a Mitchondria-Electron Transport pathway or network is a group of proteins that also exhibits Mitchondria-Electron Transport functions/utilities.

[1414] III.D.5.a. Use of Respiration Responsive Genes to Modulate Phenotypes

[1415] Respiration responsive genes and gene products are useful to or modulate one or more phenotypes including catabolism; energy generation, ATP, etc.; growth rate; whole plant, including height, flowering time, etc.; organs; flowers; fruits; stems; leaves; roots, lateral roots; biomass; fresh and dry weight during any time in plant life, such as maturation; number, size, and weight of flowers; seeds; branches; leaves; total plant nitrogen content; amino acid/protein content of whole plant or parts; seed yield (such as number, size weight, harvest index, and content and composition, e.g., amino acid, nitrogen, oil, protein, and carbohydrate); fruit yield; number, size, weight, harvest index; content and composition, e.g., amino acid, nitrogen, oil, protein, carbohydrate, water; and photosynthesis (such as carbon dioxide fixation).

[1416] To improve any of the phenotype(s) above, activities of one or more of the respiration responsive genes or gene products can be modulated and the plants tested by screening for the desired trait. Specifically, the gene, mRNA levels, or protein levels can be altered in a plant utilizing the procedures described herein and the phenotypes can be assayed. As an example, a plant can be transformed according to Bechtold and Pelletier (1998, Methods. Mol. Biol. 82:259-266) and/or screened for variants as in Winkler et al. (1998) Plant Physiol 118: 743-50 and visually inspected for the desired phenotype or metabolically and/or functionally assayed according to Saito et al. (1994, Plant Physiol. 106: 887-95), Takahashi et al (1997, Proc. Natl. Acad. Sci. USA 94: 11102-07) and Koprivova et al. (2000, Plant Physiol. 122: 737-46).

[1417] III.D.5.b. Use of Respiration-Responsive Genes to Modulate Biochemical Activities

[1418] The activities of one or more of the respiration responsive genes can be modulated to change biochemical or metabolic activities and/or pathways such as those noted below. Such biological activities can be measured according to the citations included in the Table below:

| | BIOCHEMICAL OR | |
|---|---|---|
| | METABOLIC ACTIVITIES | CITATIONS |
| PROCESS | AND/OR PATHWAYS | INCLUDING ASSAYS |
| Respiration and | Mitochondrial Electron | Passam et al. (1973) |
| energy-related | Transport Chain | Biochem Biophys. Acta |
| processes | | 325: 54-61 |
| | Alternative oxidase pathway | Saisho et al. (1997) Plant |
| | | Mol. Biol. 35: 585-600 |
| | | Vanlerberghe and |
| | | McIntosh (1994) Plant |
| | | Physiol. 105: 867-874 |
| | ATP generation pathways | Mahler and Cordes (1966) |
| | ATP utilization pathways | In Biological Chemistry, |
| | | Harper and Row |
| | Chloroplast energy related | Foyer et al. (1989) Arch. |
| | pathways | Biochem. Biophys. 268: |
| | | 687-697 |
| | | Mills et al. (1978) |
| | | Biochem. Biophys. Acta |
| | | 504: 298-309 |
| | Peroxisome energy related | Olsen (1998) Plant mol. |
| | pathways | Biol. 38: 163-89 |
| | Cytoplasmic energy related | Roberts et al. (1995) Febs Letters |
| | pathways | 373: 307-309 |
| | Catabolism and Anabolism | Mahler and Cordes (1966) In |
| | | Biological Chemistry, Harper and |
| | | Row |
| | Aerobic versus anaerobic | Mahler and Cordes (1966) In |
| | pathways | Biological Chemistry, Harper and |
| | | Row |
| Coordination of | Light-regulation of major | Lam et al. (1998) Plant J. 16(3): |
| Carbon and Nitrogen | central carbon and nitrogen | 345-353 |
| Metabolism | Metabolic pathways to | Lejay et al. (1999) Plant J. 18(5): |
| | coordinate growth | 509-519; and |
| | | Oliveira et al. (1999) Plant. Phys. |
| | | 121: 301-309 |
| | Carbohydrate and nitrogen | Lam et al. (1998) Plant J. 16(3): |
| | control of carbohydrate and | 345-353 |
| | organic nitrogen accumulation | Lejay et al. (1999) Plant J. 18(5): |
| | pathways | 509-519; and |
| | | Oliveira et al. (1999) Plant. Phys. |
| | | 121: 301-309 |

[1419] Other biological activities that can be modulated by the respiration genes and gene products are listed in the REF Tables. Assays for detecting such biological activities are described in the Protein Domain table.

[1420] Respiration responsive genes are differentially expressed in response to inhibition of mitochondrial electron transport by antimycin A. The MA_diff table reports the changes in transcript levels of various respiration responsive genes that are differentially expressed in response to this treatment.

[1421] Profiles of these different respiration genes are shown in the Table below with examples of associated biological activities.

| | | | EXAMPLES |
|---|---|---|---|
| TRANSCRIPT | | PHYSIOLOGICAL | OF BIOCHEMICAL |
| LEVELS | TYPE OF GENES | CONSEQUENCES | ACTIVITY |
| Up regulated | Responders to | Changes in | Transporters |
| transcripts | inhibition of | generation of ATP | Catabolic and |
| | mitochondrial | Alternate oxidase | anabolic enzymes |
| | electron transport | induction | Changes in cell |
| | respiration | Changes in | and organelle |
| | Genes induced by | catabolic and | membrane |
| | inhibition of | anabolic enzymes | structures and |
| | mitochondrial | and pathways | potentials |
| | electron transport | Specific gene | Kinases and |
| | | transcription | phosphatases |
| | | initiation | Transcription |
| | | Changes in electron | activators |
| | | transport proteins | Change in |
| | | | chromatin |
| | | | structure and/or |
| | | | localized DNA |
| | | | topology |
| | | | Redox control |
| Down-regulated | Responders to | Changes in ATP | Transcription |
| transcripts | inhibition of | generating | factors |
| | mitochondrial | pathways | Change in protein |
| | electron transport | Changes in | structure by |
| | Genes repressed by | pathways and | phosphorylation |
| | inhibition of | processes operating in | (kinases) or |
| | mitochondrial | cells | dephosphoryaltion |
| | electron transport | Induction of | (phosphatases) |
| | | aerobic pathways | Transporters |
| | | Changes in | Catabolic and |
| | | catabolism and | anabolic enzymes |
| | | anabolism | Changes in cell |
| | | | and organelle |
| | | | membrane |
| | | | structures and |
| | | | potentials |
| | | | Change in |
| | | | chromatin |
| | | | structure and/or |
| | | | localized DNA |
| | | | topology |
| | | | changes |
| | | | Stability factors |
| | | | for protein |
| | | | synthesis and |
| | | | degradation |
| | | | Metabolic |
| | | | enzymes |
| | | Changes in redox | Changes in redox |
| | | activities | enzymes |

### Use of Promoters of Respiration Genes

[1422] Promoters of Respiration genes are useful for transcription of any desired polynucleotide or plant or non-plant origin. Further, any desired sequence can be transcribed in a similar temporal, tissue, or environmentally specific patterns as the Respiration genes where the desired sequence is operably linked to a promoter of a Respiration gene. The protein product of such a polynucleotide is usually synthesized in the same cells, in response to the same stimuli as the protein product of the gene from which the promoter was derived. Such promoter are also useful to produce antisense mRNAs to down-regulate the product of proteins, or to produce sense mRNAs to down-regulate mRNAs via sense suppression.

[1423] III.D.6. Protein Degradation Genes, Gene Components and Products

[1424] One of the components of molecular mechanisms that operate to support plant development is the “removal” of a gene product from a particular developmental circuit once the substrate protein is not functionally relevant anymore in temporal and/or spatial contexts. The “removal” mechanisms can be accomplished either by protein inactivation (e.g., phosphorylation or protein-protein interaction) or protein degradation most notably via ubiquitination-proteasome pathway. The ubiquitination-proteasome pathway is responsible for the degradation of a plethora of proteins involved in cell cycle, cell division, transcription, and signal transduction, all of which are required for normal cellular functions. Ubiquitination occurs through the activity of ubiquitin-activating enzymes (E1), ubiquitin-conjugating enzymes (E2), and ubiquitin-protein ligases (E3), which act sequentially to catalyze the attachment of ubiquitin (or other modifying molecules that are related to ubiquitin) to substrate proteins (Hochstrasser 2000, Science 289: 563). Ubiquitinated proteins are then routed to proteasomes for degradation processing [2000, Biochemistry and Molecular Biology of Plants, Buchanan, Gruissem, and Russel (eds), Amer. Soc. of Plant Physiologists, Rockville, Md.]. The degradation mechanism can be selective and specific to the concerned target protein (Joazeiro and Hunter 2001, Science 289: 2061; Sakamoto et al., 2001, PNAS Online 141230798). This selectivity and specificity may be one of the ways that the activity of gene products is modulated.

[1425] III.D.6.a. Identification of Protein Degradation Genes Gene Components and Products

[1426] “Protein degradation” genes identified herein are defined as genes, gene components and products associated with or dependant on the ubiquitination—proteasome protein degradation process. Examples of such “protein degradation” genes and gene products are shown in the Reference and Sequence Tables. The biochemical functions of the protein products of many of these genes are also given in the Reference, Sequence, Protein Group, Protein Group Matrix tables, MA_diff and MA_clust tables. Selected genes, gene components and gene products of the invention can be used to modulate many plant traits from architecture to yield to stress tolerance.

[1427] “Protein Degradation” Genes, Gene Components and Products Identified by Phenotypic Observations

[1428] “Protein degradation” genes herein were discovered and characterized from a much larger set of genes in experiments designed to find the genes associated with the increased number of lateral branches (and secondary inflorescences) that are formed per cauline node. In these experiments, “protein degradation” genes were identified using a mutant with these characteristics. The gene causing the changes was identified from the mutant gene carrying an inserted tag. The mutant plant was named 13B12-1 and the mutant was in the E2 conjugating enzyme gene of the ubiquitination process. Compared to “wild-type” parental plants, the mutant plants exhibited multiple lateral stems per node and multi-pistillated flowers. For more experimental detail, see Example section below.

[1429] Protein Degradation Genes, Gene Components and Products Identified by Differential Expression

[1430] “Protein degradation” genes were also identified by measuring the relative levels of mRNA products in the mutant plant 13B12-1 lacking the E2 conjugating enzyme versus a “wild-type” parental plant. Specifically, mRNAs were isolated from 13B12-1 and compared with mRNAs isolated from wild-type plants utilizing microarray procedures. The MA_diff Table(s) reports the transcript levels of the experiment (see EXPT ID: 108451). For transcripts that had higher levels in the samples than the control, a “+” is shown. A “−” is shown for when transcript levels were reduced in root tips as compared to the control. For more experimental detail see the Example section below.

[1431] Protein Degradation genes are those sequences that showed differential expression as compared to controls, namely those sequences identified in the MA_diff tables with a “+” or “−” indication.

[1432] Protein Degradation Genes Identified by Cluster Analyses of Differential Expression

[1433] Protein Degradation Genes Identified by Correlation to Genes that are Differentially Expressed

[1434] As described above, the transcription profiles of genes that act together are well correlated. Applicants not only have identified the genes that are differentially expressed in the microarray experiments, but also have identified the genes that act in concert with them. The MA_clust table indicates groups of genes that have well correlated transcription profiles and therefore participate in the same pathway or network.

[1435] A pathway or network of Protein Degradation genes is any group in the MA_clust that comprises a cDNA ID that also appears in Expt ID 108451 of the MA_diff table(s).

[1436] Protein Degradation Genes Identified by Correlation to Genes that Cause Physiological Consequences

[1437] Additionally, the differential expression data and the phenotypic observations can be merged to identify pathways or networks of Protein Degradation genes. A group in the MA_clust is considered a Protein Degradation pathway or network if the group comprises a cDNA ID that also appears in Knock-in or Knock-out tables that causes one or more of the phenotypes described in section above.

[1438] Protein Degradation Genes Identified By Amino Acid Sequence Similarity

[1439] Protein Degradation genes from other plant species typically encode polypeptides that share amino acid similarity to the sequences encoded by corn and Arabidopsis Protein Degradation genes. Groups of Protein Degradation genes are identified in the Protein Group table. In this table, any protein group that comprises a peptide ID that corresponds to a cDNA ID member of a Protein Degradation pathway or network is a group of proteins that also exhibits Protein Degradation functions/utilities.

[1440] These differentially expressed genes include genes associated with the degradation process and the genes whose expression is disturbed by the aberrant ubiquitination.

[1441] Examples of phenotypes, biochemical activities, and transcription profiles that can be modulated using these genes, gene components and gene products are described above and below.

[1442] III.D.6.b. Use of “Protein Degradation” Genes, Gene Components and Products to Modulate Phenotypes

[1443] The “protein degradation” genes, their components and products of the instant invention are useful for modulating one or more processes required for post-translational modification (e.g., ubiquitination) and degradation or inactivation of substrate proteins and also the pathways and processes that are associated with protein inactivation that are important for either or all of the following: (i) cell proliferation; (ii) cell differentiation; and (iii) cell death. The “protein degradation” genes, gene components and gene products are useful to alter or modulate one or more phenotypes including cell proliferation and cell size.

[1444] The intracellular levels of many proteins are regulated by ubiquitin-proteasome proteolysis. Without proper regulation of protein levels, normal cell differentiation can be altered. Examples of cell differentiation and development can be modulated by the genes and gene products of this invention include root size (such as length of primary roots or length of lateral roots) and function; branching and stem formation (such as multiple pistils, multiple lateral stems or secondary inflorescence per cauline node, and internode length) and cell differentiation and/or development in response to hormones (such as Auxin).

[1445] Programmed cell death can result from specific and targeted degradation of critical substrate proteins (e.g., transcription factors, enzymes, and proteins involved in signal transduction). Thus, alteration of “protein degradation” genes, their gene products, and the corresponding substrate proteins that they are acting upon are useful to modulate the vigor and yield of the plant overall as well as distinct cells, organs, or tissues. Traits that can be modulated by these genes and gene products include sterility or reproduction and seedling lethality.

[1446] Uses of Plants that are Modified as Described Above

[1447] Genes that control fundamental steps in regulatory pathways, such as protein inactivation, that in turn influence cascades and networks of other genes and processes are extremely useful. They and their component parts can be used selectively to manipulate development in specific cells, tissues and organs, including meristems when genes are designed to inactivate the normal genes only in specific cells, tissues and organs or to promote protein production where it is not normally produced. They can also be used to promote/control cell death.

[1448] Other “protein degradation” genes described here are components of the pathways determining organ identity and phenotypes. These and their component parts are also useful for modifying the characteristics of specific cells, tissues and organs when regulated appropriately. Thus “protein degradation” genes have wide utility for achieving the following: better plant survival by decreased lodging; better responses to high plant density; better stress tolerance; better animal (including human) nutrition values; improved dietary mineral nutrition; more vigor, growth rate and yield in terms of biomass; root/tuber yield (in terms of number, size, weight, or harvest index); content and composition, e.g. amino acid, jasmonate, oil, protein and starch; number of flowers; seed yield (e.g. number, size, weight, harvest index, content and composition, e.g. amino acid, jasmonate, oil, protein and starch); and fruit yield (e.g. number, size, weight, harvest index, post harvest quality, content and composition, e.g. amino acid, jasmonate, oil, protein and starch).

[1449] To regulate any of the phenotype(s) above, activities of one or more of the “protein degradation” genes or gene products can be modulated and tested by screening for the desired trait. Specifically, the gene, mRNA levels, or protein levels can be altered in a plant utilizing the procedures described herein and the phenotypes can be assayed. In addition, a synthetic molecule containing specific domains from “protein degradation” genes or gene product and/or in combination with other domains from gene products that are not necessarily related to protein degradation pathway can be constructed to target the degradation or inactivation of specific substrate proteins. As an example, a plant can be transformed according to Bechtold and Pelletier (1998, Methods. Mol. Biol. 82:259-266) and/or screened for variants as in Winkler et al. (1998) Plant Physiol 118: 743-50 and visually inspected for the desired phenotype or metabolically and/or functionally assayed according to Dolan et al. (1993, Development 119: 71-84), Dolan et al. (1997, Development 124: 1789-98), Crawford and Glass (1998, Trends Plant Science 3: 389-95), Wang et al. (1998, PNAS USA 95: 15134-39), Gaxiola et al. (1998, PNAS USA 95: 4046-50), Apse et al. (1999, Science 285: 1256-58), Fisher and Long (1992, Nature 357: 655-60), Schneider et al. (1998, Genes Devel 12: 2013-21) and Hirsch (1999, Curr Opin Plant Biol. 2: 320-326).

[1450] Use of Protein Degradation Genes, Gene Components and Products to Modulate Biochemical Activities

[1451] One or more of the “protein degradation” genes and their components can be used to modulate biochemical or metabolic activities, processes and/or pathways such as those noted below. Such biological activities can be measured according to the citations included in the Table below:

| | BIOCHEMICAL OR | |
|---|---|---|
| | METABOLIC ACTIVITIES | CITATIONS INCLUDING |
| PROCESS | AND/OR PATHWAYS | ASSAYS |
| Growth, Differentiation and | Auxin response | Schwechheimer et al, Science 292: |
| Development | | 1379 (2001); |
| | | Leyser et al, Nature 8: 161 (1993); |
| | | Lasswell et al, Plant Cell 12: 2395 |
| | | (2000) |
| | Photomorphogenesis via leaf | Schwechheimer et al, Science 292: |
| | cells and meristems | 1379 (2001) |
| | Apical dominance via shoot | Schwechheimer et al, Science 292: |
| | meristems | 1379 (2001) |
| | Lateral root development via root | Xie et al, Genes Dev 14: 3024 |
| | meristem | (2000) |
| | Hypocotyl, shoot elongation by | Nagpal et al, Plant Physiol 123: 563 |
| | hormone controlled process | (2000) |
| Gene Expression and related | mRNA stability | Johnson et al, PNAS 97: 13991 |
| cellular processes | | (2000); |
| | Gene activation | Pham and Sauer, 289: 2357 (2000) |
| | Cell division and cell cycle | King et al, Cell 81: 279 (1995); |
| | control in meristems | Ciechanover et al, Cell 37: 57 |
| | | (1984); |
| | | Finley et al, Cell 37: 43 (1984); |
| | | Robzyk et al, Science 287: 501 |
| | | (2000) |
| | Chromatin remodeling | Roest et al, Cell 86: 799 (1996) |
| | Post-translational modification | Biederer et al, Science 278: 1806 |
| | and organelle targeting of | (1997) |
| | proteins | |

[1452] Other biological activities that can be modulated by the “protein degradation” gene, gene components and products are listed in the Reference tables. Assays for detecting such biological activities are described in the Protein Domain table.

[1453] III.D.6.d. Use of Protein Degradation Genes, Gene Components and Products to Modulate Transcription Levels of Other Genes

[1454] The expression of many genes is “up regulated” or “down regulated” in the 13B12-1 mutant because some protein degradation genes and their products are integrated into complex networks that regulate transcription of many other genes. Some protein degradation genes are therefore useful for modifying the transcription of other genes and hence complex phenotypes, as described above. Profiles of “protein degradation” genes are described in the Table below with associated biological activities. “Up-regulated” profiles are those where the gene produces mRNA levels that are higher in the 13B12-1 as compared to wild-type plant; and vice-versa for “down-regulated” profiles.

| | | | EXAMPLES OF |
|---|---|---|---|
| | TYPE OF GENES | PHYSIOLOGICAL | BIOCHEMICAL |
| | WHOSE | CONSEQUENCES OF | ACTIVITIES WHOSE |
| TRANSCRIPT | TRANSCRIPTS | MODIFYING GENE | TRANSCRIPTS ARE |
| LEVELS | ARE CHANGED | PRODUCT LEVELS | CHANGED |
| Up Regulated | Genes induced as | Shoot formation | Transcription |
| Transcripts | a consequence of | Lateral stem, lateral | Activators and |
| | mutant | and main | Repressors |
| | ubiquitination | inflorescence | Chromatin Structure |
| | degradation | development | and/or Localized |
| | system | Internode | DNA Topology |
| | Genes repressed | elongation | determining proteins |
| | by “protein | Node determination | Methylated DNA |
| | degradation” | and development | binding proteins |
| | system directly or | Root formation | Kinases, |
| | indirectly | Lateral root | Phosphatases |
| | Genes repressed | development | Signal transduction |
| | or mRNAs | Proper response to | pathway proteins |
| | degraded as a | Auxin and other | Transporters |
| | consequence of | growth regulators | Metabolic Enzymes |
| | mutant | Seed dormancy and | Cell cycle |
| | ubiquitination | seed development | checkpoint proteins |
| | degradation | Resistance to | Cell Membrane |
| | process | drought and other | Structure And |
| | | forms of stress | Proteins |
| | | Secondary | Cell Wall Proteins |
| | | metabolite | Proteins involved in |
| | | biosynthesis | secondary |
| | | | metabolism |
| | | | Seed storage |
| | | | metabolism |
| Down Regulated | Genes activated | | |
| Transcripts | by “protein | | |
| | degradation” | | |
| | systems directly | | |
| | or indirectly | | |

[1455] “Protein degradation” genes and gene products can be modulated alone or in combination as described in the introduction. Of particular interest are combination of these genes and gene products with those that modulate hormone responses and/or metabolism. Hormone responsive and metabolism genes and gene products are described in more detail in the sections above. Such modification can lead to major changes in plant architecture and yield.

### Use of Promoters and “Protein Degradation Genes, Gene Components and Products”

[1456] Promoters of “protein degradation” genes, as described in the Reference tables, for example, can be used to modulate transcription of any polynucleotide, plant or non plant to achieve synthesis of a protein in association with production of the ubiquitination-proteasome pathway or the various cellular systems associated with it. Additionally such promoters can be used to synthesize antisense RNA copies of any gene to reduce the amount of protein product produced, or to synthesize RNA copies that reduce protein formation by RNA interference. Such modifications can make phenotypic changes and produce altered plants as described above.

[1457] III.D.7. Carotenogenesis Responsive Genes, Gene Components and Products

[1458] Carotenoids serve important biochemical functions in both plants and animals. In plants, carotenoids function as accessory light harvesting pigments for photosynthesis and to protect chloroplasts and photosystem II from heat and oxidative damage by dissipating energy and scavenging oxygen radicals produced by high light intensities and other oxidative stresses. Decreases in yield frequently occur as a result of light stress and oxidative stress in the normal growth ranges of crop species. In addition light stress limits the geographic range of many crop species. Modest increases in oxidative stress tolerance would greatly improve the performance and growth range of many crop species. The development of genotypes with increased tolerance to light and oxidative stress would provide a more reliable means to minimize crop losses and diminish the use of energy-costly practices to modify the soil environment.

[1459] In animals carotenoids such as beta-carotene are essential provitamins required for proper visual development and function. In addition, their antioxidative properties are also thought to provide valuable protection from diseases such as cancer. Modest increases in carotenoid levels in crop species could produce a dramatic effect on plant nutritional quality. The development of genotypes with increased carotenoid content would provide a more reliable and effective nutritional source of Vitamin A and other carotenoid derived antioxidants than through the use of costly nutritional supplements.

[1460] Genetic changes produced through DNA mutation in a plant can result in the modulation of many genes and gene products. Examples of such mutation altered genes and gene products are shown in the Reference and Sequence Tables. These genes and/or products are responsible for effects on traits such as plant vigor, nutritional content and seed yield.

[1461] While carotenoid synthesis and/or oxidative stress responsive polynucleotides and gene products can act alone, combinations of these polynucleotides also affect growth and development. Useful combinations include different carotenoid biosynthetic polynucleotides and/or gene products that have similar transcription profiles or similar biological activities, and members of the same or similar biochemical pathways. In addition, the combination of an carotenoid synthesis or oxidative stress protective polynucleotide and/or gene product with another environmentally responsive polynucleotide is also useful because of the interactions that exist between hormone-regulated pathways, stress pathways, nutritional pathways and development. Here, in addition to polynucleotides having similar transcription profiles and/or biological activities, useful combinations include polynucleotides that may have different transcription profiles but which participate in a common pathway.

[1462] Such carotenoid synthesis/oxidative stress tolerance genes and gene products can function to either increase or dampen the above phenotypes or activities either in response to changes in light intensity or in the absence of osmotic fluctuations. They were discovered and characterized from a much larger set of genes by experiments designed to find genes whose mRNA products participate in carotenogenesis. These experiments made use of an Arabidopsis mutant (Or) having an accumulation of up to 500 times more beta-carotene than wild-type in non-photosynthetic tissues.

[1463] Microarray technology allows monitoring of gene expression levels for thousands of genes in a single experiment. This is achieved by hybridizing labeled fluorescent cDNA pools to glass slides that contain spots of DNA (Schena et al. (1995) Science 270: 467-70). The USArabidopsis Functional Genomics Consortium (AFGC) has recently made public the results from such microarray experiments conducted with AFGC chips containing some 10,000 non-redundant ESTs, selected from about 37,000 randomly sequenced ESTs generated from mRNA of different tissues and developmental stages.

[1464] The sequences of the ESTs showing at least two-fold increases or decreases in the mutant plant compared with wild type seedlings were identified, compared to the Ceres full length cDNA and genomic sequence databanks, and equivalent Ceres clones identified. MA_diff Table reports the results of this analysis, indicating those Ceres clones which are up or down regulated over controls, thereby indicating the Ceres clones which represent Carotenoid synthesis/oxidative stress tolerance responsive genes. The MA_diff Table(s) reports the transcript levels of the experiment (see EXPT ID: Cauliflower (relating to SMD 5329, SMD 5330)). For transcripts that had higher levels in the samples than the control, a “+” is shown. A “−” is shown for when transcript levels were reduced in root tips as compared to the control. For more experimental detail see the Example section below.

[1465] Carotenogenesis genes are those sequences that showed differential expression as compared to controls, namely those sequences identified in the MA diff tables with a “+” or “−” indication.

[1466] Carotenogenesis Genes Identified by Cluster Analyses of Differential Expression

[1467] Carotenogenesis Genes Identified by Correlation to Genes that are Differentially Expressed

[1468] As described above, the transcription profiles of genes that act together are well correlated. Applicants not only have identified the genes that are differentially expressed in the microarray experiments, but also have identified the genes that act in concert with them. The MA_clust table indicates groups of genes that have well correlated transcription profiles and therefore participate in the same pathway or network.

[1469] A pathway or network of Carotenogenesis genes is any group in the MA_clust that comprises a cDNA ID that also appears in Expt ID Cauliflower (relating to SMD 5329, SMD 5330) of the MA_diff table(s).

[1470] Carotenogenesis Genes Identified by Correlation to Genes that Cause Physiological Consequences

[1471] Additionally, the differential expression data and the phenotypic observations can be merged to identify pathways or networks of Carotenogenesis genes. A group in the MA_clust is considered a Carotenogenesis pathway or network if the group comprises a cDNA ID that also appears in Knock-in or Knock-out tables that causes one or more of the phenotypes described in section above.

[1472] Carotenogenesis Genes Identified by Amino Acid Sequence Similarity

[1473] Carotenogenesis genes from other plant species typically encode polypeptides that share amino acid similarity to the sequences encoded by corn and Arabidopsis Carotenogenesis genes. Groups of Carotenogenesis genes are identified in the Protein Group table. In this table, any protein group that comprises a peptide ID that corresponds to a cDNA ID member of a Carotenogenesis pathway or network is a group of proteins that also exhibits Carotenogenesis functions/utilities.

[1474] III.D.7.a. Use of Carotenoid Synthesis/Oxidative Stress Tolerance Responsive Genes, Gene Components and Products to Modulate Phenotypes

[1475] Carotenoid synthesis/oxidative, stress tolerance genes and gene products are useful to or modulate one or more phenotypes including growth rate; whole plant, including height, flowering time, etc.); seedling; organ (such as stem, leaves, roots, flowers, fruits, or seed yield, size, or weight); seed development; embryo; germination; cell differentiation; chloroplasts; plant nutrition; uptake and assimilation of organic compounds; uptake and assimilation of inorganic compounds; animal (including human) nutrition; improved dietary mineral nutrition; stress responses; drought; cold; and osmotic.

[1476] To improve any of the phenotype(s) above, activities of one or more of the Carotenoid synthesis/oxidative stress tolerance genes or gene products can be modulated and tested by screening for the desired trait. Specifically, the gene, mRNA levels, or protein levels can be altered in a plant utilizing the procedures described herein and the phenotypes can be assayed. As an example, a plant can be transformed according to Bechtold and Pelletier (1998, Methods. Mol. Biol. 82:259-266) and/or screened for variants as in Winkler et al. (1998) Plant Physiol 118: 743-50 and visually inspected for the desired phenotype or metabolically and/or functionally assayed according to Friedrich, (1999, JAMA 282: 1508), Kumar et al. (1999, Phytochemistry 51: 847-51), La Rocca et al. (2000, Physiologia Plantarum 109: 51-7) and Bartley (1994, In: Ann Rev Plant Physiol Plant Molec Biol, Jones and Somerville, eds, Annual Reviews Inc, Palo Alto, Calif.).

[1477] III.D.7.b. Use of Carotenoid Synthesis/Oxidative Stress Tolerance Responsive Genes, Gene Components and Products to Modulate Biochemical Activities

[1478] The activities of one or more of the carotenoid synthesis/oxidative stress tolerance genes can be modulated to change biochemical or metabolic activities and/or pathways such as those noted below. Such biological activities can be measured according to the citations included in the Table below:

| | BIOCHEMICAL OR | |
|---|---|---|
| | METABOLIC ACTIVITIES | CITATIONS INCLUDING |
| PROCESS | AND/OR PATHWAYS | ASSAYS |
| Growth, | Chloroplast biosynthesis | Kumar et al. (1999) Phytochemistry |
| Differentiation | | 51: 847-51 |
| and Development | | Fraser et al. (1994) Plant Physiol |
| | | 105: 405-13 |
| Metabolism | Carotenoid biosynthesis | Kumar et al. (1999) Phytochemistry |
| | | 51: 847-51 |
| | Herbicide resistance | La Rocca et al. (2000) Physiolgia |
| | | Plantarum 109: 51-57 |
| | Regulate abscisic acid levels | Tan et al. (1997) PNAS USA 94: |
| | | 12235-40 |
| | Drought, cold and osmotic | Tan et al. (1997) PNAS USA 94: |
| | tolerance | 12235-40 |

[1479] Other biological activities that can be modulated by the Carotenoid synthesis, oxidative stress tolerance genes and gene products are listed in the Reference Tables. Assays for detecting such biological activities are described in the Protein Domain table.

[1480] Profiles of these different carotenoid synthesis/oxidative stress tolerance responsive genes are shown in the Table below together with examples of the kinds of associated biological activities.

| | | | EXAMPLES OF |
|---|---|---|---|
| TRANSCRIPT | | PHYSIOLOGICAL | BIOCHEMICAL |
| LEVELS | TYPE OF GENES | CONSEQUENCES | ACTIVITY |
| Up regulated | Genes induced during | Gene | Transporters |
| transcripts | carotenoid synthesis/ | Repression/Induction | Metabolic |
| | oxidative stress | activity | enzymes |
| | tolerance activity | Cell cycle progression | Kinases and |
| | | Chromatin | phosphatases |
| | | condensation | Transcription |
| | | Synthesis of | activators |
| | | metabolites and/or | Change in |
| | | proteins | chromatin |
| | | Modulation of | structure and/or |
| | | transduction pathways | localized DNA |
| | | Specific gene | topology |
| | | transcription initiation | |
| Down-regulated | Genes repressed | Gene | Transcription |
| transcripts | during carotenoid | repression/induction | factors |
| | synthesis/oxidative | activity | Change in |
| | stress tolerance | Changes in pathways | protein structure |
| | activity | and processes | by |
| | Genes with | operating in cells | phosphorylation |
| | discontinued | Changes in | (kinases) or |
| | expression or | metabolism other than | dephosphorylation |
| | unsTable mRNA in | carotenoid | (phosphatases) |
| | conditions of reduced | synthesis/oxidative | Change in |
| | carotenoid | stress tolerance | chromatin |
| | synthesis/oxidative | | structure and/or |
| | stress tolerance | | DNA topology |
| | | | Stability of |
| | | | factors for |
| | | | protein synthesis |
| | | | and degradation |
| | | | Metabolic |
| | | | enzymes |

### Use of Promoters of Carotenogenesis Responsive Genes

[1481] Promoters of Carotenogenesis responsive genes are useful for transcription of any desired polynucleotide or plant or non-plant origin. Further, any desired sequence can be transcribed in a similar temporal, tissue, or environmentally specific patterns as the Carotenogenesis responsive genes where the desired sequence is operably linked to a promoter of a Carotenogenesis responsive gene. The protein product of such a polynucleotide is usually synthesized in the same cells, in response to the same stimuli as the protein product of the gene from which the promoter was derived. Such promoter are also useful to produce antisense mRNAs to down-regulate the product of proteins, or to produce sense mRNAs to down-regulate mRNAs via sense suppression.

[1482] III.D.8. Viability Genes, Gene Components and Products

[1483] Plants contain many proteins and pathways that when blocked or induced lead to cell, organ or whole plant death. Gene variants that influence these pathways can have profound effects on plant survival, vigor and performance. The critical pathways include those concerned with metabolism and development or protection against stresses, diseases and pests. They also include those involved in apoptosis and necrosis. The applicants have elucidated many such genes and pathways by discovering genes that when inactivated lead to cell or plant death.

[1484] Herbicides are, by definition, chemicals that cause death of tissues, organs and whole plants. The genes and pathways that are activated or inactivated by herbicides include those that cause cell death as well as those that function to provide protection. The applicants have elucidated these genes.

[1485] The genes defined in this section have many uses including manipulating which cells, tissues and organs are selectively killed, which are protected, making plants resistant to herbicides, discovering new herbicides and making plants resistant to various stresses.

[1486] III.D.8.a. Identification of Viability Genes, Gene Components and Products

[1487] Viability genes identified here are defined as genes, gene components and products capable of inhibiting cell, tissue, organ or whole plant death or protecting cells, organs and plants against death and toxic chemicals or stresses. Examples of such viability genes and gene products are shown in the Reference, Sequence, Protein Group, Protein Group Matrix tables, MA_diff, MA_clust, Knock-in and Knock-out tables. The biochemical functions of the protein products of many of these genes determined from comparisons with known proteins are also given in the Reference tables.

[1488] Viability Genes, Gene Components and Products Identified by Phenotypic Observations

[1489] These genes were discovered and characterized from a much larger set of genes by experiments designed to find genes that cause serious disturbances in progeny survival, seed germination, development, embryo and/or seedling growth. In these experiments, viability genes were identified by either (1) ectopic expression of a cDNA in a plant or (2) mutagenesis of a plant genome. The plants were then cultivated and one or more of the following phenotypes, which varied from the parental wild-type was observed:
[1490] A. Gametophytic loss of progeny seedlings (detected from a parent on the basis of a linked herbicide resistance gene showing abnormal segregation ratios, as revealed by treating with herbicide)
[1491] B. Embryo death, resulting in some cases to loss of seed
[1492] C. Pigment variation in cotyledons and leaves, including absence of chlorophyll, which leads to seedling death.
   [1493] 1. Abinos
   [1494] 2. Yellow/greens
[1495] D. Cotyledons produced but no or few leaves and followed by seedling death.
[1496] E. Very small plantlets

[1497] The genes identified in these experiments are shown in Tables X.

[1498] Viability Genes Gene Components and Products Identified by Differential Expression

[1499] Viability genes were also identified from a much larger set of genes by experiments designed to find genes whose mRNA products changed in concentration in response to applications of different herbicides to plants. Viability genes are characteristically differentially transcribed in response to fluctuating herbicide levels or concentrations, whether internal or external to an organism or cell. The MA_diff Table reports the changes in transcript levels of various viability genes in entire seedlings at 0, 4, 8, 12, 24, and 48 hours after a plant was sprayed with a Hoagland's nutrient solution enriched with either 2,4 D (Trimec), Glean, Grassgetter, Roundup, or Finale herbicides as compared to seedlings sprayed with Hoagland's solution only.

[1500] The MA_diff Table(s) reports the transcript levels of the experiment (see EXPT ID: 108467, 107871, 107876, 108468, 107881, 108465, 107896, 108466, 107886, 107891, 108501). For transcripts that had higher levels in the samples than the control, a “+” is shown. A “−” is shown for when transcript levels were reduced in root tips as compared to the control. For more experimental detail see the Example section below.

[1501] Viability genes are those sequences that showed differential expression as compared to controls, namely those sequences identified in the MA_diff tables with a “+” or “−” indication.

[1502] Viability Genes Identified by Cluster Analyses of Differential Expression

[1503] Viability Genes Identified by Correlation to Genes that are Differentially Expressed

[1504] As described above, the transcription profiles of genes that act together are well correlated. Applicants not only have identified the genes that are differentially expressed in the microarray experiments, but also have identified the genes that act in concert with them. The MA_clust table indicates groups of genes that have well correlated transcription profiles and therefore participate in the same pathway or network.

[1505] A pathway or network of Viability genes is any group in the MA_clust that comprises a cDNA ID that also appears in Expt ID 108467, 107871, 107876, 108468, 107881, 108465, 107896, 108466, 107886, 107891, 108501 of the MA_diff table(s).

[1506] Viability Genes Identified by Correlation to Genes that Cause Physiological Consequences

[1507] Additionally, the differential expression data and the phenotypic observations can be merged to identify pathways or networks of Viability genes. A group in the MA_clust is considered a Viability pathway or network if the group comprises a cDNA ID that also appears in Knock-in or Knock-out tables that causes one or more of the phenotypes described in section above.

[1508] Viability Genes Identified by Amino Acid Sequence Similarity

[1509] Viability genes from other plant species typically encode polypeptides that share amino acid similarity to the sequences encoded by corn and Arabidopsis Viability genes. Groups of Viability genes are identified in the Protein Group table. In this table, any protein group that comprises a peptide ID that corresponds to a cDNA ID member of a Viability pathway or network is a group of proteins that also exhibits Viability functions/utilities.

[1510] It is assumed that those gene activity changes in response to the toxic herbicides are either responsible, directly or indirectly, for cell death or reflect activation of defense pathways. These genes are therefore useful for controlling plant viability.

[1511] Examples of phenotypes, biochemical activities, or transcript profiles that can be modulated using selected viability gene components are described above and below.

[1512] III.D.8.b. Use of Viability Genes, Gene Components and Products to Modulate Phenotypes

[1513] Deficiencies in viability genes can cause cell death at various rates and under various conditions. Viability genes can be divided into two classes; (1) those that lead to cell death under permissive growth conditions and (2) those that cause cell demise under restrictive conditions. Examples of the first class are viability genes which encode toxins or which participate in the programmed cell death pathway(s). Disruption of metabolic pathways, such as amino acid synthesis, may not cause death when the cell is supplemented with appropriate amino acids, but can cause death under more restrictive conditions.

[1514] Some deficiencies in viability genes identified cause the organism as a whole to die, while other genes cause death only of a specific subset of cells or organs. For example, genes identified from embryo viability phenotypes can cause an entire organism to die. In contrast, genes characterized from gametophytic lethals may inhibit cell growth only in a select set of cells. In addition, some viability genes may not cause an immediate demise. A seedling lethal phenotype is one such example, where a seed germinates and produces cotyledons but the plant dies before producing any true leaves. Yellow-green pigment mutants provide yet another set of examples. In some cases, the plant produces a number of yellow-green leaves but dies before producing any seed, due in part, to the necessity to produce chlorophyll in functioning chloroplasts to fix CO₂.

[1515] Viability genes, in which mutational deficiencies lead to death, carry no duplicates in the haploid plant genome. They thus may be especially likely to promote viability and vigor when expressed more optimally in a plant, in specific tissues or throughout the plant.

[1516] Proteins which lead to death when inactivated, and other proteins in the pathways in which they act, are potential targets for herbicides. In this kind of application, chemicals specifically capable of interacting with such proteins are discovered. Typically, this could be done by designing a gene involving the relevant viability gene, that also facilitates a rapid easily measured assay for the functioning of the protein product, and treating plants containing the new genes with the potential herbicides. Those chemicals specifically interfering with the protein activity can then easily be selected for further development.

[1517] Genes whose products interact directly with a herbicide can also be modified such that the herbicide no longer inactivates the protein. Such genes are useful for making herbicide resistant plants, valuable in agriculture.

[1518] Many of the genes activated or inactivated by the herbicides define genes involved in the pathways that protect the plant against damage and stresses. These genes and gene components, especially those regulating such pathways, are especially useful for enhancing the ability of plants to withstand specific stresses, including herbicides. [See the sections on Stress responsive genes, gene components and products.]

[1519] Genes that cause cellular death can be used to design new genes that cause death of specific cells and tissues and hence new valuable products. For example, activation of genes causing death in cells specifying seeds can be used to produce fruits lacking seeds. They can also be used to prevent cell death by pathogens and pests.

[1520] The genes and gene components of the instant invention are useful to modulate one or more processes that affect viability and vigor at the (1) cellular level; (2) organelle level; (3) organ level; or (4) overall organism level.

[1521] Phenotypes that are modulated by these genese and gene components include (1) at the cellular level: cell size, cell differentiation, cell division, cell longevity, cell position, and cytotoxins; (2) at the organelle level: chloroplasts and/or mitochondria; (3) at the organ level: flower number or size; seed size, number or composition (amino Acid, carbohydrates, lipid, and secondary metabolites); fruit size, number, or composition (amino Acid, carbohydrates, lipid, and secondary metabolites); fruit drop, fruit ripening; leaf (size, composition, amino acid, carbohydrates, lipid, and secondary metabolites, photoefficiency, abscission, or senescence); stem; or root; and (4) at the overall organism level: vigor (e.g. increased biomass), stress tolerance (e.g. cold, drought, heat, herbicide, oxidative, and salt); and pathogen resistance

[1522] To regulate any of the phenotype(s) above, activities of one or more of the viability genes or gene products can be modulated in an organism and tested by screening for the desired trait. Specifically, the gene, mRNA levels, or protein levels can be altered in a plant utilizing the procedures described herein and the phenotypes can be assayed. As an example, a plant can be transformed according to Bechtold and Pelletier (Methods. Mol. Biol. 82:259-266 (1998)) and/or screened for variants as in Winkler et al., Plant Physiol. 118: 743-50 and visually inspected for the desired phenotype or metabolically and/or functionally assayed.

[1523] III.D.8.c. Use of Viability Genes, Gene Components and Products to Modulate Biochemical Activities

[1524] The viability genes, their components and/or products can be used to modulate processes, biochemical or metabolic activities and/or pathways such as those noted below. Such biological activities can be measured according to the citations included in the table below:

| | BIOCHEMICAL OR | |
|---|---|---|
| | METABOLIC ACTIVITIES | CITATIONS INCLUDING |
| PROCESS | AND/OR PATHWAYS | ASSAYS |
| Amino Acid Synthesis | Aceto-lactate synthase | Hershey et al. (1999) Plant |
| | | Mol. Biol. 40, 795-806 |
| Cell Wall Synthesis | Cellulose synthase | Peng et al. (2001) Plant |
| | | Physiol. 126, 981-982 |
| | | Kawagoe and Delmer |
| | | (1997) Genet Eng. 19, 63-87 |
| Nucleotide Synthesis | Coenzyme A biosynthesis | Kupke et al. (2001) J. Biol. |
| | | Chem. 276, 19190-19196 |
| Lipid Synthesis | Oleosin biosynthesis | Singh et al. (2000) |
| | | Biochem. Soc. Trans. 28, |
| | | 925-927 |
| | | Zou et al. (1996). Plant Mol. |
| | | Biol. 31, 429-433 |
| Hormone Signaling | Brassinolide and light signal | Kang et al. (2001) Cell 105, |
| Pathways | transduction | 625-636 |
| Hormone Biosynthesis | Cytokinin biosynthesis | Takei et al, (2001) J. Biol. |
| | | Chem. 276, 26405-26410 |
| Secondary Metabolites | Carotenoid biosynthesis | Estevez et al. (2001) J. Biol. |
| | | Chem. 276, 22901-22909 |
| | | Carol and Kuntz (2001) |
| | | Trendy Plant Sci. 6, 31-36 |
| | | Pogson and Rissler (2001) |
| | | Phil. Trans. Roy. Soc. Lord. |
| | | B 355, 1395-1400 |
| Clearing of Toxic | Ubiquitination | |
| Substances | | |
| Growth, Differentiation | Farnesylation | Pei et al (1998) Science 282: |
| And Development | Nitrogen Metabolism | 287-290; Cutler et al. (1996) |
| | | Science 273: 1239 |
| | | Goupil et al (1998) J Exptl |
| | | Botany 49: 1855-62 |
| Water Conservation And | Stomatal Development And | Allen et al. (1999) Plant |
| Resistance To Drought | Physiology | Cell 11: 1785-1798 |
| And Other Related | Stress Response Pathways | Li et al. 2000 Science 287: |
| Stresses | Inhibition Of Ethylene | 300-303 |
| | Production Under Low Water | Burnett Et Al 2000. J. Exptl |
| | Potential | Botany 51: 197-205 |
| | Proline And Other Osmolite | Raschke (1987) In: Stomatal |
| | Synthesis And Degradation | Function Zeiger et al. Eds., |
| | | 253-279 |
| | | Bush And Pages (1998) |
| | | Plant Mol. Biol. 37: 425-35 |
| | | Spollen Et Al (2000) Plant |
| | | Physiol. 122: 967-976 |
| | | Hare et al. (1998) Plant, Cell |
| | | And Environment 21: 535-553; |
| | | Hare et al. (1999) J. |
| | | Exptl. Botany 50: 413-434 |
| Programmed cell death | Proteases | Kamens et al. (1995) J. Biol. |
| | DNA endonucleases | Chem. 270, 15250-15256 |
| | Mitochondriae uncoupling | Wang et al. (2001) |
| | proteins | Anticancer Res. 21, 1789-1794 |
| | | Drake et al. (1996) Plant |
| | | Mol. Biol 304, 755-767 |
| | | Mittler and Lam (1995) |
| | | Plant Cell 7, 1951-1962 |
| | | Mittler and Lam (1995) |
| | | Plant Physiol. 108, 489-493 |
| | | Thelen and Northcote |
| | | (1989) Planta 179, 181-195 |
| | | Hanak and Jezek (2001) |
| | | FEBS Lett. 495, 137-141 |
| | Plasmalemma and Tonoplast | Macrobbie (1998) Philos |
| | Ion Channel Changes | Trans R Soc Lond B Biol |
| | Ca2+ Accumulation | Sci 353: 1475-88; Li et al |
| | K+ Efflux | (2000) Science 287: 300-303; |
| | Activation Of Kinases And | Barkla et al. (1999) |
| | Phosphatases | Plant Physiol. 120: 811-819 |
| | | Lacombe et al. (2000) Plant |
| | | Cell 12: 837-51; Wang et |
| | | al. (1998) Plant Physiol |
| | | 118: 1421-1429; Shi et al. |
| | | (1999) Plant Cell 11: 2393-2406 |
| | | Gaymard et al. (1998) Cell |
| | | 94: 647-655 |
| | | Jonak et al. (1996) Proc. |
| | | Natl. Acad. Sci 93: 11274-79; |
| | | Sheen (1998) Proc. Natl. |
| | | Acad. Sci. 95: 975-80; Allen |
| | | et al. (1999) Plant Cell 11: |
| | | 1785-98 |

[1525] Other biological activities that can be modulated by the viability genes, their components and products are listed in the Reference tables. Assays for detecting such biological activities are described in the Protein Domain table.

[1526] III.D.8.d. Use of Viability Genes, Gene Components and Products to Modulate Transcript Levels of Other Genes

[1527] The expression of many genes is “up regulated” or “down regulated” following herbicide treatment and also in the leaf mutants, because some “viability” genes and their products are integrated into complex networks that regulate transcription of many other genes. Some “viability genes” are therefore useful for modifying the transcription of other genes and hence complex phenotypes, as described above. The data from differential expression experiments can be used to identify a number of types of transcript profiles of “viability genes”, including “early responders,” and “delayed responders”, “early responder repressors” and “delayed repressors”. Profiles of these different types responsive genes are shown in the Table below together with examples of the kinds of associated biological activities. “Up-regulated” profiles are those where the mRNA transcript levels are higher in the herbicide treated plants as compared to the untreated plants. “Down-regulated” profiles represent higher transcript levels in the untreated plant as compared to the herbicide treated plants.

| | | PHYSIOLOGICAL | EXAMPLES OF |
|---|---|---|---|
| | TYPE OF GENES | CONSEQUENCES | BIOCHEMICAL |
| | WHOSE | OF MODIFYING | ACTIVITIES WHOSE |
| TRANSCRIPT | TRANSCRIPTS ARE | GENE PRODUCT | TRANSCRIPTS ARE |
| LEVELS | CHANGED | LEVELS | CHANGED |
| Up Regulated | Early Responders | Suppression of | Transcription |
| Transcripts | To: | cell, tissue, organ | Factors |
| (Level At 4 Hr ≅ 0 Hr) | Gluphosinate | or plant death | Transporters |
| or | Chlorsulfuron | following: | Change In Cell |
| (Level At 4 Hr > 0 Hr) | Glyphosate | Herbicide | Membrane Structure |
| | and/or 2, 4-D | treatment or | Kinases And |
| | | under stress | Phosphatases |
| | | Activation of cell, | Germins, Germin- |
| | | tissue, organ or | like proteins, |
| | | plant death | Calcium-binding |
| | | following: | proteins and H₂O₂ |
| | | Herbicide | generating and |
| | | treatment or | H₂O₂ neutralizing |
| | | under stress | proteins. |
| | | | Transcription |
| | | | Activators |
| | | | Change In |
| | | | Chromatin Structure |
| | | | And/Or Localized |
| | | | DNA Topology |
| | | | Annexins, cell wall |
| | | | structural proteins |
| Up Regulated | Delayed Responders to | Suppression of | Transcription |
| Transcripts | Gluphosinate, | cell, tissue, organ | Factors |
| (Level At 4 Hr < 12 Hr) | Chlorsulfuron, | or plant death | Specific Factors |
| | Glyphosate and/or 2, 4-D | following: | (Initiation And |
| | | Herbicide | Elongation) For |
| | | treatment or | Protein Synthesis |
| | | under stress | Lipid transfer |
| | | Activation of cell, | proteins |
| | | tissue, organ or | Myrosinase-binding |
| | | plant death | proteins |
| | | following: | Sugar |
| | | Herbicide | interconverting |
| | | treatment or | enzymes |
| | | under stress | Maintenance Of |
| | | | mRNA Stability |
| | | | Maintenance Of |
| | | | Protein Stability |
| | | | Maintenance Of |
| | | | Protein-Protein |
| | | | Interaction |
| | | | Protein |
| | | | translocation factors |
| | | | RNA-binding |
| | | | proteins |
| | | | Centromere and |
| | | | cytoskeleton |
| | | | proteins |
| | | | Lipases |
| | | | Zn/Cu transporters |
| | | | Cell wall structural |
| | | | proteins |
| Down-Regulated | Early Responder | Suppression of | Transcription |
| Transcripts | Repressors Of Stress | cell, tissue, organ | Factors |
| (Level At 0 Hr ≅ 4 Hr) | Response State Of | or plant death | Change In Protein |
| or | Metabolism | following: | Structure By |
| (Level At 0 Hr > 4 Hr) | Genes With | Herbicide | Phosphorylation |
| | Discontinued | treatment or | (Kinases) Or |
| | Expression Or UnsTable | under stress | Dephosphoryaltion |
| | mRNA In Presence Of | Activation of cell, | (Phosphatases) |
| | Herbicide or Abiotic | tissue, organ or | Change In |
| | Stress | plant death | Chromatin Structure |
| | | following: | And/Or DNA |
| | | Herbicide | Topology |
| | | treatment or | H₂O₂ neutralizing |
| | | under stress | proteins |
| | | Zn/Cu transporters | Neutralizing |
| | | Cell wall | proteins including |
| | | structural proteins | SOD and GST |
| Down-Regulated | Delayed Responder | Suppression of | Transcription |
| Transcripts | Repressors Of ABA | cell, tissue, organ | Factors |
| (Level At 4 Hr > 12 Hr) | Function State Of | or plant death | Kinases And |
| | Metabolism | following: | Phosphatases |
| | Genes With | Herbicide | Stability Of Factors |
| | Discontinued | treatment or | For Protein |
| | Expression Or Unstable | under stress | Synthesis And |
| | mRNA In Presence Of | Activation of cell, | Degradation |
| | herbicide or Abiotic | tissue, organ or | Amino Acid |
| | Stress | plant death | biosynthesis |
| | | following: | proteins including |
| | | Herbicide | aspargive synthase |
| | | treatment or | Ca-binding proteins |
| | | under stress | Lipid biosynthesis |
| | | | proteins |
| | | | Lipases |
| | | | Zn/Cu transporters |
| | | | Cell wall structural |
| | | | proteins |

[1528] While viability modulating polynucleotides and gene products can act alone, combinations of these polynucleotides also affect growth and development.

### Use of Promoters of Viability Genes, Gene Components and Products

[1529] Promoters of viability genes can include those that are induced by (1) destructive chemicals, e.g. herbicides, (2) stress, or (3) death. These promoters can be linked operably to achieve expression of any polynucleotide from any organism. Specific promoters from viability genes can be selected to ensure transcription in the desired tissue or organ. Proteins expressed under the control of such promoters can include those that can induce or accelerate death or those that can protect plant cells organ death. For example, stress tolerance can be increased by using promoters of viability genes to drive transcription of cold tolerance proteins, for example. Alternatively, promoters induced by apoptosis can be utilized to drive transcription of antisense constructs that inhibit cell death.

[1530] III.D.9. Histone Deacetylase (Axel) Responsive Genes, Gene Components and Products

[1531] The deacetylation of histones is known to play an important role in regulating gene expression at the chromatin level in eukaryotic cells. Histone deacetylation is catalyzed by proteins known as histone deacetylases (HDAcs). HDAcs are found in multisubunit complexes that are recruited to specific sites on nuclear DNA thereby affecting chromatin architecture and target gene transcription. Mutations in plant HDAc genes cause alterations in vegetative and reproductive growth that result from changes in the expression and activities of HDAc target genes or genes whose expression is governed by HDAc target genes. For example, transcription factor proteins control whole pathways or segments of pathways and proteins also control the activity of signal transduction pathways. Therefore, manipulation of these types of protein levels is especially useful for altering phenotypes and biochemical activities.

[1532] Manipulation of one or more HDAc gene activities is useful to modulate the biological activities and/or phenotypes listed below. HDAc genes and gene products can act alone or in combination. Useful combinations include HDAc genes and/or gene products with similar biological activities, or members of the same, co-regulated or functionally related biochemical pathways. Such HDAc genes and gene products can function to either increase or dampen these phenotypes or activities.

[1533] Examples of genes whose expression is affected by alterations in HDAc activity are shown in the Reference and Sequence Tables. These genes and/or gene products are responsible for effects on traits such as inflorescence branching and seed production. They were discovered and characterized from a much larger set of genes by experiments designed to find genes whose mRNA products are affected by a decrease in HDAc gene activity. These experiments made use of an Arabidopsis mutant having severely reduced mRNA levels for the histone deactylase gene AtHDAC1.

[1534] Microarray technology allows monitoring of gene expression levels for thousands of genes in a single experiment. This is achieved by simultaneously hybridizing two differentially labeled fluorescent cDNA pools to glass slides that contain spots of DNA (Schena et al. (1995) Science 270: 467-70). The Arabidopsis Functional Genomics Consortium (AFGC) has recently made public the results from such microarray experiments conducted with AFGC chips containing 10,000 non-redundant ESTs, selected from 37,000 randomly sequenced ESTs generated from mRNA of different tissues and developmental stages.

[1535] The sequences of the ESTs showing at least two-fold increases or decreases over the controls were identified, compared to the Ceres full-length cDNA and genomic sequence databanks, and identical Ceres clones identified. MA_diff table reports the results of this analysis, indicating those Ceres clones which are up or down regulated over controls, thereby indicating the Ceres clones which are HDAc genes. The MA_diff Table(s) reports the transcript levels of the experiment (see EXPT ID: Axel (relating to SMD 6654, SMD 6655)). For transcripts that had higher levels in the samples than the control, a “+” is shown. A “−” is shown for when transcript levels were reduced in root tips as compared to the control. For more experimental detail see the Example section below.

[1536] Histone Deacetylase genes are those sequences that showed differential expression as compared to controls, namely those sequences identified in the MA_diff tables with a “+” or “−” indication.

[1537] Histone Deacetylase Genes Identified by Cluster Analyses of Differential Expression

[1538] Histone Deacetylase Genes Identified by Correlation to Genes that are Differentially Expressed

[1539] As described above, the transcription profiles of genes that act together are well correlated. Applicants not only have identified the genes that are differentially expressed in the microarray experiments, but also have identified the genes that act in concert with them. The MA_clust table indicates groups of genes that have well correlated transcription profiles and therefore participate in the same pathway or network.

[1540] A pathway or network of Histone Deacetylase genes is any group in the MA_clust that comprises a cDNA ID that also appears in Expt ID Axel (relating to SMD 6654, SMD 6655) of the MA_diff table(s).

[1541] Histone Deacetylase Genes Identified by Correlation to Genes that Cause Physiological Consequences

[1542] Additionally, the differential expression data and the phenotypic observations can be merged to identify pathways or networks of Histone Deacetylase genes. A group in the MA_clust is considered a Histone Deacetylase pathway or network if the group comprises a cDNA ID that also appears in Knock-in or Knock-out tables that causes one or more of the phenotypes described in section above.

[1543] Histone Deacetylase Genes Identified by Amino Acid Sequence Similarity

[1544] Histone Deacetylase genes from other plant species typically encode polypeptides that share amino acid similarity to the sequences encoded by corn and Arabidopsis Histone Deacetylase genes. Groups of Histone Deacetylase genes are identified in the Protein Group table. In this table, any protein group that comprises a peptide ID that corresponds to a cDNA ID member of a Histone Deacetylase pathway or network is a group of proteins that also exhibits Histone Deacetylase functions/utilities.

[1545] III.D.9.a. Use of HDAc Genes, Gene Components and Products to Modulate Phenotypes

[1546] HDAc genes and gene products are useful to or modulate one or more phenotypes including growth rate; whole plant, including height, flowering time, etc.; seedling; organ; seed development; embryo; germination, and cell differentiation.

[1547] To improve any of the phenotype(s) above, activities of one or more of the HDAc genes or gene products can be modulated and tested by screening for the desired trait. Specifically, the gene, mRNA levels, or protein levels can be altered in a plant utilizing the procedures described herein and the phenotypes can be assayed. As an example, a plant can be transformed according to Bechtold and Pelletier (1998, Methods. Mol. Biol. 82:259-266) and visually inspected for the desired phenotype or metabolically and/or functionally assayed according to Wu et al. (2000, Plant J 22: 19-27), Hu et al. (2000, J Biol Chem 275: 15254-64), Johnson and Turner (1999, Semin Cell Dev Biol 10: 179-88), Koyama et al. (2000, Blood 96: 1490-5), Wu et al. (2000, Plant J 22: 19-27), Li (1999, Nature Genetics 23: 5-6), Adams et al. (2000, Development 127: 2493-2502) and Lechner et al. (2000, Biochemistry 39: 1683-92).

[1548] III.D.9.b. Use of HDAc Development Genes, Gene Components and Products to Modulate Biochemical Activities

[1549] The activities of one or more of the HDAc genes can be modulated to change biochemical or metabolic activities and/or pathways such as those noted below. Such biological activities can be measured according to the citations included in the Table below:

| | BIOCHEMICAL OR | |
|---|---|---|
| | METABOLIC ACTIVITIES | CITATIONS INCLUDING |
| PROCESS | AND/OR PATHWAYS | ASSAYS |
| Growth, Differentiation | Cell Differentiation | Koyama et al. (2000) Blood |
| And Development | | 96: 1490-5 |
| | Cell Cycle Progression | Hu et al. (2000) J Biol Chem |
| | | 275: 15254-64 |
| Metabolism | Chromatin Structure | Hu et al. (2000) J Biol Chem |
| | | 275: 15254-64 |
| | Gene Transcription And | Johnson and Turner (1999) |
| | Chromatin Assembly | Semin Cell Dev Biol 10: 179-88 |
| Reproduction And Seed | Seed Development | Wu et al. (2000) Plant J 22: 19-27 |
| Development | Seed Germination | Lechner et al. (2000) |
| | | Biochemistry 39: 1683-92 |
| | Independent Embryo | Ohad et al. (1996) PNAS USA |
| | Fertilization | 93: 5319-24 |
| | Fertilization Independent | Chaudhury et al. (1997) PNAS |
| | Seed Development | USA 94: 4222-28 |
| | Megagametogenesis | Christensen et al. (1997) Sex |
| | | Plant Reproduc 10: 49-64 |

[1550] Other biological activities that can be modulated by the HDAc genes and gene products are listed in the REFERENCE Table. Assays for detecting such biological activities are described in the Protein Domain table.

[1551] Profiles of these different HDAc genes are shown in the Table below with examples of associated biological activities.

| | | | EXAMPLES OF |
|---|---|---|---|
| TRANSCRIPT | | PHYSIOLOGICAL | BIOCHEMICAL |
| LEVELS | TYPE OF GENES | CONSEQUENCES | ACTIVITY |
| Up Regulated | Responders To | Gene Repression | Transporters |
| Transcripts | HDAc Activity | Activity | Metabolic enzymes |
| | | Cell Cycle | Kinases and |
| | | Progression | phosphatases |
| | | Chromatin | Transcription |
| | | Condensation | activators |
| | | Synthesis Of | Change in |
| | | Metabolites | chromatin structure |
| | | And/Or Proteins | and/or localized |
| | | Modulation Of | DNA topology |
| | | Transduction | |
| | | Pathways | |
| | | Specific Gene | |
| | | Transcription | |
| | | Initiation | |
| Down-Regulated | Responder To Hdac | Negative | Transcription |
| Transcripts | Inhibitors | Regulation Of | factors |
| | Genes With | Acetylation | Change in protein |
| | Discontinued | Pathways | structure by |
| | Expression Or | Changes In | phosphorylation |
| | UnsTable Mrna In | Pathways And | (kinases) or |
| | Presence Of Hdac | Processes | dephosphorylation |
| | | Operating In Cells | (phosphatases) |
| | | Changes In | Change in |
| | | Metabolism | chromatin structure |
| | | | and/or DNA |
| | | | topology |
| | | | Stability of factors |
| | | | for protein synthesis |
| | | | and degradation |
| | | | Metabolic enzymes |

### Use of Promoters of Histone Deacetylase Responsive Genes

[1552] Promoters of Histone Deacetylase responsive genes are useful for transcription of any desired polynucleotide or plant or non-plant origin. Further, any desired sequence can be transcribed in a similar temporal, tissue, or environmentally specific patterns as the Histone Deacetylase responsive genes where the desired sequence is operably linked to a promoter of a Histone Deacetylase responsive gene. The protein product of such a polynucleotide is usually synthesized in the same cells, in response to the same stimuli as the protein product of the gene from which the promoter was derived. Such promoter are also useful to produce antisense mRNAs to down-regulate the product of proteins, or to produce sense mRNAs to down-regulate mRNAs via sense suppression.

[1553] III.E. Stress Responsive Genes, Gene Components and Products

[1554] III.E.1. Cold Responsive Genes, Gene Components and Products

[1555] The ability to endure low temperatures and freezing is a major determinant of the geographical distribution and productivity of agricultural crops. Even in areas considered suitable for the cultivation of a given species or cultivar, can give rise to yield decreases and crop failures as a result of aberrant, freezing temperatures. Even modest increases (1-2° C.) in the freezing tolerance of certain crop species would have a dramatic impact on agricultural productivity in some areas. The development of genotypes with increased freezing tolerance would provide a more reliable means to minimize crop losses and diminish the use of energy-costly practices to modify the microclimate.

[1556] Sudden cold temperatures result in modulation of many genes and gene products, including promoters. Examples of such cold responsive genes and gene products are shown in the Reference, Sequence, Protein Group, Protein Group Matrix tables, MA_diff and MA_clust tables These genes and/or products are responsible for effects on traits such as plant vigor and seed yield. They were discovered and characterized from a much larger set by experiments designed to find genes whose mRNA products changed in response to cold treatment.

[1557] Manipulation of one or more cold responsive gene activities is useful to modulate the biological activities and/or phenotypes listed below. Cold responsive genes and gene products can act alone or in combination. Useful combinations include cold responsive genes and/or gene products with similar transcription profiles, similar biological activities, or members of the same or functionally related biochemical pathways. Whole pathways or segments of pathways are controlled by transcription factor proteins and proteins controlling the activity of signal transduction pathways. Therefore, manipulation of the levels of such proteins is especially useful for altering phenotypes and biochemical activities of plants. The MA_diff Table(s) reports the transcript levels of the experiment (see EXPT ID: 108578, 108579, 108533, 108534). For transcripts that had higher levels in the samples than the control, a “+” is shown. A “−” is shown for when transcript levels were reduced in root tips as compared to the control. For more experimental detail see the Example section below.

[1558] Cold genes are those sequences that showed differential expression as compared to controls, namely those sequences identified in the MA_diff tables with a “+” or “−” indication.

[1559] Cold Genes Identified by Cluster Analyses of Differential Expression

[1560] Cold Genes Identified by Correlation to Genes that are Differentially Expressed

[1561] As described above, the transcription profiles of genes that act together are well correlated. Applicants not only have identified the genes that are differentially expressed in the microarray experiments, but also have identified the genes that act in concert with them. The MA_clust table indicates groups of genes that have well correlated transcription profiles and therefore participate in the same pathway or network.

[1562] A pathway or network of Cold genes is any group in the MA_clust that comprises a cDNA ID that also appears in Expt ID 108578, 108579, 108533, 108534 of the MA_diff table(s).

[1563] Cold Genes Identified by Correlation to Genes that Cause Physiological Consequences

[1564] Additionally, the differential expression data and the phenotypic observations can be merged to identify pathways or networks of Cold genes. A group in the MA_clust is considered a Cold pathway or network if the group comprises a cDNA ID that also appears in Knock-in or Knock-out tables that causes one or more of the phenotypes described in section above.

[1565] Cold Genes Identified by Amino Acid Sequence Similarity

[1566] Cold genes from other plant species typically encode polypeptides that share amino acid similarity to the sequences encoded by corn and Arabidopsis Cold genes. Groups of Cold genes are identified in the Protein Group table. In this table, any protein group that comprises a peptide ID that corresponds to a cDNA ID member of a Cold pathway or network is a group of proteins that also exhibits Cold functions/utilities.

[1567] Such cold responsive genes and their products can function to either increase or dampen the phenotypes and activities below either in response to cold treatment or in the absence of cold temperature fluctuations.

[1568] Further, promoters of cold responsive genes, as described in the Reference tables, for example, are useful to modulate transcription that is induced by ABA or any of the following phenotypes or biological activities below.

[1569] III.E.1.a. Use of Cold-Responsive Genes to Modulate Phenotypes

[1570] Cold responsive genes and gene products are useful to or modulate one or more phenotypes including cold tolerance, below 7° C., for example, cells, organelles, proteins, dehydration resistance, growth rate, whole plant, including height, bolting time, etc., organs, biomass, fresh and dry weight during any time in plant life, such as maturation, number, size, and/or weight of flowers, seeds, branches, or leaves; seed yield in terms of number, size, weight, harvest index, or water content, fruit yield in terms of number, size, weight, harvest index, water content.

[1571] To regulate any of the phenotype(s) above, activities of one or more of the cold responsive genes or gene products can be modulated and the plants can be tested by screening for the desired trait. Specifically, the gene, mRNA levels, or protein levels can be altered in a plant utilizing the procedures described herein and the phenotypes can be screened for variants as in Winkler et al. (1998) Plant Physiol 118: 743-50 and assayed, for example, in accordance to Steponokus et al. (1993) Biochimica et Biophysica Acta 1145: 93-104; Quinn (1988) Symp Soc. Exp. Biol. 42: 237-258; Bectold and Pelletier (1998) Methods Mol. Biol. 82: 259-266; Kasuga et al. (1999) Nature Biotechnology 17: 287-291; Guy et al. (1998) Cryobiology 36: 301-314; or Liu et al. (1998) Plant Cell 10: 1391-1406.

[1572] III.E.1.b. Use of Cold-Responsive Genes to Modulate Biochemical Activities

[1573] The activities of one or more of the cold responsive genes can be modulated to change biochemical or metabolic activities and/or pathways such as those noted below. Such biological activities are documented and can be measured according to the citations above and those included in the Table below:

| | BIOCHEMICAL OR | |
|---|---|---|
| | METABOLIC ACTIVITIES | |
| PROCESS | AND/OR PATHWAYS | CITATIONS INCLUDING ASSAYS |
| Cold Tolerance | Viability Of Plant | Steponkus (1998) PNAS USA 95: |
| | Protoplasts At Low | 14570-14575 |
| | Temperatures. | |
| | Viability Of Yeast At Low | Schirmer et al. (1994) Plant Cell 6: |
| | Temperatures. | 1899-1909 |
| | Complementation Of Yeast | Zentella et al. (1999) Plant |
| | Tsp Mutant | Physiology, 119: 1473-1482 |
| | Viability Of E. Coli At Low | Yeh et. al. (1997) PNAS 94: 10967-10972 |
| | Temperatures. | |
| | Induction Of Cold Shock | Pearce (1999) Plant Growth |
| | Response Genes | Regulation 29: 47-76. |
| Lipid Composition | Altered Composition Of | Sayanova et al. (1999) Journal of |
| | Membrane Fatty Acids | Experimental Botany 50: 1647-1652 |
| | | Sayanova (1997) PNAS |
| | | USA 94: 4211-4216 |
| | ALTERATION OF | Porta et al. (1999) Plant and Cell |
| | LIPOXYGENASE | Physiology 40: 850-858. |
| | ENZYME | |
| | ACCUMULATION AND | |
| | ACTIVITY | |
| Protein | PROTEIN | Wisniewski et al.(1999) Physiologia |
| Composition | DENATURATION | Plantarum 105: 600-608 |
| | Protein Hydrophilicity | Steponkus (1998) PNAS USA 95: |
| | | 14570-14575 |
| Modulation of | Induced Transcription | Current Protocols in Molecular |
| Transcription | Factors And Other Dna | Biology/edited by Frederick M. |
| Induced by Low | Binding Proteins | Ausubel.. [et al.]. New York: |
| Temperatures | Transcription Of | Published by Greene Pub. Associates |
| | Specific Genes | and Wiley-Interscience: J. Wiley, |
| | | c1987. |
| | | Steponkus (1998) PNAS USA 95: |
| | | 14570-14575 |
| | | Kadyrzhanova et al., Plant Mol Biol |
| | | (1998) 36(6): 885-895; and |
| | | Pearce et al., Plant Physiol (1998) |
| | | 117(3): 787-795 |
| Signal | Plasma Membrane | Goodwin et al., Plant Mol Biol (1996) |
| Transduction | Proteins | 31(4) 777-781; and |
| | | Koike et al., Plant Cell Physiol (1997) |
| | | 38(6): 707-716 |
| Oxygen | Glutathione | Kocsy et al., Planta (2000) 210(2): |
| Scavengers | | 295-301 |
| | Accumulation Active O₂ | Tao et al., Cryobiology (1998) |
| | and H₂O₂ Scavengers | 37(1): 38-45 |
| Dehydration | Dehydrin | Ismail et al., Plant Physiol (1999) |
| | | 120(1): 237-244 |
| | Transcription of mRNA | Kaye et al., Plant Physiol (1998) |
| | | 116(4): 1367-1377 |
| Metabolism | Soluble Sugars and/or | Wanner et al., (1999) Plant Physiol |
| | Proline | 120(2): 391-400 |
| RNA/DNA | Stabilization of | Jiang, Weining et al., (1997) Journal of |
| Chaperone | RNA/DNA through | Biological Chemistry, 272: 196-202. |
| | RNA binding and | Fukunaga et al., (1999) Journal of |
| | modulation of RNA | Plant Research, 112: 263-272. |
| | translation through RNA | |
| | binding and or | |
| | unwinding. | |
| Protein Chaperone | Stabilize protein | Forreiter and Nover (1998) Journal of |
| | structure and facilitate | Biosciences 23: 287-302 |
| | protein folding | |

[1574] Other biological activities that can be modulated by the cold responsive genes and their products are listed in the Reference tables. Assays for detecting such biological activities are described in the Protein Domain table.

[1575] Cold responsive genes are characteristically differentially expressed in response to fluctuating cold temperature levels, whether internal or external to an organism or cell. The MA_diff table reports the changes in transcript levels of various cold responsive genes in the aerial parts of seedlings at 1 and 6 hours at 4° C. in the dark as compared to aerial parts of seedlings covered with aluminium foil, and grown at 20° C. in the growth chamber.

[1576] The data from this time course can be used to identify a number of types of cold responsive genes and gene products, including “early responders” and “delayed responders”. Profiles of these different cold responsive genes are shown in the Table below together with examples of the kinds of associated biological activities.

| | | | EXAMPLES OF |
|---|---|---|---|
| GENE | FUNCTIONAL | TYPE OF | BIOCHEMICAL |
| EXPRESSION | CATEGORY OF | BIOLOGICAL | ACTIVITIES OF GENE |
| LEVELS | GENE | ACTIVITY | PRODUCTS |
| Upregulated Genes | Early | Perception Of | Transcription Factors |
| (Level At 1 h ≅ 6 h) | Responders To | Cold | Kinases And |
| or | Cold | Induction Of | Phosphatases |
| (Level At 1 h > 6 h) | | Cold Response | Amino Acid Sugar And |
| | | Signal | Metabolite Transporters |
| | | Transduction | Carbohydrate Catabolic |
| | | Pathways | And Anabolic Enzymes. |
| | | Initiating | Lipid Biosynthesis |
| | | Specific Gene | Enzymes |
| | | Transcription | Lipid Modification |
| | | Osmotic | Enzymes, Example |
| | | Adjustment | Desaturases |
| | | Alteration Of | Ice Crystal Binding |
| | | Lipid | Proteins |
| | | Composition. | Hydrophilic Proteins |
| | | Ice Nucleation | |
| | | Inhibition | |
| | | Mitigation Of | |
| | | Dehydration By | |
| | | Sequestering | |
| | | Water | |
| | Stress Response | Repression Of | Transcription Factors |
| | | General | Kinases And |
| | | Biochemical | Phosphatases |
| | | Pathways To | Protein Stability Factors |
| | | Optimize Cold | mRNA Stability Factors |
| | | Response | mRNA Translation |
| | | Pathways. | Factors |
| | | Stabilization Of | Protein Turnover Factors |
| | | Protein/Enzyme | Oxygen Radical |
| | | Activity At Low | Scavengers, Example- |
| | | Temperature | Peroxidases |
| | | Protection | Energy Generation |
| | | Against Oxidative | Enzymes EtOH |
| | | Stress | Detoxification |
| | | Anaerobic | |
| | | Metabolism | |
| Upregulated Genes | Delayed | Respiration, | Transcription Factors |
| (Level At 1 h < 6 h) | Responders To | Photosynthesis | Kinases And |
| | Cold Stress | And Protein | Phosphatases |
| | Cold | Synthesis | Protein Stability Factors |
| | Acclimation | Carbohydrate | mRNA Stability Factors |
| | Genes | And Amino Acid | mRNA Translation |
| | | Solute | Factors |
| | | Accumulation | Protein Turnover Factors |
| | | Increased Fatty | Oxygen Radical |
| | | Acid Desaturation | Scavengers, Peroxidase |
| | | To Increase Lipid | Metabolic Enzymes |
| | | Membrane | |
| | | Stability | |
| | | Increased | |
| | | Accumulation Or | |
| | | Activity Of | |
| | | Oxidative Stress | |
| | | Protection Proteins | |
| | | Stabilization Of | |
| | | Protein/Enzyme | |
| | | Activity At Low | |
| | | Temperature | |
| | | Protection | |
| | | Against Oxidative | |
| | | Stress | |
| | | Extracellular | |
| | | Matrix | |
| | | Modification | |
| | Stress Response | Stabilization Of | Transcription Factors |
| | Genes | Protein/Enzyme | Kinases And |
| | | Activity At Low | Phosphatases |
| | | Temperature | Protein Stability Factors |
| | | Protection | mRNA Stability Factors |
| | | Against Oxidative | mRNA Translation |
| | | Stress | Factors |
| | | Anaerobic | Protein Turnover Factors |
| | | Metabolism | Oxygen Radical |
| | | | Scavengers, Example- |
| | | | Peroxidase |
| | | | Energy Generation |
| | | | Enzymes, Etoh |
| | | | Detoxification |
| Downregulated | Early | Negative | Transcription Factors |
| (Level At 1 h ≅ 6 h) | Responder | Regulation Of | Kinases And |
| (Level At 6 h > 1 h) | Repressors Of | Cold Signal | Phosphatases |
| | Cold Stress | Transduction | Protein Stability Factors |
| | Metabolism | Pathways Released | mRNA Stability Factors |
| | | | mRNA Translation |
| | | | Factors |
| | | | Protein Turnover Factors |
| | Genes With | Negative | Cold Repressed |
| | Discontinued | Regulation Of | Metabolic Pathway |
| | Expression Or | Cold Induced | Proteins |
| | UnsTable | Transcription | Factors Coordinating And |
| | mRNA In Cold | Reduced | Controlling Central C and |
| | | Reduction In | N Metabolism |
| | | Gene Expression | Storage Proteins |
| | | In Pathways Not | |
| | | Required Under | |
| | | Cold Conditions | |
| | | Induced mRNA | |
| | | Turnover | |
| Down-Regulated | Delayed | Maintenance Of | Transcription Factors |
| Transcripts | Responder | Cold Induced State | Kinases And |
| (Level At 1 h > 6 h) | Repressors Of | Of Metabolism | Phosphatases |
| | Cold Stress | Reduction In | Protein Stability Factors |
| | Metabolism | Gene Expression | mRNA Stability Factors |
| | Genes With | For Pathways Not | mRNA Translation |
| | Discontinued | Required Under | Factors |
| | Expression Or | Cold Conditions | Protein Turnover Factors |
| | UnsTable | Induced mRNA | Cold Repressed |
| | mRNA In Cold | Turnover | Metabolic Pathway |
| | | | Proteins |
| | | | Factors Coordinating And |
| | | | Controlling Central C and |
| | | | N Metabolism |
| | | | Storage Proteins |

[1577] Further, any desired sequence can be transcribed in similar temporal, tissue, or environmentally specific patterns as the cold responsive genes when the desired sequence is operably linked to a promoter of a cold responsive gene.

[1578] III.E.2. Heat Responsive Genes, Gene Components and Products

[1579] The ability to endure high temperatures is a major determinant of the geographical distribution and productivity of agricultural crops. Decreases in yield and crop failure frequently occur as a result of aberrant, hot conditions even in areas considered suitable for the cultivation of a given species or cultivar. Only modest increases in the heat tolerance of crop species would have a dramatic impact on agricultural productivity. The development of genotypes with increased heat tolerance would provide a more reliable means to minimize crop losses and diminish the use of energy-costly practices to modify the microclimate.

[1580] Changes in temperature in the surrounding environment or in a plant microclimate results in modulation of many genes and gene products. Examples of such heat stress responsive genes and gene products are shown in the Reference, Sequence, Protein Group, Protein Group Matrix, MA_diff and MA_clust tables. These genes and/or products are responsible for effects on traits such as plant vigor and seed yield. They were discovered and characterized from a much larger set by experiments designed to find genes whose mRNA products changed in response to high temperatures.

[1581] While heat stress responsive polynucleotides and gene products can act alone, combinations of these polynucleotides also affect growth and development. Useful combinations include different heat stress responsive polynucleotides and/or gene products that have similar transcription profiles or similar biological activities, and members of the same or similar biochemical pathways. Whole pathways or segments of pathways are controlled by transcription factor proteins and proteins controlling the activity of signal transduction pathways. Therefore, manipulation of such protein levels is especially useful for altering phenotypes and biochemical activities of plants. In addition, the combination of a heat stress responsive polynucleotide and/or gene product with other environmentally responsive polynucleotide is also useful because of the interactions that exist between stress pathways, pathogen stimulated pathways, hormone-regulated pathways, nutritional pathways and development. Here, in addition to polynucleotides having similar transcription profiles and/or biological activities, useful combinations include polynucleotides that may have different transcription profiles, but which participate in common or overlapping pathways. The MA_diff Table(s) reports the transcript levels of the experiment (see EXPT ID: 108576, 108577, 108522, 108523). For transcripts that had higher levels in the samples than the control, a “+” is shown. A “−” is shown for when transcript levels were reduced in root tips as compared to the control. For more experimental detail see the Example section below.

[1582] Heat genes are those sequences that showed differential expression as compared to controls, namely those sequences identified in the MA_diff tables with a “+” or “−” indication.

[1583] Heat Genes Identified by Cluster Analyses of Differential Expression

[1584] Heat Genes Identified by Correlation to Genes that are Differentially Expressed

[1585] As described above, the transcription profiles of genes that act together are well correlated. Applicants not only have identified the genes that are differentially expressed in the microarray experiments, but also have identified the genes that act in concert with them. The MA_clust table indicates groups of genes that have well correlated transcription profiles and therefore participate in the same pathway or network.

[1586] A pathway or network of Heat genes is any group in the MA_clust that comprises a cDNA ID that also appears in Expt ID 108576, 108577, 108522, 108523 of the MA_diff table(s).

[1587] Heat Genes Identified by Correlation to Genes that Cause Physiological Consequences

[1588] Additionally, the differential expression data and the phenotypic observations can be merged to identify pathways or networks of Heat genes. A group in the MA_clust is considered a Heat pathway or network if the group comprises a cDNA ID that also appears in Knock-in or Knock-out tables that causes one or more of the phenotypes described in section above.

[1589] Heat Genes Identified by Amino Acid Sequence Similarity

[1590] Heat genes from other plant species typically encode polypeptides that share amino acid similarity to the sequences encoded by corn and Arabidopsis Heat genes. Groups of Heat genes are identified in the Protein Group table. In this table, any protein group that comprises a peptide ID that corresponds to a cDNA ID member of a Heat pathway or network is a group of proteins that also exhibits Heat functions/utilities.

[1591] Such heat stress responsive genes and gene products can function either to increase or dampen the above phenotypes or activities either in response to changes in temperature or in the absence of temperature fluctuations.

[1592] Further, promoters of heat responsive genes, as described in the Reference tables, for example, are useful to modulate transcription that is induced by heat or any of the following phenotypes or biological activities below.

[1593] III.E.2.a. Use of Heat Stress Responsive Genes to Modulate Phenotypes

[1594] Heat stress responsive genes and gene products can be used to alter or modulate one or more phenotypes including heat tolerance (above 20° C., 23° C., 27° C., 30° C., 33° C., 37° C., 40° C. or 42° C.), heat tolerance of cells, of organelles, of proteins, of cells or organelles dehydration resistance, growth rate, whole plant, including height, bolting time, etc., organs, biomass, fresh and dry weight during any time in plant life, such as maturation, number, size, and weight of flowers, seeds, branches, or leaves; seed yield in number, size, weight, harvest index; fruit yield in terms of number, size, weight, or harvest index, stress responses such as mediation of response to desiccation, drought, salt, disease, wounding, cold and other stresses, and reproduction

[1595] To regulate any of the phenotype(s) above, activity of one or more of the heat stress responsive genes or gene products can be modulated and the plants tested by screening for the desired trait. Specifically, the gene, mRNA levels, or protein levels can be altered in a plant utilizing the procedures described herein and the phenotypes can be assayed. As an example, a plant can be transformed according to Bechtold and Pelletier (1998, Methods. Mol. Biol. 82:259-266) and/or screened for variants as in Winkler et al. (1998) Plant Physiol 118: 743-50 and visually inspected for the desired phenotype or metabolically and/or functionally assayed according to Queitsch et al. (2000, The Plant Cell 12: 479-92).

[1596] III.E.2.b. Use of Heat Stress Responsive Genes to Modulate Biochemical Activities

[1597] The activities of one or more of the heat stress responsive genes can be modulated to change biochemical or metabolic activities and/or pathways such as those noted below. Such biological activities can be measured according to the citations included in the Table below:

| | BIOCHEMICAL OR | |
|---|---|---|
| | METABOLIC ACTIVITIES | CITATION INCLUDING |
| PROCESS | AND/OR PATHWAYS | ASSAY |
| Cell Growth and | Regulation And | Wisniewski et al. |
| Differentiation | Molecular Chaperones | (1999) Physiolgia |
| | Maintenance Of Native | Plantarum 105: |
| | | 600-608 |
| | Conformation (Cytosolic | Queitsch et al. |
| | Proteins) | (2000) The Plant |
| | Reactivation Of | Cell 12: 479-92 |
| | Aggregation And Protein | Lee and Vierling |
| | Folding | (2000) Plant |
| | Autoregulation Of Heat | Physiol. 122: 189-197 |
| | Shock Response | Schwechheimer |
| | Regulation Of | (1998) Plant Mol |
| | Translational Efficiency | Biol 36: 195-204 |
| | Regulation Of Kinase | Shi et al. (1998) |
| | Activity | Genes and |
| | Regulation Of Calcium | Development 12: |
| | Mediated Signal | 654-66 |
| | Transduction | Wells et al. (1998) |
| | | Genes and |
| | | Development 12: |
| | | 3236-51 |
| | | Lis et al. (2000) |
| | | Genes and |
| | | Development 14: |
| | | 792-803 |
| | | Malho, R.(1999) Plant |
| | | Biology 1: 487-494. |
| | | Sheen, Jen.(1996) |
| | | Science 274: 1900-1902. |
| | | Farmer, P. et al., (1999.) |
| | | Biochimica et Biophysica |
| | | Acta 1434: 6-17. |
| Gene regulation | Transcriptional Regulation Of | Current Protocols in |
| | Heat Induced Proteins | Molecular Biology/edited |
| | Through DNA Binding | by Frederick M. Ausubel.. |
| | Proteins. | [et al.]. New York: |
| | Transcriptional Regulation Of | Published by Greene Pub. |
| | Heat Induced Proteins | Associates and Wiley- |
| | Through Protein-Protein | Interscience: J. Wiley, |
| | Interactions Between DNA | c1987. |
| | Binding Proteins And | Steponkus (1998) |
| | Coactivators. | PNAS USA 95: |
| | Transcriptional Regulation Of | 14570-14575 |
| | Heat Induced Proteins | Gubler et al. |
| | Through Protein | (1999) Plant |
| | Phosphorylation And | Journal 17: 1-9 |
| | Dephosphorylation | Glenn et al. |
| | Transcriptional Regulation Of | (1999) Journal of |
| | Thermal Stress Induced | Biological |
| | Genes By Protein-Protein | Chemistry, 274: |
| | Interactions. | 36159-36167 |
| | Translational Regulation Of | Zhou et al., (1997) |
| | Thermal Stress Induced | EMBO Journal16: 3207-3218. |
| | Messenger Rnas. | Sessa et al., |
| | Transcriptional Regulation Of | (2000) EMBO Journal 19: |
| | Heat Induced Genes Through | 2257-2269. |
| | Chromatin Remodeling. | Burnett et |
| | | al., (2000) Journal |
| | | of Experimental |
| | | Botany. 51: 197-205. |
| | | Osterlund et |
| | | al., (2000) Nature |
| | | 405: 462-466. |
| | | Gross and |
| | | Watson (1998) |
| | | Canadian Journal of |
| | | Microbiology, |
| | | 44: 341-350 |
| | | Luo, R. X., Dean, D. C. |
| | | (1999) |
| | | Journal of the |
| | | National Cancer |
| | | Institute 91: 1288-1294. |
| | | Chromatin protocols |
| | | (1999) edited by Peter B. |
| | | Becker. Totowa, N. J.: |
| | | Humana Press. |
| Cell Structure | Thermal Stress Protection By | Goodwin et al. (1996) |
| | Plasma Membrane Anchored | Plant Mol Biol 31(4) 777-781; |
| | Or Secreted And/Or Cell | and |
| | Wall Associated Proteins. | Koike et al. (1997) Plant |
| | | Cell Physiol 38(6): 707-716 |
| Signal Transduction | Regulation Of Thermal Stress | Jonak (1996) Proceedings |
| | Pathways And Protein | of the National Academy of |
| | Activity By Protein Kinase | Sciences of the United |
| | And Protein Phosphatase | States of America, 93: |
| | Mediated Phosphorylation | 11274-11279. |
| | And Dephosphorylation | Monroy. et al., (1998) |
| | Respectively. | Analytical Biochemistry |
| | | 265: 183-185. |
| Photosynthesis | Regulation Of | Schroda et al. (1999) The |
| | Photoprotection And Repair | Plant Cell 11: 1165-178 |
| | Of Photosystem II | Oh and Lee (1996) J Plant |
| | | Biol. 39: 301-07 |
| Stress Response | Regulation Of Cytosol | Dat et al. (1998) Plant |
| | Peroxide Levels | Physiol 116: 1351-1357 |
| | Regulation Of Heat Shock | Kurek et al. (1999) Plant |
| | Factor Binding | Physiol 119: 693-703 |
| | Regulation Of Protein | Storozhenko et al. (1998) |
| | Stability During Thermal | Plant Physiol 118: 1005-14 |
| | Stress | Soto et al. (1999) Plant |
| | Nucleocytoplasmic Export Of | Physiol 120: 521-28 |
| | Heat Shock Protein Mrnas | Yeh et al. (1997) PNAS 94: |
| | Regulation/Reconfiguration | 10967-10972 |
| | Of Cell Architecture | Winkler et al. (1998) Plant |
| | Regulation Of Pathways For | Physiol 118: 743-50 |
| | Reactivation Of “Damaged” | Saavedra et al. (1997) |
| | And/Or Denatured Proteins | Genes and Development |
| | Regulation Of Protein | 11: 2845-2856 |
| | Degradation During Thermal | Parsell and Lindquist |
| | Stress. | (1993). Ann. Rev. Genet. |
| | Regulation Of Osmotic | 27: 437-496. |
| | Potential During Thermal | Parsell and Lindquist |
| | Stress. | (1993). Ann. Rev. Genet. |
| | Regulation Of Universal | 27: 437-496. |
| | Stress Protein Homologue | Georgopoulos and Welch |
| | Activity By Phosphorylation | (1993). Ann Rev. Cell Biol. |
| | And Dephosphorylation. | 9: 601-634. |
| | Regulation Of Dehydrin, | Vierstra, Richard D. |
| | LEA-Like And Other Heat | (1996) Plant Molecular |
| | STable Protein Accumulation | Biology, 32: 275-302. |
| | | Vierstra, Richard D.; |
| | | Callis, Judy. (1999) Plant |
| | | Molecular Biology, |
| | | 41: 435-442. |
| | | Liu, J. et al., (1998)Plant |
| | | Science 134: 11-20. |
| | | Freestone, P. 1997et al., |
| | | Journal of Molecular |
| | | Biology, v. 274: 318-324. |
| | | Robertson, A. J. (1994) |
| | | Plant Physiology 105: 181-190. |

[1598] Other biological activities that can be modulated by the heat stress responsive genes and gene products are listed in the Reference tables. Assays for detecting such biological activities are described in the Protein Domain table.

[1599] Heat stress responsive genes are characteristically differentially transcribed in response to fluctuating temperatures, whether internal or external to an organism or cell. The MA_diff table reports the changes in transcript levels of various heat stress responsive genes in aerial tissues at 1 and 6 hours after plants were placed at 42° C. as compared to aerial tissues kept at 20° C. growth chamber temperature.

[1600] The data from this time course can be used to identify a number of types of heat stress responsive genes and gene products, including “early responders to heat stress,” “delayed responders to heat stress,” “early responder repressors,” and “delayed repressor responders.” Profiles of these different heat stress responsive genes are shown in the Table below together with examples of the kinds of associated biological activities.

| | | | EXAMPLES OF |
|---|---|---|---|
| GENE | FUNCTIONAL | | BIOCHEMICAL |
| EXPRESSION | CATEGORY OF | PHYSIOLOGICAL | ACTIVITIES/GENE |
| LEVELS | GENE | CONSEQUENCES | PRODUCTS |
| Up Regulated | Early Responders | Heat Stress Perception | Transcription |
| Transcripts | To Heat Stress | Modulation Of Heat | Factors |
| (Level At 1 h ≅ 6 h) | | Stress Response | Transporters |
| Or | | Transduction | Changes In Cell |
| (Level At 1 h > 6 h) | | Pathways | Membrane Structure |
| | | Specific Gene | Kinases And |
| | | Transcription | Phosphatases |
| | | Initiation | Transcription |
| | | Conditional Shift In | Activators |
| | | Preferential | Changes In |
| | | Translation Of | Chromatin Structure |
| | | Transcripts | And/Or Localized |
| | | Changes In Cell | Dna Topology |
| | | Architecture To | Modification Of Pre- |
| | | Optimize Cell | Existing Translation |
| | | Adaptation To Heat | Factors By |
| | | Stress | Phosphorylation |
| | | | (Kinases) Or |
| | | | Dephosphorylation |
| | | | (Phosphatases) |
| | | | Synthesis Of New |
| | | | Translation Factors |
| | | | Stability Of |
| | | | Mediators Of |
| | | | Protein-Protein |
| | | | Interaction |
| | | | Heat Shock Proteins |
| | | | Changes In |
| | | | Organelle |
| | | | Structures, |
| | | | Membranes And |
| | | | Energy-Related |
| | | | Activities |
| | | | Proteins To Catalyse |
| | | | Metabolic Turnover |
| Up Regulated | “Delayed” | Maintenance Of | Transcription |
| Transcripts | Responders | Response To Heat | Factors |
| (Level At 1 h < 6 h) | Maintenance Of | Stress | Specific Factors |
| | Heat Stress | Maintenance Of | (Initiation And |
| | Response | Protein Stability And | Elongation) For |
| | | Conformation | Protein Synthesis |
| | | | Maintenance Of |
| | | | Mrna Stability |
| | | | Heat Shock Proteins |
| | | | Changes In |
| | | | Organelle |
| | | | Structures, |
| | | | Membranes And |
| | | | Energy-Related |
| | | | Activities |
| | | | Proteins To Catalyse |
| | | | Metabolic Turnover. |
| | | | Stability Of |
| | | | Mediators Of |
| | | | Protein-Protein |
| | | | Interaction |
| Down-Regulated | Early Responder | Negative Regulation | Transcription |
| Transcripts | Repressors Of | Of Heat Stress | Factors And |
| (Level At 1 h ≅ 6 h) | “Normal” State Of | Response Released | Activators |
| Or | Metabolism | Changes In | Change In Protein |
| (Level At 6 h > 1 h) | Genes With | Biochemical And | Structure By |
| | Discontinued | Signal Transduction | Phosphorylation |
| | Expression Or | Pathways And | (Kinases) Or |
| | UnsTable mRNA | Processes Operating In | Dephosphoryaltion |
| | In Presence Of | Cells | (Phosphatases) |
| | Heat Stress | Reorientation Of | Change In |
| | | Metabolism | Chromatin Structure |
| | | | And/Or Dna |
| | | | Topology |
| Down-Regulated | Delayed | Maintenance Of Heat | Transcription |
| Transcripts | Repressors Of | Stress Response | Factors And |
| (Level At 1 hr > | “Normal” State Of | Maintenance Of | Activators |
| 6 hr) | Metabolism | Pathways Released | Kinases And |
| | Genes With | From Repression | Phosphatases |
| | Discontinued | Changes In Pathways | Stability Of Factors |
| | Expression Or | And Processes | For Protein |
| | UnsTable mRNA | Operating In Cells | Translation |
| | In Presence Of | Reorientation Of | |
| | Heat Stress | Metabolism | |

[1601] Further, any desired sequence can be transcribed in similar temporal, tissue, or environmentally specific patterns as the heat responsive genes when the desired sequence is operably linked to a promoter of a heat responsive gene.

[1602] III.E.3. Drought Responsive Genes, Gene Components and Products

[1603] The ability to endure drought conditions is a major determinant of the geographical distribution and productivity of agricultural crops. Decreases in yield and crop failure frequently occur as a result of aberrant, drought conditions even in areas considered suitable for the cultivation of a given species or cultivar. Only modest increases in the drought tolerance of crop species would have a dramatic impact on agricultural productivity. The development of genotypes with increased drought tolerance would provide a more reliable means to minimize crop losses and diminish the use of energy-costly practices to modify the microclimate.

[1604] Drought conditions in the surrounding environment or within a plant, results in modulation of many genes and gene products. Examples of such drought responsive genes and gene products are shown in the Reference and Sequence Tables. These genes and/or products are responsible for effects on traits such as plant vigor and seed yield. They were discovered and characterized from a much larger set by experiments designed to find genes whose mRNA products changed in response to availability of water.

[1605] While drought responsive polynucleotides and gene products can act alone, combinations of these polynucleotides also affect growth and development. Useful combinations include different drought responsive polynucleotides and/or gene products that have similar transcription profiles or similar biological activities, and members of the same or similar biochemical pathways. Whole pathways, or segments of pathways are controlled by transcription factor proteins and proteins controlling the activity of signal transduction pathways. Therefore, manipulation of the levels of such proteins is especially useful for altering phenotypes and biochemical activities of plants. In addition, the combination of a drought responsive polynucleotide and/or gene product with another environmentally responsive polynucleotide is also useful because of the interactions that exist between hormone-regulated pathways, stress pathways, nutritional pathways and development. Here, in addition to polynucleotides having similar transcription profiles and/or biological activities, useful combinations include polynucleotides that may have different transcription profiles but which participate in a common pathway. The MA_diff Table(s) reports the transcript levels of the experiment (see EXPT ID: 108572, 108573, 108502, 108503, 108504, 108556, 108482, 108483, 108473, 108474, 108477). For transcripts that had higher levels in the samples than the control, a “+” is shown. A “−” is shown for when transcript levels were reduced in root tips as compared to the control. For more experimental detail see the Example section below.

[1606] Drought genes are those sequences that showed differential expression as compared to controls, namely those sequences identified in the MA_diff tables with a “+” or “−” indication.

[1607] Drought Genes Identified by Cluster Analyses of Differential Expression

[1608] Drought Genes Identified by Correlation to Genes that are Differentially Expressed

[1609] As described above, the transcription profiles of genes that act together are well correlated. Applicants not only have identified the genes that are differentially expressed in the microarray experiments, but also have identified the genes that act in concert with them. The MA_clust table indicates groups of genes that have well correlated transcription profiles and therefore participate in the same pathway or network.

[1610] A pathway or network of Drought genes is any group in the MA_clust that comprises a cDNA ID that also appears in Expt ID 108572, 108573, 108502, 108503, 108504, 108556, 108482, 108483, 108473, 108474, 108477 of the MA_diff table(s).

[1611] Drought Genes Identified by Correlation to Genes that Cause Physiological Consequences

[1612] Additionally, the differential expression data and the phenotypic observations can be merged to identify pathways or networks of Drought genes. A group in the MA_clust is considered a Drought pathway or network if the group comprises a cDNA ID that also appears in Knock-in or Knock-out tables that causes one or more of the phenotypes described in section above.

[1613] Drought Genes Identified by Amino Acid Sequence Similarity

[1614] Drought genes from other plant species typically encode polypeptides that share amino acid similarity to the sequences encoded by corn and Arabidopsis Drought genes. Groups of Drought genes are identified in the Protein Group table. In this table, any protein group that comprises a peptide ID that corresponds to a cDNA ID member of a Drought pathway or network is a group of proteins that also exhibits Drought functions/utilities.

[1615] Such drought responsive genes and gene products can function to either increase or dampen the above phenotypes or activities either in response to drought conditions or in the absence of drought conditions. Further, promoters of drought responsive genes, as described in the Reference tables, for example, are useful to modulate transcription that is induced by drought or any of the following phenotypes or biological activities below.

[1616] More specifically, drought responsive genes and gene products are useful to or modulate one or more phenotypes including growth, roots, stems, buds, leaves, development, cell growth, leaves, fruit development, seed development, senescence, stress responses, and mediates response to desiccation, drought, salt and cold.

[1617] Further, any desired sequence can be transcribed in similar temporal, tissue, or environmentally specific patterns as the drought responsive genes when the desired sequence is operably linked to a promoter of a drought responsive gene.

[1618] To produce the desired phenotype(s) above, one or more of the drought response genes or gene products can be tested by screening for the desired trait. Specifically, the gene, mRNA levels, or protein levels can be altered in a plant utilizing the procedures described herein and the phenotypes can be assayed. As an example, a plant can be transformed according to Bechtold and Pelletier (1998, Methods. Mol. Biol. 82:259-266) and/or screened for variants as in Winkler et al. (1998) Plant Physiol 118: 743-50 and visually inspected for the desired phenotype or metabolically and/or functionally assayed according to Ruzin (1999, In: Plant Microtechnique and Microscopy, Oxford University Press, London) and Khanna-Chopra et al. (1999, BBRC 255:324-7).

[1619] Alternatively, the activities of one or more of the drought responsive genes can be modulated to change biochemical or metabolic activities and/or pathways such as those noted below. Such biological activities can be measured according to the citations included in the Table below:

| | BIOCHEMICAL OR | |
|---|---|---|
| | METABOLIC ACTIVITIES | |
| GENERAL CATEGORY | AND/OR PATHWAYS | ASSAY |
| Cell Growth and | Preservation of Leaf Sub-Cellular | Jagtap et al. (1998) J Exptl |
| Differentiation | Structures Including | Botany 49: 1715-1721 |
| | Photosynthetic Apparatus | |
| | Preservation of Cell Membrane | Munne-Bosch and Alegre |
| | Structures | (2000) Planta 210: 925-31 |
| | Regulation of Stomatal | Menke et al. (2000) Plant |
| | development and Physiology | Physiol. 122: 677-686. |
| | Regulation of Factors Involved in | Harrak et al. (1999) Plant |
| | the Drought-adapted change in | Physiol. 121: 557-564. |
| | cell ultrastructure | |
| Physiology | Modulation of Transpiration | Allen et al. (1999) Plant |
| | | Cell 11: 1785-98 |
| | | Li et al. (2000) Science |
| | | 287: 300-303 |
| | | Burnett et al. (2000) J Exptl |
| | | Bot 51: 197-205 |
| | | Raschke (1987) In: |
| | | Stomatal function, Zeiger |
| | | et al., Eds, 253-79 |
| | Modulation of Photosynthesis | Sung and Krieg (1979) |
| | | Plant Physiol 64: 852-56 |
| | Regulation of Epicuticular Wax | Rhee et al. (1998) Plant |
| | Biosynthesis | Physiol 116: 901-11 |
| | Regulation of Carotenoid | Alegre (2000) Planta 210: |
| | Biosynthesis | 925-31 |
| | | Loggini et al (2000) Plant |
| | | Physiol 119: 1091 |
| Stress Response | Modulation of Leaf Rolling to | Taiz and Zeiger (1991) In: |
| | minimize water loss | Plant Physiology, |
| | | Benjamin/Cummings |
| | | Publishing Co., Redwood |
| | | City, pp 346-70 |
| | Modulation of Osmolite | Hare et al. (1998) Plant, |
| | Synthesis | Cell and Environment 21: |
| | | 535-553 |
| | | Huan et al. (2000) Plant |
| | | Physiol 122: 747-756 |
| | Regulation of gene | Hare et al. (1999) J. Exptl. |
| | transcriptional activity specific to | Botany 333: 413-434. |
| | the establishment of drought | |
| | tolerance | |
| | Regulation of protein degradation | Lee and Vierling (2000) |
| | and reactivation during drought | Plant Physiol. 122: 189-197 |
| | stress condition | |
| | Modulation/reconfiguration of | Lis et al. (2000) Genes and |
| | translation machineries | Development 14: 792-803 |
| | (“recycling” mechanisms) | |
| | adapTable to drought condition | |
| Signal Transduction | Regulation of Ion Sequestration | Bush and Jones (1987) Cell |
| | | Calcium 8: 455-72 |
| | Regulation of Nuclear Targeted | Ferringno and Silver |
| | Protein Transport | (1999) Methods in Cell |
| | | Biology 58: 107-22 |
| | Regulation of Cytoplasmic Ca+2 | Shi et al. (1999) Plant Cell |
| | | 11: 2393-2406 |
| | Regulation of Kinase Synthesis | Li et al. (2000) Science |
| | and Activity | 287-300-03 |
| | Modulation of Molecular | Mayhew et al (1996) |
| | Chaperone Activity | Nature 379: 420-26 |
| | | Kimura et al. (1995) |
| | | Science 268: 1362-1365. |

[1620] Other biological activities that can be modulated by the drought responsive genes and gene products are listed in the Reference Tables. Assays for detecting such biological activities are described in the Protein Domain table.

[1621] Drought responsive genes are characteristically differentially transcribed in response to drought conditions, whether internal or external to an organism or cell. The MA_diff table(s) report(s) the changes in transcript levels of various drought responsive genes at 1 and 6 hours after aerial tissues were isolated and left uncovered at room temperature on 3 MM paper, as compared to isolated aerial tissues placed on 3 MM paper wetted with Hoagland's solution. The data from this time course can be used to identify a number of types of drought responsive genes and gene products, including “early responders,” and “delayed responders.” Profiles of these different drought responsive genes are shown in the Table below together with examples of the kinds of associated biological activities.

| | | | EXAMPLES OF |
|---|---|---|---|
| GENE | FUNCTIONAL | | BIOCHEMICAL |
| EXPRESSION | CATEGORY OF | PHYSIOLOGICAL | ACTIVITIES OF GENE |
| LEVELS | GENE | CONSEQUENCES | PRODUCTS |
| Up regulated | Early responders to | Drought perception | Transcription factors |
| transcripts | drought | leading to the | Transporters |
| (level at 1 hr ≈ 6 hr) | | establishment of | |
| (level at 1 hr > 6 hr) | | tolerance to drought | |
| | | Modulation of drought | Change in cell membrane |
| | | response transduction | structure |
| | | pathways | Kinases and phosphatases |
| | | Specific gene | Transcription activators |
| | | transcription initiation | Change in chromatin |
| | | | structure and/or localized |
| | | | DNA topology |
| | | Conditional shift in | Modification of pre- |
| | | preferential translation | existing translation factors |
| | | of transcripts | by phosphorylation |
| | | | (kinases) or |
| | | | dephosphorylation |
| | | | (phosphatases) |
| | | | Synthesis of new |
| | | | translation factors |
| | | Changes in cell | Stability of mediators of |
| | | architecture to optimize | protein-protein interaction |
| | | cell adaptation to heat | |
| | | stress | |
| | | Changes in cell | Synthesis and/or stability |
| | | division cycle | of factors regulating cell |
| | | | division |
| Up regulated | Maintenance of | Maintenance of | Transcription factors |
| transcripts | drought response | response to drought and | Specific factors (initiation |
| (level at 1 hr < 6 hr) | “Delayed” responders | maintenance of | and elongation) for protein |
| | | drought-tolerance | synthesis |
| | | mechanisms | RNA-binding proteins |
| | | | effective for mRNA |
| | | | stability |
| | | | Change in chromatin |
| | | | structure and/or DNA |
| | | | topology |
| | | Maintenance of | Stability of mediators of |
| | | mechanisms effective | protein-protein interaction |
| | | for ions sequestration, | Stability of factors to |
| | | osmolite biosynthesis, | effectively utilize pre- |
| | | nuclear protein | existing translation |
| | | transport, regulation of | machinery (“recycling” |
| | | cytoplasmic Ca+2, and | mechanisms) under |
| | | regulation of proteins | drought condition |
| | | effective for | |
| | | maintaining protein | |
| | | stability and | |
| | | conformation | |
| | | Maintenance of cellular | Stability of mediators of |
| | | structures | protein-protein interaction |
| Down-regulated | Early responder | Negative regulation of | Transcription factors and |
| transcripts | repressors of “normal” | drought response | activators |
| (level at 1 hr ≈ 6 hr) | state of metabolism | inducible pathways | Change in protein structure |
| (level at 6 hr > 1 hr) | Genes with | released | by phosphorylation |
| | discontinued | Changes in | (kinases) or |
| | expression or | biochemical and signal | dephosphoryaltion |
| | unsTable mRNA in | transduction pathways | (phosphatases) |
| | presence of water | and processes operating | Change in chromatin |
| | stress | in cells | structure and/or DNA |
| | | | topology |
| Down-regulated | Delayed repressors of | Maintenance of | Transcription factors and |
| transcripts | “normal” state of | drought response | activators |
| (level at 1 hr > 6 hr) | metabolism | Maintenance of | Kinases and phosphatases |
| | Genes with | pathways released from | Stability of factors for |
| | discontinued | repression | protein translation |
| | expression or | Changes in pathways | |
| | unsTable mRNA in | and processes operating | |
| | presence of water | in cells | |
| | stress | | |

### Use of Promoters of Drought Responsive Genes

[1622] Promoters of Drought responsive genes are useful for transcription of any desired polynucleotide or plant or non-plant origin. Further, any desired sequence can be transcribed in a similar temporal, tissue, or environmentally specific patterns as the Drought responsive genes where the desired sequence is operably linked to a promoter of a Drought responsive gene. The protein product of such a polynucleotide is usually synthesized in the same cells, in response to the same stimuli as the protein product of the gene from which the promoter was derived. Such promoter are also useful to produce antisense mRNAs to down-regulate the product of proteins, or to produce sense mRNAs to down-regulate mRNAs via sense suppression.

[1623] III.E.4. Wounding Responsive Genes, Gene Components and Products

[1624] Plants are continuously subjected to various forms of wounding from physical attacks including the damage created by pathogens and pests, wind, and contact with other objects. Therefore, survival and agricultural yields depend on constraining the damage created by the wounding process and inducing defense mechanisms against future damage.

[1625] Plants have evolved complex systems to minimize and/or repair local damage and to minimize subsequent attacks by pathogens or pests or their effects. These involve stimulation of cell division and cell elongation to repair tissues, induction of programmed cell death to isolate the damage caused mechanically and by invading pests and pathogens, and induction of long-range signaling systems to induce protecting molecules, in case of future attack. The genetic and biochemical systems associated with responses to wounding are connected with those associated with other stresses such as pathogen attack and drought.

[1626] Wounding results in the modulation of activities of specific genes and, in consequence, of the levels of key proteins and metabolites. These genes, called here wounding responsive genes, are important for minimizing the damage induced by wounding from pests, pathogens and other objects. Examples of such wounding responsive genes, gene components and products are shown in the Reference, Sequence, Protein Group, Protein Group Matrix, MA_diff, and MA_clust tables. They can be active in all parts of a plant and so where, when and to what extent they are active is crucial for agricultural performance and for the quality, visual and otherwise, of harvested products. They were discovered and characterized from a much larger set of genes by experiments designed to find genes whose products changed in response to wounding.

[1627] Manipulation of one or more wounding responsive gene activities is useful to modulate the biological activities and/or phenotypes listed below. Wounding responsive genes and gene products can act alone or in combination with genes induced in other ways. Useful combinations include wounding responsive genes and/or gene products with similar transcription profiles, similar biological activities, or members of functionally related biochemical pathways. Whole pathways or segments of pathways are controlled by transcription factor proteins and proteins controlling the activity of signal transduction pathways. Therefore, manipulation of the levels of such proteins is especially useful for altering phenotypes and biochemical activities of plants. The MA_diff Table(s) reports the transcript levels of the experiment (see EXPT ID: 108574, 108575, 108524, 108525, and Wounding (relating to SMD 3714, SMD 3715)). For transcripts that had higher levels in the samples than the control, a “+” is shown. A “−” is shown for when transcript levels were reduced in root tips as compared to the control. For more experimental detail see the Example section below.

[1628] Wounding genes are those sequences that showed differential expression as compared to controls, namely those sequences identified in the MA_diff tables with a “+” or “−” indication.

[1629] Wounding Genes Identified by Cluster Analyses of Differential Expression

[1630] Wounding Genes Identified by Correlation to Genes that are Differentially Expressed

[1631] As described above, the transcription profiles of genes that act together are well correlated. Applicants not only have identified the genes that are differentially expressed in the microarray experiments, but also have identified the genes that act in concert with them. The MA_clust table indicates groups of genes that have well correlated transcription profiles and therefore participate in the same pathway or network.

[1632] A pathway or network of Wounding genes is any group in the MA_clust that comprises a cDNA ID that also appears in Expt ID 108574, 108575, 108524, 108525, and Wounding (relating to SMD 3714, SMD 3715) of the MA_diff table(s).

[1633] Wounding Genes Identified by Correlation to Genes that Cause Physiological Consequences

[1634] Additionally, the differential expression data and the phenotypic observations can be merged to identify pathways or networks of Wounding genes. A group in the MA_clust is considered a Wounding pathway or network if the group comprises a cDNA ID that also appears in Knock-in or Knock-out tables that causes one or more of the phenotypes described in section above.

[1635] Wounding Genes Identified by Amino Acid Sequence Similarity

[1636] Wounding genes from other plant species typically encode polypeptides that share amino acid similarity to the sequences encoded by corn and Arabidopsis Wounding genes. Groups of Wounding genes are identified in the Protein Group table. In this table, any protein group that comprises a peptide ID that corresponds to a cDNA ID member of a Wounding pathway or network is a group of proteins that also exhibits Wounding functions/utilities.

[1637] Such wounding responsive genes and gene products can function either to increase or dampen the phenotypes and activities below, either in response to wounding or in the absence of wounding.

[1638] Further, promoters of wounding responsive genes, as described in the Reference tables, for example, are useful to modulate transcription that is induced by wounding or any of the following phenotypes or biological activities below.

[1639] III.E.4.a. Use of Wounding-Responsive Genes to Modulate Phenotypes

[1640] Wounding responsive genes and gene products can be used to alter or modulate one or more phenotypes including growth rate; whole plant height, width, or flowering time; organs (such as coleoptile elongation, young leaves, roots, lateral roots, tuber formation, flowers, fruit, and seeds); biomass; fresh and dry weight during any time in plant life, such as at maturation; number of flowers; number of seedsm seed yield, number, size, weight, harvest index (such as content and composition, e.g., amino acid, nitrogen, oil, protein, and carbohydrate); fruit yield, number, size, weight, harvest index, post harvest quality, content and composition (e.g., amino acid, carotenoid, jasmonate, protein, and starch); seed and fruit development; germination of dormant and non-dormant seeds; seed viability, seed reserve mobilization, fruit ripening, initiation of the reproductive cycle from a vegetative state, flower development time, insect attraction for fertilization, time to fruit maturity, senescence; fruits, fruit drop; leaves; stress and disease responses; drought; heat and cold; wounding by any source, including wind, objects, pests and pathogens; uv and high light damage (insect, fungus, virus, worm, nematode damage).

[1641] To regulate any of the phenotype(s) above, activities of one or more of the wounding responsive genes or gene products can be modulated and the plants can be tested by screening for the desired trait. Specifically, the gene, mRNA levels, or protein levels can be altered in a plant utilizing the procedures described herein and the phenotypes can be screened for variants as in Winkler et al. (1998) Plant Physiol 118: 743-50 and assayed, for example, in accordance with Johnson et. al. (1998) Plant Physiol 116:643-649, Reymond et. al. (2000) Plant Cell 12 707-720, or Keith et. al. (1991) Proc. Nat. Acad. Sci. USA 888821 8825.

[1642] III.E.4.b. Use of Wounding-Responsive Genes to Modulate Biochemical Activities

[1643] The activities of one or more of the wounding responsive genes can be modulated to change biochemical or metabolic activities and/or pathways such as those noted below. Such biological activities are documented and can be measured according to the citations included in the Table below:

| | BIOLOGICAL OR | |
|---|---|---|
| | METABOLIC ACTIVITIES | CITATIONS INCLUDING |
| PROCESS | AND/OR PATHWAYS | ASSAYS |
| Plant Tissue | Cell Damage Repair; Cell | Flanders (1990) J. Cell Biol. |
| Proliferation | Division | 110: 1111-1122 |
| Wound Induced | Synthesis Of Jasmonic And | Reymond, P and Farmer E. E. |
| Pathways Providing | Salicylic Acids And The | Current Opinion in Plant |
| Defense Against | Pathways Induced By These | Biology 1998 1: 404-411 |
| Pests And Pathogens | Signaling Molecules. | Creelman, RA and Mullet, J. E. |
| | Induction Of Jasmonic Acid | (1997) Ann Rev. Plant |
| | Independent Defense | Physiol Mol Biol 48: 355-387 |
| | Pathways. | Leon et al. 1998 Mol Gen |
| | Induction Of Lipoxygenase, | Genet 254: 412-419 |
| | Thionins And Nodulins | Titarentko et al. 1997 Plant |
| | | Physiol 115: 817-826 |
| | Cell Wall Degradation, | Rojo, E. et al. 1998. Plant J |
| | Ethylene Formation, Systemic | 13: 153-165 |
| | Signaling And Induction Of | Ryan, CA and Pearce, G. |
| | Defense Related Genes | 1998. Ann Rev. Cell Dev. |
| | | Biol 14: 1-17 |
| | Specific Rnase Induction | Reymond, P. et al. 2000. |
| | | Plant Cell 12: 707-720 |
| | | Glazebrook, J. 1999. Current |
| | | Opinion in Plant Biol. 2: 280-286 |
| | | O'Donnel P. J., et al. 1996 |
| | | Science 274: 1914-1917 |
| | | Rojo et al. 1999. Plant J. 20: |
| | | 135-142 |
| | | Merkouropoulus G. et al. |
| | | 1999 Planta 208: 212-219 |
| | | Kariu et al. 1998. Bioscience |
| | | Biotechnology and |
| | | Biochemistry 62: 1144-1151 |
| | | Mcoann et al. 1997 PNAS 94: |
| | | 5473-5477 |
| Other Stress Induced | Abscisic Acid Formation And | Carrera, E and Prat, S. 1998. |
| Pathways | Its Signaling Pathway | Plant J 15: 767-771 |
| | Cold Responsive Genes and | Chao et. al. 1999. Plant |
| | Pathways | Physiol 120: 979-992 |
| | Drought Induced Dehydrins | |
| | And Pathways | |
| Modified Lipid | Membrane Lipid Synthesis | Martin, M et al. 1999 Europe |
| Motabolism | Including Omega-3 Fatty | J. Biochem 262: 283-290 |
| | Acid Desaturase | |
| | Lipases | |
| | Lipid Transfer Proteins | |
| Modified Sugar And | Induction Of Glycohydrolases | |
| Energy Metabolism | And Glycotransferases, | |
| | Amylases | |
| Modified Protein And | Induction Of | |
| Nitrogen Metabolism | Aminotransferases, Arginase, Proteases | |
| | And Vegetative | |
| | Storage Proteins, Aromatic | |
| | Amino Acid Synthesis | |
| Secondary Metabolite | Aromatic Amino Acid | Keith, B et al. 1991 PNAS 88: |
| Induction | Synthesis And Secondary | 8821-8825 |
| | Metabolites | |

[1644] Other biological activities that can be modulated by wound responsive genes and their products are listed in the Reference tables. Assays for detecting such biological activities are described in the Protein Domain table.

[1645] The MA_diff table reports the changes in transcript levels of various wound responsive genes in the aerial parts of a plant, 1 and 6 hours after the plants were wounded with forceps. The comparison was made with aerial tissues from unwounded plants.

[1646] The data from this time course reveal a number of types of wound responsive genes and gene products, including “early responders,” and “delayed responders.” Profiles of the individual wounding responsive genes are shown in the Table below together with examples of the kinds of associated biological activities that are modulated when the activities of one or more such genes vary in plants.

| | | | EXAMPLES OF |
|---|---|---|---|
| TRANSCRIPT | TYPES OF | PHYSIOLOGICAL | BIOCHEMICAL |
| LEVELS | GENES | CONSEQUENCES | ACTIVITY |
| Up Regulated | Early Responders | Induction Of Key | Transcription Factors |
| Transcripts | To Wounding | Signaling Pathways | Kinases And |
| (Level At 1 h ≈ 6 h) | | Within And Between | Phosphatases |
| Or | | Cells | |
| (Level At 1 h > 6 h) | | Modulation Of | Jasmonic |
| | | Wounding And Stress | Acid, Salicylic Acid |
| | | Induced Signal | And Nitric Oxide |
| | | Transduction Pathways | Pathway Proteins. |
| | | Specific Gene | Glycohydrolases |
| | | Transcription Initiation | Dehydrins |
| | | Induction Of Repair | Rnases |
| | | Processes Or Cell Death | Metabolic Enzymes |
| | | | Nodulins |
| | | | Cell Division And |
| | | | Cell Wall Proteins |
| | | Reorientation Of | Cold Response |
| | | Metabolism, Including | Proteins |
| | | Management Of Active | Lipoxygenase |
| | | Oxygen | Jacalin |
| | | | Proteins To Detoxify |
| | | | Active Oxygen |
| | | | Species |
| | | Movement Of Wound | Systemin |
| | | Induced Signals Through | |
| | | Plant | |
| | | Synthesis Of | Biosynthetic |
| | | Phytoalexins And | Enzymes |
| | | Secondary Metabolites | |
| Up Related | Delayed | Maintenance Of | Transcription Factors |
| Transcripts | Responders | Defence Pathways | Kinases And |
| (Level At 1 h < 6 h) | | | Phosphatases |
| | Genes Involved In | Maintenance Of | Jasmonic |
| | Wounding | Reorientated Metabolism | Acid, Salicylic Acid |
| | Response At | | And Nitric Oxide |
| | Distant Sites From | | Pathway Proteins |
| | Wound. | | |
| | Genes Involved In | Maintenance Of Wound | Glycohydrolases |
| | Maintenance Of | Response | Dehydrins |
| | Wounding | Programmed Cell Death | Rnases |
| | Response | In Selected Cells | Metabolic Enzymes |
| | | Reorientation Of | Nodulins |
| | | Metabolism | Cold Response |
| | | | Proteins |
| | | | Lipoxygenase |
| | | | Jacalin |
| | | | Proteins To Detoxify |
| | | | Active Oxygen |
| | | | Species |
| | | | Cell Division And |
| | | | Cell Wall Proteins |
| | | Movement Of Wound | Systemin |
| | | Induced Signals Through | |
| | | Plant | |
| | | Synthesis Of | Biosynthetic |
| | | Phytoalexins And | Enzymes |
| | | Secondary Metabolites | |
| Down-Regulated | Early | Negative Regulation Of | Transcription Factors |
| Transcripts | Responder | Wounding Response | Change In Protein |
| (Level At 1 h ≈ 6 h) | Repressors Of | Pathways Released | Structure By |
| Or | Wounding | | Phosphory-Laton |
| (Level At 6 Hr > 1 h) | Response | | (Kinases) Or |
| | State | | Dephos-Phorylation |
| | | | (Phosphatases) |
| | | | Change In Chromatin |
| | | | Structure And Or |
| | | | Dna Topology |
| | Genes With | Changes In Pathways | Local Changes In |
| | Discontinued | And Processes Operating | Regulatory Proteins, |
| | Expression Or | In Cells | Metabolic Enzymes, |
| | UnsTable | | Transporters Etc. |
| | mRNA | | |
| | Following | | |
| | Wounding | | |
| Down-Regulated | Delayed | Negative Regulation Of | Transcription |
| Transcripts | Repressors Of | Wounding Response | Factors, |
| (Level At 1 hr > 6 h) | Wounding | Pathways Released | Phosphatases, |
| | Response State | | Kinases |
| | | | Changes In Protein |
| | | | Complex Structures |
| | | | Chromatin |
| | | | Restructuring |
| | | | Proteins |
| | Genes With | Change In Pathways And | Local Changes In |
| | Discontinued | Process Operating In | Regulatory Proteins, |
| | Expression Or | Cells | Metabolic Enzymes, |
| | UnsTable mRNA | | Transporters Etc. |
| | Following | Programmed Cell Death | Most Proteins In |
| | Wounding | | Selected Cells |
| | | | Undergoing Death |

[1647] Further, any desired sequence can be transcribed in similar temporal, tissue, or environmentally specific patterns as the wounding responsive genes when the desired sequence is operably linked to a promoter of a wounding responsive gene.

[1648] III.E.5. Methyl Jasmonate (Jasmonate) Responsive Genes, Gene Components and Products

[1649] Jasmonic acid and its derivatives, collectively referred to as jasmonates, are naturally occurring derivatives of plant lipids. These substances are synthesized from linolenic acid in a lipoxygenase-dependent biosynthetic pathway. Jasmonates are signalling molecules which have been shown to be growth regulators as well as regulators of defense and stress responses. As such, jasmonates represent a separate class of plant hormones.

[1650] Changes in external or internal jasmonate concentration result in modulation of the activities of many genes and gene products. Examples of such “jasmonate responsive” genes and gene products are shown in the Reference and Sequence Tables. These genes and/or products are responsible for effects on traits such as plant vigor and seed yield, especially when plants are growing in the presence of biotic or abiotic stresses. They were discovered and characterized from a much larger set of genes by experiments designed to find genes whose mRNA products changed in concentration in response to application of methyl jasmonate to plants.

[1651] Manipulation of one or more jasmonate responsive gene activities is useful to modulate the biological activities and/or phenotypes tested below. Jasmonate response genes and gene products can act alone or in combination. Useful combinations include jasmonate responsive genes and/or gene products with similar transcription profiles, similar biological activities, or members of the same co-regulated or functionally related biochemical pathways. Whole pathways or segments of pathways are controlled by transcription factor proteins and proteins controlling the activity of signal transduction pathways. Therefore, manipulation of such protein levels is especially useful for altering phenotypes and biochemical activities Such jasmonate responsive genes and gene products can function to either increase or dampen the phenotypes or activities below either in response to changes in jasmonate concentration or in the absence of jasmonate fluctuations. The MA_diff Table(s) reports the transcript levels of the experiment (see EXPT ID: 108568, 108569, 108555). For transcripts that had higher levels in the samples than the control, a “+” is shown. A “−” is shown for when transcript levels were reduced in root tips as compared to the control. For more experimental detail see the Example section below.

[1652] MeJA genes are those sequences that showed differential expression as compared to controls, namely those sequences identified in the MA_diff tables with a “+” or “−” indication.

[1653] MeJA Genes Identified by Cluster Analyses of Differential Expression

[1654] MeJA Genes Identified by Correlation to Genes that are Differentially Expressed

[1655] As described above, the transcription profiles of genes that act together are well correlated. Applicants not only have identified the genes that are differentially expressed in the microarray experiments, but also have identified the genes that act in concert with them. The MA_clust table indicates groups of genes that have well correlated transcription profiles and therefore participate in the same pathway or network.

[1656] A pathway or network of MeJA genes is any group in the MA_clust that comprises a cDNA ID that also appears in Expt ID 108568, 108569, 108555 of the MA_diff table(s).

[1657] MeJA Genes Identified by Correlation to Genes that Cause Physiological Consequences

[1658] Additionally, the differential expression data and the phenotypic observations can be merged to identify pathways or networks of MeJA genes. A group in the MA_clust is considered a MeJA pathway or network if the group comprises a cDNA ID that also appears in Knock-in or Knock-out tables that causes one or more of the phenotypes described in section above.

[1659] MeJA Genes Identified by Amino Acid Sequence Similarity

[1660] MeJA genes from other plant species typically encode polypeptides that share amino acid similarity to the sequences encoded by corn and Arabidopsis MeJA genes. Groups of MeJA genes are identified in the Protein Group table. In this table, any protein group that comprises a peptide ID that corresponds to a cDNA ID member of a MeJA pathway or network is a group of proteins that also exhibits MeJA functions/utilities.

[1661] Further, promoters of jasmonate responsive genes, as described in the Reference tables, for example, are useful to modulate transcription that is induced by jasmonate or any of the following phenotypes or biological activities below.

[1662] III.E.5.a. Use of Jasmonate Responsive Genes to Modulate Phenotypes:

[1663] Jasmonate responsive genes and their gene products can be used to alter or modulate one or more phenotypes including growth rate, whole plant (including height, flowering time, etc.), seedling, organ, coleoptile elongation, young leaves, roots, lateral roots, tuber formation, flowers, fruit, seeds, biomass; fresh and dry weight during any time in plant life, including maturation and senescence; number of flowers, number of seeds (including secondary metabolite accumulation, alkaloids, anthocyanins; paclitaxel and related taxanes, rosmarinic; seed yield (such as number, size, weight, harvest index, content and composition, e.g., amino acid, jasmonate, oil, protein, and starch); fruit yield (such as number, size, weight, harvest index, post harvest quality, content and composition e.g., amino acid, carotenoid, jasmonate, protein, starch); seed and fruit development; germination of dormant and non-dormant seeds; seed viability; seed reserve mobilization; fruit ripening (such as initiation of the reproductive cycle from a vegetative state); flower development time; insect attraction for fertilization; time to fruit maturity; senescence; fruits, fruit drop; leaves; stress and disease responses; drought; wounding; UV damage; and insect, fungus, virus, or worm damage.

[1664] Further, any desired sequence can be transcribed in similar temporal, tissue, or environmentally specific patterns as the jasmonate responsive genes when the desired sequence is operably linked to a promoter of a jasmonate responsive gene.

[1665] To improve any of the phenotype(s) above, activities of one or more of the jasmonate responsive genes or gene products can be modulated and the plants can be tested by screening for the desired trait. Specifically, the gene, mRNA levels, or protein levels can be altered in a plant utilizing the procedures described herein and the phenotypes can be assayed, for example, in accordance to citations described below.

[1666] III.E.5.b. Use of Jasmonate-Responsive Genes to Modulate Biochemical Activities:

[1667] The activities of one or more of the jasmonate responsive genes can be modulated to change biochemical or metabolic activities and/or pathways such as those noted below. Such biological activities are documented and can be measured according to the citations included in the Table below:

| | BIOCHEMICAL OR | |
|---|---|---|
| | METABOLIC | |
| | ACTIVITIES AND/OR | CITATIONS INCLUDING |
| PROCESS | PATHWAYS | ASSAYS |
| Turnover of proteins | Induction of various | This study. Standard |
| | proteases, ubiquitin and | biochemical assays. |
| | proteosome components | |
| | and turnover of RNA | |
| | polymerases and | |
| | translation initiation factors | |
| | Reduction in many | |
| | ribosomal proteins | |
| Activation of nitrogen | Induction of glutamine | Crawford (1995) Plant Cell |
| metabolism | synthetase, many | 7, 859-868 |
| | aminotransferases, | This study. Standard |
| | vegetative storage proteins | biochemical assays. |
| Lipid turnover | Induction of various | This study. Standard |
| | lipases, desaturases, and | biochemical assays. |
| | reduction of lipid transfer | |
| | protein mRNAs | |
| Sugar metabolism | Induction of sugar | This study. Standard |
| | transporters, UDP | biochemical assays. |
| | glucosyltransferases, other | |
| | transferases | |
| Glycolysis and central | Induction of glycolytic | This study. Standard |
| carbon metabolism | related enzymes. Example, | biochemical assays. |
| | glucose 6-phosphate | |
| | dehydrogenase, | |
| | glyceraldehyde-3- | |
| | phosphate dehydrogenase, | |
| | phosphoglycerate kinase, | |
| | phosphoglucomutase ATP | |
| | synthase | |
| Chlorosis | Degradation of | Tsuchiya et al. (1999) Proc. |
| | Chlorophyll | Natl. Acad. Sci. USA |
| | | 96: 15362-15367 |
| | Inhibition of | Reinbothe et al. (1993) J. |
| | Photosynthesis Related | Biol. Chem. 268, 10606-10611 |
| | Proteins | |
| Carbon Assimilation and | Induction of chlorophyll ab | Reinbothe et al. (1993) J. |
| turnover | binding protein precursor | Biol. Chem. 268, 10606-10611 |
| Jasmonate metabolism | Induction of lipid | This study. Standard |
| | biosynthesis, myrosinase | biochemical assays. |
| | and jacalin | |
| Jasmonate mediated signal | Receptor binding | Cho and Pai (2000) Mol |
| transduction | | Cells 10, 317-324 |
| | Protein kinases | Lee et al. (1998) Mol. Gen. |
| | | Genet. 259, 516-522 |
| | | Seo et al. (1999) Plant Cell |
| | | 11, 289-298 |
| | | Yoon et al. (1999) Plant Mol. |
| | | Biol. 39, 991-1001 |
| | Ubiquitination of | Xie et al. (1998) Science 280, |
| | Repressor Proteins | 1091-1094 |
| | Calcium Flux regulators | Bergey and Ryan (1999) |
| | | Plant Mol. Biol. 40, 815-823 |
| | Transcription Activators. | Xiang et al. (1996) Plant |
| | Example-induction of | Mol. Biol. 32, 415-426 |
| | various zinc finger, myb | Menke et al. (1999) EMBO J. |
| | and AP-2 related factors | 18, 4455-4463 |
| Response to Cell | Lipid Peroxidation | Dubery et al. (2000) Mol. |
| Membrane Damage | | Cell Biol. Res. Commun. 3, |
| | | 105-110 |
| Cell Elongation | Inhibition of incorporation | Burnett et al. (1993) Plant |
| | of Glucose into Cell Wall | Physiol. 103, 41-48 |
| | Saccharides | |
| Cell Organization and | Reductions in | Ishikawa et al. (1994) Plant |
| Division | tropomyosin related | Mol. Biol. 26, 403-414 |
| | proteins and certain cyclins | |
| | Induction of actins and | |
| | tubulins | |
| Cell Wall Turnover and | Induction of cell wall | Creelman et al. (1992) Proc. |
| modulation | proteins, glycine-rich | Natl. Acad. Sci. USA 89, |
| | proteins, annexins, pectate | 4938-4941 |
| | lyase and pectin esterases | Garcia-Muniz et al. (1998) |
| | Reductions in various | Plant Mol. Biol. 38, 623-632 |
| | dehydrins and expansins | Norman et al (1999) Mol. |
| | | Plant Microbe Interact. 12, |
| | | 640-644 |
| Stress, Disease, and | Induction of antifungal | Hildmann et al. (1992) Plant |
| Pathogen Resistance | proteins, wounding | Cell 4, 1157-1170 |
| | responsive proteins, | Reinbothe et al. (1994) Proc. |
| | dehydrins, heat shock type | Natl. Acad. Sci. USA 91, |
| | proteins and elicitor | 7012-7016 |
| | response proteins | Moons et al. (1997) Plant |
| | | Cell 9, 2243-2259 |
| | | Richard et al. (2000) Plant |
| | | Mol. Biol. 43, 1-10 |
| | | Van Wees et al. (2000) Proc. |
| | | Natl. Acad. Sci. USA 97, |
| | | 8711-8716 |
| | Phytoalexin Biosynthesis | Creelman et al. (1992) Proc. |
| | | Natl. Acad. Sci. USA 89, |
| | | 4938-4941 |
| | | Choi et al. (1994) Proc. Natl. |
| | | Acad. Sci. USA 91, 2329-2333 |
| | Biosynthesis of phenolics | Doares et al., (1995) Proc. |
| | | Natl. Acad. Sci. USA 92, |
| | | 4095-5098 |
| | Production of Protease | Botella et al. (1996) Plant |
| | Inhibitors | Physiol 112, 1201-1210 |
| | Defense Gene | Mason et al. (1993) Plant |
| | Transcription in Response | Cell 5, 241-251 |
| | to UV | Schaller et al. (2000) Planta |
| | | 210, 979-984 |
| Secondary Metabolite | Fruit Cartenoid | Czapski and Saniewski |
| biosynthesis | Composition | (1992) J. Plant Physol. 139, |
| | | 265-268 |
| | Palitaxel and Related | Yukimune et al. (1996) |
| | Taxanes | Nature Biotech. 14, 1129-1132 |
| | Alkaloids | Aerts et al. (1994) Plant J. 4, |
| | | 635-643 |
| | | Geerlings et al. (2000) J. |
| | | Biol. Chem. 275, 3051-3056 |
| | Anthocyanins | Franceschi et al. (1991) Proc. |
| | | Natl. Acad. Sci. USA 83, |
| | | 6745-6749 |
| | Rosmarinic | Mizukami et al., (1993) Plant |
| | | Cell Reprod. 12, 706-709 |
| | Activation of Ethylene- | Czapski and Saniewski |
| | forming Enzyme and | (1992) J. Plant Physiol. 139, |
| | Production of Ethylene | 265-268 |

[1668] Other biological activities that can be modulated by the jasmonate responsive genes and their products are listed in the Reference Tables. Assays for detecting such biological activities are described in the Domain section of the Reference Tables.

[1669] Jasmonate responsive genes are characteristically differentially transcribed in response to fluctuating jasmonate levels or concentrations, whether internal or external to an organism or cell. The MA_diff table(s) report(s) the changes in transcript levels of various jasmonate responsive genes in the aerial parts of a seedling at 1 and 6 hours after being sprayed with Silwet L-77 solution enriched with methyl jasmonate as compared to seedlings sprayed with Silwet L-77 alone.

[1670] The data from this time course reveal a number of types of jasmonate responsive genes and gene products, including “early responders” and “delayed responders”. Profiles of the individual kinds of jasmonate responsive genes are shown in the Table below, together with examples of the kinds of associated biological activities that are modulated when the activities of such genes vary.

| GENE | FUNCTIONAL | TYPE OF | EXAMPLES OF |
|---|---|---|---|
| EXPRESSION | CATEGORY OF | BIOLOGICAL | BIOCHEMICAL |
| LEVELS | GENE | ACTIVITY | ACTIVITY |
| Upregulated | Early Responders to | Binding and | Transcription Factors |
| genes | Jasmonate | Perception of | Transporters |
| (Level at 1 hour ≅ 6 hours). | | Jasmonate | Kinases, Phosphatases, |
| | | Transduction of | Leucine-rich Repeat |
| (Level at 1 hour > | | Jasmonate signal | Proteins (LRRs), GTP- |
| 6 hours) | | tranduction response | binding proteins (G- |
| | | pathways | proteins), calcium- |
| | | Initiation of Specific | binding proteins and |
| | | Gene Transcription to | calcium responsive |
| | | reorientate | proteins |
| | | metabolism | Proteases, lipases, |
| | | | glutamine synthetase |
| | | | (GS), arginase, |
| | | | aminotransferases, |
| | | | glycosyltransferases, |
| | | | sugar transporters, cell |
| | | | wall proteins, methyl |
| | | | transferases, glycolytic |
| | | | enzymes. |
| Upregulated | Delayed Jasmonate | Maintenance of | Enzymes of methyl |
| genes | Responders | Metabolism under | jasmonate-induced |
| (Level at 1 hour < | | high Jasmonate | pathways, including |
| 6 hours) | | Jasmonate signal | dehydrin, phytoalexin, |
| | | Tranduction Response | phenolic, carotenoid, |
| | | Pathways | alkaloid and |
| | | Gene Transcription to | anthocyanin |
| | | Reorientate | biosynthesis. |
| | | Metabolism | Transcription factors, |
| | | Gene Transcription to | Transporters, Kinases |
| | | Maintain Reorientated | and phosphatases |
| | | Metabolism | Proteases, Lipases, |
| | | Reorient Cell | Glutaminae |
| | | Division and Cell | Synthetase, Arginase, |
| | | Development | Aminotransferases, |
| | | | Lipid Peroxidases, |
| | | | Glycosyltransferases, |
| | | | Sugar transporters, |
| | | | Cell Wall Proteins, |
| | | | Glycolytic Enzymes, |
| | | | Chlorophyll Binding |
| | | | Proteins |
| | | | Transcription factors, |
| | | | kinases, phosphatases, |
| | | | LRRs, G-proteins |
| | | | Actins, Tubulins, |
| | | | Myosins Cyclins, |
| | | | Cyclin-dependent |
| | | | Kinases (CDPKs) |
| | | | Glycosyl Transferases, |
| | | | Glycosyl hydrolases, |
| | | | Expansins, Extensins, |
| | | | O-Methyl |
| | | | Transferases |
| | | | Arabinogalactan- |
| | | | proteins (AGPs), |
| | | | Enzymes of Lipid |
| | | | Biosynthesis, Cutinase |
| Down regulated | Early responders of | Relese of Suppression | Transcription Factors, |
| transcripts | Jasmonate | of Jasmonate Induced | Kinases, Phosphatases, |
| (level at 1 hour = | Genes with | Pathways | LRRs, G-Proteins, |
| 6 hours) | discontinued | Reorientation of | Chromatin |
| (level at 6 hours > | expression or | metabolism | Restructuring proteins, |
| 1 hour) | unsTable mRNA | | Ribosomal proteins, |
| | following Jasmonate | | Translation Factors, |
| | uptake | | Histones, RNA |
| | | | polymerases, Pectin |
| | | | esterase, Lipid transfer |
| | | | proteins |
| Down regulated | Genes with | Negative Regulation | Transcription factors |
| transcripts | Discontinued | of Jasmonate Induced | Kinases, Phosphatases |
| (level at 1 hour > | expression or | Pathways Released. | Chromatin |
| 6 hours) | UnsTable mRNA | Reorientation of | Restructuring Proteins, |
| | Following Jasmonate | metabolism | LRRs, G-proteins |
| | uptake | | Ribosomal proteins, |
| | | | Translation Factors, |
| | | | Histones |
| | | | RNA Polymerases, |
| | | | Cyclins |
| | | | Pectin esterase, Lipid |
| | | | Transfer Proteins |

### Use of Promoters of Jasmonate Responsive Genes

[1671] Promoters of Jasmonate responsive genes are useful for transcription of any desired polynucleotide or plant or non-plant origin. Further, any desired sequence can be transcribed in a similar temporal, tissue, or environmentally specific patterns as the Jasmonate responsive genes where the desired sequence is operably linked to a promoter of a Jasmonate responsive gene. The protein product of such a polynucleotide is usually synthesized in the same cells, in response to the same stimuli as the protein product of the gene from which the promoter was derived. Such promoter are also useful to produce antisense mRNAs to down-regulate the product of proteins, or to produce sense mRNAs to down-regulate mRNAs via sense suppression.

[1672] III.E.6. Reactive Oxygen Responsive Genes, Gene Components and H2O2 Products

[1673] Often growth and yield are limited by the ability of a plant to tolerate stress conditions, including pathogen attack, wounding, extreme temperatures, and various other factors. To combat such conditions, plant cells deploy a battery of inducible defense responses, including triggering an oxidative burst. The burst of reactive oxygen intermediates occurs in time, place and strength to suggest it plays a key role in either pathogen elimination and/or subsequent signaling of downstream defense functions. For example, H₂O₂ can play a key role in the pathogen resistance response, including initiating the hypersensitive response (HR). HR is correlated with the onset of systemic acquired resistance (SAR) to secondary infection in distal tissues and organs.

[1674] Changes in reactive oxygen, such as H₂O₂ or O₂⁻, in the surrounding environment or in contact with a plant results in modulation of the activities of many genes and hence levels of gene products. Examples of such reactive oxygen responsive genes and gene products are shown in the Reference, Sequence, Protein Group, Protein Group Matrix, MA_diff and MA_clust tables. These genes and/or products are responsible for effects on traits such as plant vigor and seed yield. The genes were discovered and characterized from a much larger set by experiments designed to find genes whose mRNA products changed in response to application of reactive oxygen, such as H₂O₂, to plants.

[1675] Manipulation of one or more reactive oxygen responsive gene activities is useful to modulate the following biological activities and/or phenotypes listed below. Reactive oxygen responsive genes and gene products can act alone or in combination. Useful combinations include reactive oxygen responsive genes and/or gene products with similar transcription profiles, similar biological activities, or members of the same or functionally related biochemical pathways. Whole pathways or segments of pathways are controlled by transcription factor proteins and proteins controlling the activity of signal transduction pathways. Therefore, manipulation of such protein levels is especially useful for altering phenotypes and biochemical activities of plants.

[1676] Such reactive oxygen responsive genes and gene products can function to either increase or dampen the above phenotypes or activities either in response to changes in reactive oxygen concentration or in the absence of reactive oxygen fluctuations. The MA_diff Table(s) reports the transcript levels of the experiment (see EXPT ID: 108582, 108583, 108537, 108538, 108558, and H2O2 (relating to SMD 7523)). For transcripts that had higher levels in the samples than the control, a “+” is shown. A “−” is shown for when transcript levels were reduced in root tips as compared to the control. For more experimental detail see the Example section below.

[1677] Reactive Oxygen genes are those sequences that showed differential expression as compared to controls, namely those sequences identified in the MA_diff tables with a “+” or “−” indication.

[1678] Reactive Oxygen Genes Identified by Cluster Analyses of Differential Expression

[1679] Reactive Oxygen Genes Identified by Correlation to Genes that are Differentially Expressed

[1680] As described above, the transcription profiles of genes that act together are well correlated. Applicants not only have identified the genes that are differentially expressed in the microarray experiments, but also have identified the genes that act in concert with them. The MA_clust table indicates groups of genes that have well correlated transcription profiles and therefore participate in the same pathway or network.

[1681] A pathway or network of Reactive Oxygen genes is any group in the MA_clust that comprises a cDNA ID that also appears in Expt ID 108582, 108583, 108537, 108538, 108558, and H2O2 (relating to SMD 7523) of the MA_diff table(s).

[1682] Reactive Oxygen Genes Identified by Correlation to Genes that Cause Physiological Consequences

[1683] Additionally, the differential expression data and the phenotypic observations can be merged to identify pathways or networks of Reactive Oxygen genes. A group in the MA_clust is considered a Reactive Oxygen pathway or network if the group comprises a cDNA ID that also appears in Knock-in or Knock-out tables that causes one or more of the phenotypes described in section above.

[1684] Reactive Oxygen Genes Identified by Amino Acid Sequence Similarity

[1685] Reactive Oxygen genes from other plant species typically encode polypeptides that share amino acid similarity to the sequences encoded by corn and Arabidopsis Reactive Oxygen genes. Groups of Reactive Oxygen genes are identified in the Protein Group table. In this table, any protein group that comprises a peptide ID that corresponds to a cDNA ID member of a Reactive Oxygen pathway or network is a group of proteins that also exhibits Reactive Oxygen functions/utilities.

[1686] Further, promoters of reactive oxygen responsive genes, as described in the Reference tables, for example, are useful to modulate transcription that is induced by reactive oxygen or any of the following phenotypes or biological activities below.

[1687] III.E.6.a. Use of Reactive Oxygen Responsive Genes to Modulate Phenotypes

[1688] Reactive oxygen responsive genes and gene products are useful to or modulate one or more phenotypes including pathogen tolerance and/or resistance; Avr/R locus sensitive; non-host sensitive; HR; SAR (e.g., where the reactive oxygen responsive gene and products are modulated in conjunction with any of the bacterial, fungal, virus, or other organism listed below); bacteria resistance, e.g. to Erwinia stewartii, Pseudomonas syringae, Pseudomonas tabaci, Stuart's wilt, etc.; fungal resistance including to downy mildews such as Scleropthora macrospora, Sclerophthora rayissiae, Sclerospora graminicola, Peronosclerospora sorghi, Peronosclerospora philippinensis, Peronosclerospora sacchari, Peronosclerospora maydis; rusts such as Puccinia sorphi, Puccinia polysora, Physopella zeae, etc.; other fungal diseases such as Cercospora zeae-maydis, Colletotrichum graminicola, Fusarium monoliforme, Exserohilum turcicum, Bipolaris maydis, Phytophthora parasitica, Peronospora tabacina, Septoria, etc.; virus or viroid resistance, e.g. to tobacco or cucumber mosaic virus, ringspot virus, necrosis virus, pelargonium leaf curl virus, red clover mottle virus, tomato bushy stunt virus, and like viruses; insect resistance, such as to aphids e.g. Myzus persicae; beetles, beetle larvae; etc.; nematodes, e.g. Meloidogyne incognita; lepidoptera, e.g. Heliothus spp. etc.; resistance specifically in primary or secondary leaves; stress tolerance; winter survival; cold tolerance; heavy metal tolerance, such as cadmium; physical wounding; increased organelle tolerance to redox stress, such as in mitochondria, and chloroplasts; cell death; apoptosis, including death of diseased tissue; senescence; fruit drop; biomass; fresh and dry weight during any time in plant life, such as maturation; number of flowers, seeds, branches, and/or leaves; seed yield, including number, size, weight, and/or harvest index; fruit yield, including number, size, weight, and/or harvest index; plant development; time to fruit maturity; cell wall strengthening and reinforcement; plant product quality, e.g. paper making quality); food additives; treatment of indications modulated by free radicals, and cancer

[1689] To regulate any of the phenotype(s) above, activities of one or more of the reactive oxygen responsive genes or gene products can be modulated and the plants can be tested by screening for the desired trait. Specifically, the gene, mRNA levels, or protein levels can be altered in a plant utilizing the procedures described herein and the phenotypes can be screened for variants as in Winkler et al. (1998) Plant Physiol 118: 743-50 and assayed, for example, in accordance to Alvarez et al., (1998) Cell 92: 773-784; Halhbrock and Scheel, (1989) Ann. Rev. Plant Physiol. Plant Mol. Biol. 40: 347-369; Lamb et al., (1997) Ann. Rev. Plant Mol. Biol. Plant Physio. 48: 251-275; Lapwood et al. (1984) Plant Pathol. 33: 13-20; Levine et al. (1996) Curr. Biol. 6: 427-437; McKersie et al., (2000) Plant Physiol. 122(4): 1427-1437; Olson and Varner (1993) Plant J. 4: 887-892; Pastore et al., (2000), FEBS Lett 470(1): 88-92; Pastori et al., (1997) Plant Physiol. 113: 411-418. Romero-Puertas et al., (1999) Free Radic. Res. 1999 31 Suppl: S25-31; Shirataki et al., Anticancer Res 20(1A): 423-426 (2000); Wu et al., (1995) Plant Cell 7: 1357-1368;

[1690] III.E.6.b. Use of Reactive Oxygen Responsive Genes to Modulate Biochemical Activities

[1691] The activities of one or more of the reactive oxygen responsive genes can be modulated to change biochemical or metabolic activities and/or pathways such as those noted below. Such biological activities are documented and can be measured according to the citations above and included in the Table below:

| | BIOCHEMICAL OR | |
|---|---|---|
| | METABOLIC ACTIVITIES | CITATIONS INCLUDING |
| PROCESS | AND/OR PATHWAYS | ASSAYS |
| Reinforcement of | Modulation Of The Production Of | Bradley et al. 1992. Cell 70, |
| Cell Walls | ExtracTable Proline-Rich Protein | 21-30 |
| | Modulation Of Lignification | Mansouri et al. (1999) Physiol |
| | | Plant 106: 355-362 |
| Stress, Disease, | Induction Of Pathogenesis Related | Chamnongpol et. al. (1998) |
| Pathogen Resistance | Proteins, Phytoalexins And Many | Proc. Nat. Acad Sci USA |
| and Wounding | Defense Pathways. | 12; 95: 5818-23. |
| | Induction Of Detoxifying | Davis et al. (1993) |
| | Enzymes Such As Glutathione S- | Phytochemistry 32: 607-611. |
| | Transferase And Ascorbate | Chen et. al. Plant J. (1996) |
| | Peroxidase | 10: 955-966 |
| | Disease Resistance | Gadea et. al. (1999) Mol Gen |
| | | Genet 262: 212-219 |
| | | Wu et. al. (1995) Plant Cell 7: |
| | | 1357-68 |
| | Reactive Oxygen Generation | Orozco-Cardenas and Ryan |
| | Following Wounding And | (1999) Proc. Nat. Acad. Sci. |
| | Changes In Physical Pressure | USA 25; 96: 6553-7. |
| | | Yahraus et al. (1995) Plant |
| | | Physiol. 109: 1259-1266 |
| | Modulation Of Genes Involved In | LEGENDRE ET AL. (1993) |
| | Wound Repair And Cell Division | PLANT PHYSIOL. 102: 233-240 |
| | Modulation Of Nitric Oxide | DELLEDONNE ET AL. |
| | Signaling | (1998) NATURE 394: 585-588 |
| | Salicyclic Acid Accumulation And | DURNER AND KLESSIG |
| | Signaling | (1996) J. BIOL. CHEM. |
| | | 271: 28492-501 |
| Programmed Cell | Induction Of Cell Death Pathway | LEVINE ET AL. (1996) |
| Death | Genes | CURR. BIOL. 6: 427-437. |
| | | REYNOLDS ET. AL. (1998) |
| | | BIOCHEM. J. 330: 115-20 |

[1692] Other biological activities that can be modulated by the reactive oxygen responsive genes and their products are listed in the Reference tables. Assays for detecting such biological activities are described in the Protein Domain table.

[1693] Reactive oxygen responsive genes are characteristically differentially transcribed in response to fluctuating reactive oxygen levels or concentrations, whether internal or external to an organism or cell. The MA_diff table reports the changes in transcript levels of various reactive oxygen responsive genes in the aerial parts of a plant at 1 and 6 hours after the plant was sprayed with Silwett L-77 solution enriched with hydrogen peroxide as compared to plants sprayed with Silwett L-77 alone.

[1694] The data from this time course reveal a number of types of reactive oxygen responsive genes and gene products, including “early responders,” and “delayed responders”. Profiles of individual reactive oxygen responsive genes are shown in the Table below together with examples of which associated biological activities are modulated when the activities of one or more such genes vary in plants.

| | | | EXAMPLES OF |
|---|---|---|---|
| GENE | FUNCTIONAL | | BIOCHEMICAL |
| EXPRESSION | CATEGORY OF | PHYSIOLOGICAL | ACTIVITY |
| LEVELS | GENE | CONSequence | OF GENE PRODUCTS |
| Upregulated | Early Responders | Perceiving | Transcription Factors |
| transcripts | To | Reactive Oxygen | Kinases And Phosphatases |
| (Higher at 1 h | Reactive Oxygen | Reactive Oxygen | Transporters |
| Than 6 h) | | Response | Glutathione S-Transferase |
| (Level at 1 h ≅ | | Transduction | Heat Shock Proteins |
| 6 h) | | Pathways | Salicylic Acid Response |
| | | Initiating Specific | Pathway Proteins |
| | | Gene Transcription | Jasmonic Acid Pathway |
| | | | Proteins |
| | | | Dehydrins |
| | | | Peroxidases |
| | | | Catalase |
| | | | Proteases |
| | | | Pathogen Response Proteins |
| | | | Ca 2+ Channel Blockers |
| | | | Phenylalanine Ammonia |
| | | | Lyase |
| Upregulated | Delayed Reactive | Maintenance Of | Transcription Factors |
| transcripts | Oxygen | Defence Pathways | Kinases And Phosphatases |
| (Lower at 1 h | Responders | To Control Active | Reactive Oxygen |
| Than 6 h) | | Oxygen | Scavenging Enzymes |
| | | Activation Of Cell | Cell Wall And Cell |
| | | Death Pathways In | Division/Growth Promoting |
| | | Specific Cells | Pathway Enzymes |
| | | | Pathogen Response |
| | | | Proteins |
| | | | Proteins Of Defence |
| | | | Pathways |
| | | | Proteases, Cellulases, |
| | | | Nucleases And Other |
| | | | Degrading Enzymes. |
| | | | Membrane Proteins |
| | | | Mitochondrial And |
| | | | Chloroplast Energy Related |
| | | | Proteins |
| Downregulated | Early Responder | Negative | Transcription Factors |
| transcripts | Repressors Of | Regulation Of | Kinases And Phosphatases |
| Level at 1 h ≅ 6 h | Reactive Oxygen | Reactive Oxygen- | Chromatin Remodelling |
| Level at 6 h > 1 h. | Response | Inducible Pathways | Proteins |
| Down Regulated | Pathways | Released | Metabolic Enzymes In |
| Transcripts | Genes Of | Reduction In | Affected Cells |
| (Level at 1 h > 6 h | Pathways That | Activities Of | Membrane Proteins And |
| | Are Minimized In | Pathways Not | Cell Wall Proteins |
| | Response To | Maintained Under | Transcription Factors |
| | Reactive Oxygen | High Reactive | Kinases And Phosphatases |
| | Delayed | Oxygen | Chromatin Remodelling |
| | Responder | Negative | Proteins |
| | Repressors Of | Regulation Of | Metabolic Enzymes In |
| | Reactive Oxygen | Reactive Oxygen | Affected Cells |
| | Response | Inducible Pathways | Membrane Proteins And |
| | Pathways | Released | Cell Wall Proteins |
| | Genes Of | Reduction In | Many Proteins In Cells |
| | Pathways That | Activities Of | Undergoing Cell Death Or In |
| | Are Minimised In | Pathways Not | Damaged Cells |
| | Response To | Maintained Under | |
| | Reactive Oxygen | Reactive Oxygen | |
| | | Programmed Cell | |
| | | Death | |

[1695] Further, promoters of reactive oxygen responsive genes, as described in the Reference tables, for example, are useful to modulate transcription that is induced by reactive oxygen or any of the following phenotypes or biological activities below.

[1696] III.E.7. Salicylic Acid Responsive Genes, Gene Components and Products

[1697] Plant defense responses can be divided into two groups: constitutive and induced. Salicylic acid (SA) is a signaling molecule necessary for activation of the plant induced defense system known as systemic acquired resistance or SAR. This response, which is triggered by prior exposure to avirulent pathogens, is long lasting and provides protection against a broad spectrum of pathogens. Another induced defense system is the hypersensitive response (HR). HR is far more rapid, occurs at the sites of pathogen (avirulent pathogens) entry and precedes SAR. SA is also the key signaling molecule for this defense pathway.

[1698] Changes in SA concentration in the surrounding environment or within a plant results in modulation of many genes and gene products. Examples of such SA responsive genes and gene products are shown in the Reference, Sequence, Protein Group, Protein Group Matrix, MA_diff and MA_clust tables. These genes and/or products are responsible for effects on traits such as plant vigor and seed yield. They were discovered and characterized from a much larger set by experiments designed to find genes whose mRNA products changed in response to SA treatment.

[1699] While SA responsive polynucleotides and gene products can act alone, combinations of these polynucleotides also affect growth and development. Useful combinations include different SA responsive polynucleotides and/or gene products that have similar transcription profiles or similar biological activities, and members of the same or similar biochemical pathways. In addition, the combination of SA responsive polynucleotides and/or gene product with another environmentally responsive polynucleotide is also useful because of the interactions that exist between hormone-regulated pathways, stress and pathogen induced pathways, nutritional pathways and development. Here, in addition to polynucleotides having similar transcription profiles and/or biological activities, useful combinations include polynucleotides that may have different transcription profiles but which participate in common and overlapping pathways.

[1700] Such SA responsive genes and gene products can function to either increase or dampen the above phenotypes or activities either in response to changes in SA concentration or in the absence of SA fluctuations. The MA_diff Table(s) reports the transcript levels of the experiment (see EXPT ID: 108586, 108587, 108515, 108552, 108471, 108472, 108469, 108470, 107953, 107960, 108443, 108440, 108441, 108475, 108476). For transcripts that had higher levels in the samples than the control, a “+” is shown. A “−” is shown for when transcript levels were reduced in root tips as compared to the control. For more experimental detail see the Example section below.

[1701] SA genes are those sequences that showed differential expression as compared to controls, namely those sequences identified in the MA_diff tables with a “+” or “−” indication.

[1702] SA Genes Identified by Cluster Analyses of Differential Expression

[1703] SA Genes Identified by Correlation to Genes that are Differentially Expressed

[1704] As described above, the transcription profiles of genes that act together are well correlated. Applicants not only have identified the genes that are differentially expressed in the microarray experiments, but also have identified the genes that act in concert with them. The MA_clust table indicates groups of genes that have well correlated transcription profiles and therefore participate in the same pathway or network.

[1705] A pathway or network of SA genes is any group in the MA_clust that comprises a cDNA ID that also appears in Expt ID 108586, 108587, 108515, 108552, 108471, 108472, 108469, 108470, 107953, 107960, 108443, 108440, 108441, 108475, 108476 of the MA_diff table(s).

[1706] SA Genes Identified by Correlation to Genes that Cause Physiological Consequences

[1707] Additionally, the differential expression data and the phenotypic observations can be merged to identify pathways or networks of SA genes. A group in the MA_clust is considered a SA pathway or network if the group comprises a cDNA ID that also appears in Knock-in or Knock-out tables that causes one or more of the phenotypes described in section above.

[1708] SA Genes Identified by Amino Acid Sequence Similarity

[1709] SA genes from other plant species typically encode polypeptides that share amino acid similarity to the sequences encoded by corn and Arabidopsis SA genes. Groups of SA genes are identified in the Protein Group table. In this table, any protein group that comprises a peptide ID that corresponds to a cDNA ID member of a SA pathway or network is a group of proteins that also exhibits SA functions/utilities.

[1710] Further, promoters of SA responsive genes, as described in the Reference tables, for example, are useful to modulate transcription that is induced by SA or any of the following phenotypes or biological activities below.

[1711] III.E.7.a. Use of Salicylic Acid-Responsive Genes to Modulate Phenotypes

[1712] SA responsive genes and gene products are useful to or modulate one or more phenotypes including pathogen tolerance and/or resistance; Avr/R locus Interactions; non-host interactions; HR; SAR, e.g., SA responsive genes and/or products in conjunction with any of the organisms listed below; resistance to bacteria e.g. to Erwinia stewartii, Pseudomonas syringae, Pseudomonas tabaci, Stuart's wilt, etc.; resistance to fungi e.g. to Downy mildews such as Scleropthora macrospora, Sclerophthora rayissiae, Sclerospora graminicola, Peronosclerospora sorghi, Peronosclerospora philippinensis, Peronosclerospora sacchari, Peronosclerospora maydis; rusts such As Puccinia sorphi, Puccinia polysora, Physopella zeae, etc.; and to other fungal diseases e.g. Cercospora zeae-maydis, Colletotrichum graminicola, Fusarium monoliforme, Exserohilum turcicum, Bipolaris maydis, Phytophthora parasitica, Peronospora tabacina, Septoria, etc.; resistance to viruses or viroids e.g., to Tobacco or Cucumber Mosaic Virus, Ringspot Virus, Necrosis Virus, Pelargonium Leaf Curl Virus, Red Clover Mottle Virus, Tomato Bushy Stunt Virus, and like viruses; resistance to insects, such as to aphids e.g. Myzus persicae; to beetles and beetle larvae; to lepidoptera larvae e.g. Heliothus etc.; resistance to nematodes, e.g. Meloidogyne incognita etc.; local resistance in primary (infected) or secondary (uninfected) leaves; stress tolerance; winter survival; cold tolerance; salt tolerance; heavy metal tolerance, such as cadmium; tolerance to physical wounding; increased organelle tolerance to redox stress (such as in mitochondria, and chloroplasts); cell death; programmed cell death, including death of diseased tissue and during senescence); fruit drop; biomass; fresh and dry weight during any time in plant life, such as maturation; number of flowers, seeds, branches, and/or leaves; seed yield, including number, size, weight, and/or harvest index; fruit yield, including number, size, weight, and/or harvest index; plant development; time to fruit maturity; cell wall strengthening and reinforcement; plant product quality; e.g. paper making quality);food additives; treatment of indications modulated by free radicals; and cancer.

[1713] To regulate any of the desired phenotype(s) above, activities of one or more of the SA responsive genes or gene products can be modulated and the plants tested by screening for the desired trait. Specifically, the gene, mRNA levels, or protein levels can be altered in a plant utilizing the procedures described herein and the phenotypes can be assayed. As an example, a plant can be transformed according to Bechtold and Pelletier (1998, Methods. Mol. Biol. 82:259-266) and/or screened for variants as in Winkler et al. (1998) Plant Physiol 118: 743-50 and visually inspected for the desired phenotype or metabolically and/or functionally assayed according to Zhao et al. (1998, Plant Cell 10:359-70) and Alvarez et al. (1998, Cell 92: 733-84).

[1714] III.E.7.b. Use of Salicylic Acid-Responsive Genes to Modulate Biochemical Activities

[1715] The activities of one or more of the SA responsive genes can be modulated to change biochemical or metabolic activities and/or pathways such as those noted below. Such biological activities can be measured according to the citations included in the Table below:

| | BIOCHEMICAL OR | |
|---|---|---|
| | METABOLIC ACTIVITIES | CITATION INCLUDING |
| PROCESS | AND/OR PATHWAYS | ASSAYS |
| Protection | Systemic Acquired Resistance | Alvarez et al. (1998) Cell |
| From | (SAR) | 92: 733-84 |
| Microbial | Phytoalexin Biosynthesis | Lapwood et al. (1984) Plant |
| Pathogens | PR Protein Biosynthesis | Pathol. 33: 13-20 |
| | Local Resistance | Davis et al. (1993) |
| | Wound Response | Phytochemistry 32: 607-11 |
| | | Yahraus et al. (1995) Plant |
| | | Physiol. 109: 1259-66 |
| Cell | Modulation Of Reactive | Alvarez et al. (1998) Cell |
| Signaling | Oxygen Signaling | 92: 773-784 |
| | Modulation Of No Signaling | Delledonne et al. (1998) |
| | | Nature 394: 585-588 |
| Growth | Lignification | Redman et al. (1999) Plant |
| And | | Physiol. 119: 795-804 |
| Development | | |

[1716] Other biological activities that can be modulated by the SA responsive genes and gene products are listed in the Reference tables. Assays for detecting such biological activities are described in the Protein Domain table.

[1717] Salicylic acid responsive genes are characteristically differentially transcribed in response to fluctuating SA levels or concentrations, whether internal or external to an organism or cell. The MA_diff table reports the changes in transcript levels of various SA responsive genes in entire seedlings at 1 and 6 hours after the seedling was sprayed with a Hoagland's solution enriched with SA as compared to seedlings sprayed with Hoagland's solution only.

[1718] The data from this time course can be used to identify a number of types of SA responsive genes and gene products, including “early responders” and “delayed responders.” Profiles of these different SA responsive genes are shown in the Table below together with examples of the kinds of associated biological activities.

| | | | EXAMPLES OF |
|---|---|---|---|
| GENE | FUNCTIONAL | | BIOCHEMICAL |
| EXPRESSION | CATEGORY | PHYSIOLOGICAL | ACTIVITIES OF GENE |
| LEVELS | OF GENE | CONSEQUENCES | PRODUCTS |
| Upregulated Genes | Early | SA Perception | Transcription Factors |
| (Level At 1 h ≅ 6 h) | Responders To | SA Uptake | Transporters, Kinases, |
| Or | SA | Modulation Of SA | Phosphatases, G- |
| (Level At 1 h > 6 h) | | Response Transduction | Proteins, LRR, DNA |
| | | Pathways | Remodelling Proteins |
| Upregulated Genes | Delayed | Specific Defensegene | Proteases, PRProteins, |
| (Level At 1 h < 6 h) | Responders To | Transcription Initiation | Cellulases, Chitinases, |
| | SA | (E. G. Pr Genes, Pal | Cutinases, Other |
| | | | Degrading Enzymes, Pal, |
| | | | Proteins Of Defense |
| | | | Pathways, Cell Wall |
| | | | Proteins |
| | | | Epoxide Hydrolases, |
| | | | Methyl Transferases |
| Downregulated | Early | Negative Regulation | Transcription factors, |
| (Level At 1 h ≅ 6 h) | Responder | Of SA Inducible | kinases, phosphatases, G- |
| Or | Repressors To | Pathways Released | proteins, LRR, |
| (Level At 6 h > 1 h) | SA | | transporters, calcium |
| | Genes With | | binding proteins, |
| | Discontinued | | chromatin remodelling |
| | Expression Or | | protein |
| | UnsTable | | |
| | mRNA In The | | |
| | Presence Of SA | | |
| Down-Regulated | Delayed | Negative Regulation Of | Transcription Factors, |
| Transcripts | Responders To | SA Inducible Pathways | Kinases, Phosphatases, |
| (Level At 1 h > 6 h) | SA Metabolism | Released | G-Proteins, LRR, |
| | Genes With | | Transporters, Calcium |
| | Discontinued | | Binding Proteins, |
| | Expression Or | | Chromatin Remodelling |
| | UnsTable | | Protein |
| | mRNA In The | | |
| | Presence Of SA | | |

[1719] Further, any desired sequence can be transcribed in similar temporal, tissue, or environmentally specific patterns as the SA responsive genes when the desired sequence is operably linked to a promoter of a SA responsive gene.

[1720] III.E.8. Nitric Oxide Responsive Genes, Gene Components and Products

[1721] The rate-limiting element in plant growth and yield is often its ability to tolerate suboptimal or stress conditions, including pathogen attack conditions, wounding and the presence of various other factors. To combat such conditions, plant cells deploy a battery of inducible defense responses, including synergistic interactions between nitric oxide (NO), reactive oxygen intermediates (ROS), and salicylic acid (SA). NO has been shown to play a critical role in the activation of innate immune and inflammatory responses in animals. At least part of this mammalian signaling pathway is present in plants, where NO is known to potentiate the hypersensitive response (HR). In addition, NO is a stimulator molecule in plant photomorphogenesis.

[1722] Changes in nitric oxide concentration in the internal or surrounding environment, or in contact with a plant, results in modulation of many genes and gene products. Examples of such nitric oxide responsive genes and gene products are shown in the Reference and Sequence Tables. These genes and/or products are responsible for effects on traits such as plant vigor and seed yield. They were discovered and characterized from a much larger set by experiments designed to find genes whose mRNA products changed in response to nitric oxide treatment.

[1723] While nitric oxide responsive polynucleotides and gene products can act alone, combinations of these polynucleotides also affect growth and development. Useful combinations include different nitric oxide responsive polynucleotides and/or gene products that have similar transcription profiles or similar biological activities, and members of the same or similar biochemical pathways. Whole pathways or segments of pathways are controlled by transcription factor proteins and proteins controlling the activity of signal transduction pathways. Therefore, manipulation of the levels of such proteins is especially useful for altering phenotypes and biochemical activities of plants. In addition, the combination of a nitric oxide responsive polynucleotide and/or gene product with other environmentally responsive polynucleotides is also useful because of the interactions that exist between hormone-regulated pathways, stress pathways, pathogen stimulated pathways, nutritional pathways and development. Here, in addition to polynucleotides having similar transcription profiles and/or biological activities, useful combinations include polynucleotides that may have different transcription profiles but which participate in common or overlapping pathways. The MA_diff Table(s) reports the transcript levels of the experiment (see EXPT ID: 108584, 108585, 108526, 108527, 108559). For transcripts that had higher levels in the samples than the control, a “+” is shown. A “−” is shown for when transcript levels were reduced in root tips as compared to the control. For more experimental detail see the Example section below.

[1724] NO genes are those sequences that showed differential expression as compared to controls, namely those sequences identified in the MA_diff tables with a “+” or “−” indication.

[1725] NO Genes Identified by Cluster Analyses of Differential Expression

[1726] NO Genes Identified by Correlation to Genes that are Differentially Expressed

[1727] As described above, the transcription profiles of genes that act together are well correlated. Applicants not only have identified the genes that are differentially expressed in the microarray experiments, but also have identified the genes that act in concert with them. The MA_clust table indicates groups of genes that have well correlated transcription profiles and therefore participate in the same pathway or network.

[1728] A pathway or network of NO genes is any group in the MA_clust that comprises a cDNA ID that also appears in Expt ID 108584, 108585, 108526, 108527, 108559 of the MA_diff table(s).

[1729] NO Genes Identified by Correlation to Genes that Cause Physiological Consequences

[1730] Additionally, the differential expression data and the phenotypic observations can be merged to identify pathways or networks of NO genes. A group in the MA_clust is considered a NO pathway or network if the group comprises a cDNA ID that also appears in Knock-in or Knock-out tables that causes one or more of the phenotypes described in section above.

[1731] NO Genes Identified by Amino Acid Sequence Similarity

[1732] NO genes from other plant species typically encode polypeptides that share amino acid similarity to the sequences encoded by corn and Arabidopsis NO genes. Groups of NO genes are identified in the Protein Group table. In this table, any protein group that comprises a peptide ID that corresponds to a cDNA ID member of a NO pathway or network is a group of proteins that also exhibits NO functions/utilities.

[1733] Such nitric oxide responsive genes and gene products can function either to increase or dampen the above phenotypes or activities either in response to changes in nitric oxide concentration or in the absence of nitric oxide fluctuations. Further, promoters of nitric oxide responsive genes, as described in the Reference tables, for example, are useful to modulate transcription that is induced by nitric oxide or any of the following phenotypes or biological activities below.

[1734] III.E.8.a. Use of Nitric Oxide-Responsive Genes to Modulate Phenotypes:

[1735] Nitric oxide responsive genes and gene products are useful to or modulate one or more phenotypes including Stress Responses, Mediation of response to stresses, Disease resistance, Growth, Roots, Stems, Leaves, Cells, Promotes leaf cell elongation, Biomass; Fresh and Dry Weight during any time in plant life, such as at maturation; Size and/or Weight; Flowers, Seeds, Branches, Leaves, Roots, Development, Seed Development, Dormancy; Control rate and timing of germination, Prolongs seed storage and viability; and Senescence.

[1736] Further, any desired sequence can be transcribed in similar temporal, tissue, or environmentally specific patterns as the nitric responsive genes when the desired sequence is operably linked to a promoter of a nitric responsive gene.

[1737] To regulate any of the desired phenotype(s) above, activities of one or more of the nitric oxide responsive genes or gene products can be modulated and the plants tested by screening for the desired trait. Specifically, the gene, mRNA levels, or protein levels can be altered in a plant utilizing the procedures described herein and the phenotypes can be assayed. As an example, a plant can be transformed according to Bechtold and Pelletier (1998) Methods. Mol. Biol. 82: 259-266 and/or screened for variants as described in Winkler et al. (1998) Plant Physiol. 118: 743-50 and visually inspected for the desired phenotype. Alternatively, plants can be metabolically and/or functionally assayed according to Beligni and Lamattina (2000) Planta 210: 215-21), Lapwood et al (1984) Plant Pathol 33: 13-20, and/or Brown and Botstein (1999) Nature Genet. 21: 33-37.

[1738] III.E.8.b. Use of Nitric Oxide-Responsive Genes to Modulate Biochemical Activities:

[1739] The activities of one or more of the nitric oxide responsive genes can be modulated to change biochemical or metabolic activities and/or pathways such as those noted below. Such biological activities can be measured according to the citations included in the Table below:

| | BIOCHEMICAL OR | |
|---|---|---|
| | METABOLIC ACTIVITIES | CITATIONS INCLUDING |
| PROCESS | AND/OR PATHWAYS | ASSAYS |
| Stress Response | Programmed Cell Death | Levine et al (1996) Curr. |
| | | Biol 6: 427-37 |
| | | Sellins and Cohen (1991) |
| | Reactive Oxygen based Defence | Radiat. Res. 126: 88-95 |
| | Pathways | Kumar and Klessig (2000) |
| | | Mol. Plant Microbe |
| | | Interact. 13: 347-351 |
| Disease Resistance | Microbial Pathogen resistance | Lapwood et al (1984) Plant |
| | pathways | Pathol 33: 13-20 |
| | | Kumar and Klessig (2000) |
| | | Mol. Plant microbe |
| | | interact.13: 347-351 |
| | | Klessig et. al.(2000) Proc. |
| | | Nat. Acad. Sci USA 97: |
| | | 8849-8855 |
| | | Delledonna et al(1998) |
| | | Nature 394: 585-588 |
| | Programmed Cell Death | Levine et al (1996) Curr. |
| | | Biol 6: 427-437 |
| | | Sellins and Cohen (1991) |
| | | Radiat. Res. 126: 88-95 |
| | Cellular Protectant Gene | Brown and Botstein (1999) |
| | expression | Nat Genet 21: 33-37 |
| | Phytoalexin Biosynthesis | Davis et al. (1993) |
| | | Phytochemistry 32: 607-611 |
| Signal Transduction | Regulation of hydrogen peroxide | Wu et al. (1995) Plant Cell |
| | signaling | 7, 1357-1368 |
| Reorientation of nitrogen | Induction of ribosomal proteins, | This study. Standard |
| metabolism | asparagine synthesis, proteases, | assays for detection of |
| | Rnases | changes |
| Reorientation of sugar and | Induction of sugar transporters, | This study. Standard |
| energy metabolism | ATPases, glycohydrolases, and | assays for detection of |
| | glycolytic enzymes, for example | changes |

[1740] Other biological activities that can be modulated by the NO responsive genes and gene products are listed in the Reference Tables. Assays for detecting such biological activities are described in the Protein Domain table.

[1741] NO responsive genes are characteristically differentially transcribed in response to fluctuating NO levels or concentrations, whether internal or external to an organism or cell. The MA_diff table(s) report(s) the changes in transcript levels of various NO responsive genes in aerial tissues at 1 and 6 hours after a plant was sprayed with a Silwett L-77 solution enriched with 5 mM sodium nitroprusside, which is an NO donor. These changes are in comparison with plants sprayed with Silwett L-77 solution only.

[1742] The data from this time course can be used to identify a number of types of NO responsive genes and gene products, including “early responders” and “delayed responders” Profiles of these different nitric oxide responsive genes are shown in the Table below together with examples of the kinds of associated biological activities.

| GENE | FUNCTIONAL | | EXAMPLES OF |
|---|---|---|---|
| EXPRESSION | CATEGORY OF | PHYSIOLOGICAL | BIOCHEMICAL |
| LEVEL | GENE | CONSEQUENCES | ACTIVITY |
| Upregulated genes | Early responder | NO Perception | Transcription Factors |
| (level at 1 hour ≅ 6 | repressors to NO | NO Uptake | |
| hours) | | Modulation of NO | Transporters |
| (level at 1 hour > 6 | | Response Transduction | Pathogen responsive |
| hours) | | Pathways | proteins, salicylic and |
| | | | jasmonate pathway |
| | | | proteins |
| | | Specific Gene | Proteins to provide |
| | | Transcription Initiation | defence against active |
| | | of Pathways to | oxygen e.g. glutathione |
| | | Optimize NO Response | transferase, ascorbate |
| | | Pathways | free radical reductase, |
| | | | ascorbate peroxidase, |
| | | | nitrilase, heat shock |
| | | | proteins |
| | | | Proteins to reorient |
| | | | metabolism |
| | | | e.g. proteases, Rnases, |
| | | | proteasomes, |
| | | | asparagine synthetase, |
| | | | glycohydrolases, |
| | | | transporters |
| | | | Proteins to inhibit |
| | | | transport of nitric oxide |
| | | | Degradation enzymes |
| Upregulated | Delayed NO | Maintenance of | NO Metabolic |
| transcripts | responders | metabolism in presence | Pathway enzymes |
| (level at 1 hour < 6 | | of High NO | Pathogen responsive |
| hours) | | Maintenace of disease | proteins, salicylic and |
| | | defence pathways | jasmonate pathway |
| | | | proteins |
| | | Maintenance of | Proteins to provide |
| | | pathways against | defence against active |
| | | reactive oxygen | oxygen e.g. glutathione |
| | | production | transferase, ascorbate |
| | | | free radical reductase, |
| | | | ascorbate peroxidase, |
| | | | nitrilase, heat shock |
| | | | proteins |
| | | Maintenance of | Proteins to reorient |
| | | different metabolic | and sustain metabolism |
| | | programs | e.g. proteases, Rnases, proteasomes, |
| | | | asparagine |
| | | | synthetase, glycohydrolases, |
| | | | transporters, |
| | | | Proteins to inhibit |
| | | | transport of NO |
| | | Selective cell death | Degradation enzymes |
| Down Regulated | Early responders of | Negative regulation of | Transcription factors |
| Transcripts | NO utilization | NO utilization | Kinases and |
| (level at 1 hours ≅ 6 | pathways | pathways released | phosphatases |
| hours) | | | Chromatin |
| (level at 6 hours > 1 | | | restructuring proteins |
| hour) | Genes with | Reorientation of | Transcription |
| | discontinued | metabolism | factors, metabolic |
| | expression or | | enzymes, kinases and |
| | unsTable mRNA | | phosphatases, |
| | following nitric oxide | | transporters, ribosomal |
| | uptake | | proteins |
| | | Programmed cell death | Most proteins in cells |
| | | | undergoing cell death |
| Down Regulated | Delayed responder | Negative regulation of | Transcription factors |
| Transcripts | repressors of NO | NO utilization | Kinases and |
| (level at 1 hour > 6 | stress metabolism | pathways released | phosphatases |
| hours) | | | Chromatin |
| | | | restructuring proteins |
| | Genes with | Reorientation of | Transcription |
| | discontinued | metabolism | factors, metabolic |
| | expression or | | enzymes, kinases and |
| | unsTable | | phosphatases, |
| | mRNA following | | transporters, ribosomal |
| | nitric oxide uptake | | proteins. |
| | | Programmed cell death | Most proteins in cells |
| | | | undergoing |
| | | | programmed cell death |

### Use of Promoters of NO Responsive Genes

[1743] Promoters of NO responsive genes are useful for transcription of any desired polynucleotide or plant or non-plant origin. Further, any desired sequence can be transcribed in a similar temporal, tissue, or environmentally specific patterns as the NO responsive genes where the desired sequence is operably linked to a promoter of a NO responsive gene. The protein product of such a polynucleotide is usually synthesized in the same cells, in response to the same stimuli as the protein product of the gene from which the promoter was derived. Such promoter are also useful to produce antisense mRNAs to down-regulate the product of proteins, or to produce sense mRNAs to down-regulate mRNAs via sense suppression.

[1744] III.9. Osmotic Stress Responsive Genes, Gene Components and Products

[1745] The ability to endure and recover from osmotic and salt related stress is a major determinant of the geographical distribution and productivity of agricultural crops. Osmotic stress is a major component of stress imposed by saline soil and water deficit. Decreases in yield and crop failure frequently occur as a result of aberrant or transient environmental stress conditions even in areas considered suitable for the cultivation of a given species or cultivar. Only modest increases in the osmotic and salt tolerance of a crop species would have a dramatic impact on agricultural productivity. The development of genotypes with increased osmotic tolerance would provide a more reliable means to minimize crop losses and diminish the use of energy-costly practices to modify the soil environment.

[1746] Changes in the osmotic concentration of the surrounding environment or within a plant results in modulation of many genes and gene products. Examples of such osmotic stress responsive genes and gene products, including salt responsive genes, are shown in the Reference, Sequence, Protein Group, Protein Group Matrix, MA_diff and MA_clust tables. These genes and/or products are responsible for effects on traits such as plant vigor and seed yield.

[1747] While osmotic and/or salt stress responsive polynucleotides and gene products can act alone, combinations of these polynucleotides also affect growth and development. Useful combinations include different osmotic stress responsive polynucleotides and/or gene products that have similar transcription profiles or similar biological activities, and members of the same or similar biochemical pathways. In addition, the combination of an osmotic stress responsive polynucleotide and/or gene product with another environmentally responsive polynucleotide is also useful because of the interactions that exist between hormone-regulated pathways, stress pathways, nutritional pathways and development. Here, in addition to polynucleotides having similar transcription profiles and/or biological activities, useful combinations include polynucleotides that may have different transcription profiles but which participate in a common pathway.

[1748] Such osmotic and/or salt stress responsive genes and gene products can function to either increase or dampen the above phenotypes or activities either in response to changes in osmotic concentration or in the absence of osmotic fluctuations. The MA_diff Table(s) reports the transcript levels of the experiment (see EXPT ID: 108570, 108571, 108541, 108542, 108553, 108539, 108540). For transcripts that had higher levels in the samples than the control, a “+” is shown. A “−” is shown for when transcript levels were reduced in root tips as compared to the control. For more experimental detail see the Example section below.

[1749] Osmotic Stress genes are those sequences that showed differential expression as compared to controls, namely those sequences identified in the MA_diff tables with a “+” or “−” indication.

[1750] Osmotic Stress Genes Identified by Cluster Analyses of Differential Expression

[1751] Osmotic Stress Genes Identified by Correlation to Genes that are Differentially Expressed

[1752] As described above, the transcription profiles of genes that act together are well correlated. Applicants not only have identified the genes that are differentially expressed in the microarray experiments, but also have identified the genes that act in concert with them. The MA_clust table indicates groups of genes that have well correlated transcription profiles and therefore participate in the same pathway or network.

[1753] A pathway or network of Osmotic Stress genes is any group in the MA_clust that comprises a cDNA ID that also appears in Expt ID 108570, 108571, 108541, 108542, 108553, 108539, 108540 of the MA_diff table(s).

[1754] Osmotic Stress Genes Identified by Correlation to Genes that Cause Physiological Consequences

[1755] Additionally, the differential expression data and the phenotypic observations can be merged to identify pathways or networks of Osmotic Stress genes. A group in the MA_clust is considered a Osmotic Stress pathway or network if the group comprises a cDNA ID that also appears in Knock-in or Knock-out tables that causes one or more of the phenotypes described in section above.

[1756] Osmotic Stress Genes Identified by Amino Acid Sequence Similarity

[1757] Osmotic Stress genes from other plant species typically encode polypeptides that share amino acid similarity to the sequences encoded by corn and Arabidopsis Osmotic Stress genes. Groups of Osmotic Stress genes are identified in the Protein Group table. In this table, any protein group that comprises a peptide ID that corresponds to a cDNA ID member of a Osmotic Stress pathway or network is a group of proteins that also exhibits Osmotic Stress functions/utilities.

[1758] Further, promoters of osmotic stress responsive genes, as described in the Reference tables, for example, are useful to modulate transcription that is induced by osmotic stress or any of the following phenotypes or biological activities below.

[1759] III.E.9.a. Use of Osmotic Stress Responsive Genes to Modulate Phenotypes

[1760] Osmotic stress responsive genes and gene products are useful to or modulate one or more phenotypes including growth; roots; stems; leaves; development (such as cell growth by DNA synthesis and cell division, seed development (with regard to desiccation tolerance and dormancy, such as control rate of germination and prolongs seed storage and viability and senescence); stress responses; desiccation; drought; and salt.

[1761] To regulate any of the phenotype(s) above, activities of one or more of the osmotic stress responsive genes or gene products can be modulated and the plants tested by screening for the desired trait. Specifically, the gene, mRNA levels, or protein levels can be altered in a plant utilizing the procedures described herein and the phenotypes can be assayed. As an example, a plant can be transformed according to Bechtold and Pelletier (1998, Methods. Mol. Biol. 82:259-266) and/or screened for variants as in Winkler et al. (1998) Plant Physiol 118: 743-50 and visually inspected for the desired phenotype or metabolically and/or functionally assayed according to de Castro (1998, Phytochemistry 47: 689-694), Xu (1998, J Exp Bot 49: 573-582), Ausubel et al. (In: Current Protocols in Molecular Biology (1999) Volume 1, chapter 4, eds. Ausubel, Brent, Kingston, Moore, Seidman, Smith and Struhl, New York, N.Y.) and De Castro et al. (2000, Plant Physiol 122: 327-36)

[1762] III.E.9.b. Use of Osmotic Stress Responsive Genes to Modulate Biochemical Activities

[1763] The activities of one or more of the osmotic stress responsive genes can be modulated to change biochemical or metabolic activities and/or pathways such as those noted below. Such biological activities can be measured according to the citations included in the Table below:

| | BIOCHEMICAL OR | CITATIONS |
|---|---|---|
| | METABOLIC ACTIVITIES | INCLUDING |
| PROCESS | AND/OR PATHWAYS | ASSAYS |
| Cell Growth And | Regulation Of Osmolyte | Yoshu et al. (1995) |
| Differentiation | Synthesis | The Plant Journal |
| | | 7: 751-60 |
| | Regulation Of Glycolate Pathway | Streb et al. (1993) |
| | And Photoinhibition Of | Physiologia |
| | Photosystem II In Response To | Plantarum. 88: 590-598 |
| | Stress | |
| Gene Regulation | Transcriptional Regulation Of | Current Protocols in |
| | Osmotic Stress Induced Proteins | Molecular Biology/edited |
| | Through DNA Binding Proteins | by Frederick M. Ausubel . . . |
| | | [et al.]. New York: |
| | | Published by Greene Pub. |
| | | Associates and Wiley- |
| | | Interscience: J. Wiley, |
| | | c1987 |
| | Transcriptional Regulation Of | Jonak (1996) Proceedings |
| | Osmotic Stress Induced Proteins | of the National Academy of |
| | Through Protein Phosphorylation | Sciences of the United |
| | And Dephosphorylation | States of America, 93: |
| | | 11274-11279; |
| | | Monroy, A. et al., |
| | | (1998) |
| | | Analytical Biochemistry |
| | | 265: 183-185; |
| | Regulation Of Osmotic Stress | McCright (1998) IN: |
| | Induced Gene Protein | Methods in Molecular |
| | Accumulation By Protein Protein | Biology; Protein |
| | Intereaction Between Osmotic | phosphatase protocols; |
| | Stress Regulated Genes And | Ludlow (1998) Humana |
| | Protein Phosphatase 2C | Press Inc.; Suite 808, 999 |
| | | Riverview Drive, Totowa, |
| | | New Jersey |
| | | 07512, USA.: 263-277. |
| | Transcriptional Regulation Of | Luo and Dean (1999) |
| | Heat Induced Genes Through | Journal of the |
| | Chromatin Remodeling | National Cancer |
| | | Institute 91: 1288-1294; |
| | | Chromatin |
| | | protocols (1999) |
| | | edited by Peter B. |
| | | Becker. Totowa, |
| | | N.J.: Humana |
| | | Press |
| | Activity Of Abcisic Acid | Gubler et al. (1999) |
| | Regulated DNA Binding Proteins | Plant Journal 17: 1-9 |
| | Accumulation Of RNA Binding | Sato (1995) |
| | Proteins That Regulate Osmotic | Nucleic Acids Research 23: |
| | Stress | 2161-2167. |
| Stress Response | Synthesis And Metabolism Of | Minocha et al. |
| | Osmoprotectants Such As | (1999) Plant |
| | Betaine, Proline And Trehalase | Physiol and |
| | | Biochem 37: 597-603 |
| | Regulation Of Sugar Transporters | Dejardin et al. |
| | | (1999) Biochem J; |
| | | 344 Pt 2: 503-9 |
| | Regulation Of Vacuolar | Gaxiola et al. |
| | Sodium/Proton Antiport Activity | (1999) PNAS USA |
| | And The Detoxification Of | 96: 1480-1485 |
| | Cations | |
| | Regulation Of Intracellular Na+ | Espinoza-Ruiz et |
| | And Li+ Ion Concentrations | al. (1999) The Plant |
| | | Journal 20: 529-539 |
| | Regulation Of Universal Stress | Freestone et al. |
| | Protein Homologue Activity By | (1997) Journal of |
| | Phosphorylation And | Molecular Biology, |
| | Dephosphorylation. | v. 274: 318-324 |
| | Regulation/Maintenance Of | Walker (1996) |
| | Protein Stability During Thermal | Humana Press Inc. |
| | Stress | Suite 808, 999 |
| | | Riverview Drive, |
| | | Totowa, New |
| | | Jersey 07512, USA |
| | Regulation Of Protein | Vierstra (1996) Plant |
| | Degradation During Thermal | Molecular Biology, 32: 275-302. |
| | Stress. | Vierstra and Callis |
| | | (1999) Plant |
| | | Molecular Biology, |
| | | 41: 435-442 |
| Signal Transduction | Activation Of Stress Response | Xinong et al. |
| | Genes | (1999) The Plant |
| | | Journal 19: 569-578 |
| | Salt Tolerance | Piao (1999) Plant |
| | | Physiol 19: 1527-1534 |
| | Calcium Mediated Stress | Subbaiah et al. |
| | Response | (1994) Plant |
| | | Physiology |
| | | 105: 369-376 |
| | | Kudla et al. (1999) |
| | | PNAS USA 96: |
| | | 4718-4723 |

[1764] Other biological activities that can be modulated by the osmotic stress responsive genes and gene products are listed in the Reference tables. Assays for detecting such biological activities are described in the Protein Domain table.

[1765] Osmotic stress responsive genes are characteristically differentially transcribed in response to fluctuating osmotic stress levels or concentrations, whether internal or external to an organism or cell. MA_diff table reports the changes in transcript levels of various osmotic stress responsive genes in aerial tissues of plants at 1 and 6 hours after the plants were sprayed with Hoagland's solution containing 20% PEG as compared to aerial tissues from plants sprayed with Hoagland's solution only.

[1766] The data from this time course can be used to identify a number of types of osmotic stress responsive genes and gene products, including “early responding,” “sustained osmotic stress responders,” “repressors of osmotic stress pathways” and “osmotic stress responders.” Profiles of these different osmotic stress responsive genes are shown in the Table below together with examples of the kinds of associated biological activities.

| | | | EXAMPLES OF |
|---|---|---|---|
| GENE | FUNCTIONAL | | BIOCHEMICAL |
| EXPRESSION | CATEGORY OF | PHYSIOLOGICAL | ACTIVITIES OF |
| LEVELS | GENES | CONSEQUENCES | GENE PRODUCTS |
| Up Regulated | Early Responders | Osmotic Stress | Transcription |
| Transcripts | To Osmotic | Perception | Factors |
| (Level At 1 Hour ≅ | Stress | Osmolyte Uptake | Transcription |
| 6 Hours) | Universal Stress | Modulation Of | Coactivators |
| (Level At 1 Hour > | Response Genes | Osmotic Stress | Membrane |
| 6 Hours) | Osmotic Stress | Response Signal | Transporters |
| | Responders | Transduction Pathways | Proline |
| | Abscisic Acid | Specific Gene | Biosynthesis |
| | Biosynthesis And | Transcription | Selective Inhibition |
| | Perception | Initiation | Of Osmolyte |
| | | Specific Gene | Transport |
| | | Transcription | Protein |
| | | Repression | Ubiquitination |
| | | Translation Activation | Protein |
| | | Translation | Degradation |
| | | Repression | Rna Binding |
| | | Repression Of | Proteins |
| | | “Normal State” | Modification Of |
| | | Pathways To Optimize | Protein Activity By |
| | | Osmotic Stress | Phosphatases, |
| | | Response | Kinases |
| | | Activation Of Stress | Synthesis And Or |
| | | Signaling Pathways | Activation Of |
| | | Up Regulation Of | Oxide Hydrolases, |
| | | Abscisic Acid | Suoeroxidedismutase, |
| | | Biosynthesis Pathway | Iron Ascorbate |
| | | Protein Accumulation | Peroxidase |
| | | And Activity | Activation Of |
| | | Scavenging Reactive | Signaling Pathway |
| | | Oxygen Species | By Calcium |
| | | Modification Of Cell | Binding Proteins, |
| | | Wall Composition | Modification Of |
| | | Up-Regulation Of | Protein Activity By |
| | | Universal Stress | Protein-Protein |
| | | Response Protein | Interaction |
| | | Accumulation | Change In |
| | | | Chromatin |
| | | | Structure And/Or |
| | | | Localized Dna |
| | | | Topology |
| | | | Modification Of |
| | | | Pre-Existing |
| | | | Translation Factors |
| | | | By Phosphorylation |
| | | | (Kinases) Or |
| | | | Dephosphorylation |
| | | | (Phosphatases) |
| | | | Synthesis Of New |
| | | | Translation Factors |
| | | | Abscisic Acid |
| | | | Biosynthesis |
| Up Regulated | Sustained | Osmolyte Adjustment | Osmotic Stress |
| Transcripts | Osmotic Stress | And Adaptation | Metabolic |
| (Level At 1 Hr < 6 Hr) | Responders | Photosynthetic | Pathways |
| | Repressor Of | Activity Modification | Sugar Biosynthetic |
| | Osmotic Stress | Activation Of | Pathways |
| | Pathways | “Normal State” | Sugar Transporters |
| | Abscisic Acid | Biosynthesis Genes | Transcription |
| | Perception, | Negative Regulation | Factors |
| | Biosynthesis And | Of Osmotic Stress | Transcription |
| | Regulation | Pathways | Coactivators |
| | | Negative Regulation | Membrane |
| | | Of Abscisic Acid | Transporters |
| | | Biosynthesis | Abscisic Acid |
| | | Acivation Of Abscisic | Biosynthesis |
| | | Acid Degradation | |
| | | Pathway | |
| | | Cell Wall | |
| | | Composition | |
| | | Modification | |
| Down-Regulated | Early Responder | Metabolic Repression | Transcription |
| Transcripts | Repressors Of | Specific Gene | Factors |
| (Level At 1 Hr ≈ 6 Hr) | “Normal” State Of | Transcription | Transcription |
| (Level At 6 Hr > 1 Hr) | Metabolism | Initiation | Coactivators |
| | Negative Regulators | Specific Gene | Protein |
| | Of Abscisic Acid | Transcription | Degradation |
| | Biosynthesis And | Repression | Rna Binding |
| | Perception. | Translation Activation | Proteins |
| | Positive Regulators | Translation | Modification Of |
| | Of “Normal State” | Repression | Protein Activity By |
| | Metabolic Pathways. | Abscisic Acid | Phosphatases, |
| | | Degradation | Kinases |
| | | Protein Degradation | Activation Of |
| | | | Signaling Pathway |
| | | | By Calcium |
| | | | Binding Proteins, |
| | | | Modification Of |
| | | | Protein Activity By |
| | | | Protein-Protein |
| | | | Interaction |
| | | | Change In |
| | | | Chromatin |
| | | | Structure And/Or |
| | | | Localized Dna |
| | | | Topology |
| | | | Modification Of |
| | | | Pre-Existing |
| | | | Translation Factors |
| | | | By Phosphorylation |
| | | | (Kinases) Or |
| | | | Dephosphorylation |
| | | | (Phosphatases) |
| | | | Synthesis Of New |
| | | | Translation Factors |
| Down-Regulated | Repressors Of | Osmotic Stress | Transcription |
| Transcripts | “Normal” State Of | Adaptation | Factors |
| (Level At 1 Hr > 6 Hr) | Metabolism | Negative Regulation | Transcription |
| | Genes With | Of Abscisic Acid | Coactivators |
| | Discontinued | Biosynthesis | Protein |
| | Expression Or | Negative Regulation | Degradation |
| | UnsTable mRNA In | Of Osmotic Stress | Rna Binding |
| | Presence Of Osmotic | Response Pathways | Proteins |
| | Stress | Genes | Modification Of |
| | Repressor Of | Osmolyte Synthesis | Protein Activity By |
| | Osmotic Stress | And Osmolyte | Phosphatases, |
| | Pathways | Cellular Partitioning | Kinases |
| | Repressors Of | Readjustment | Activation Of |
| | Abscisic Acid | Activation Of | Signaling Pathway |
| | Biosynthesis, | “Normal State” | By Calcium |
| | Perception And | Metabolic Pathways | Binding Proteins, |
| | Regulation | | Modification Of |
| | | | Protein Activity By |
| | | | Protein-Protein |
| | | | Interaction |
| | | | Change In |
| | | | Chromatin |
| | | | Structure And/Or |
| | | | Localized Dna |
| | | | Topology |
| | | | Modification Of |
| | | | Pre-Existing |
| | | | Translation Factors |
| | | | By Phosphorylation |
| | | | (Kinases) Or |
| | | | Dephosphorylation |
| | | | (Phosphatases) |
| | | | Synthesis Of New |
| | | | Translation Factors |
| | | | Sugar Biosynthetic |
| | | | Pathways |
| | | | Sugar Transporters |

[1767] Further, any desired sequence can be transcribed in similar temporal, tissue, or environmentally specific patterns as the osmotic stress responsive genes when the desired sequence is operably linked to a promoter of an osmotic stress responsive gene.

[1768] III.E.10. Aluminum Responsive Genes, Gene Components and Products

[1769] Aluminum is toxic to plants in soluble form (Al³⁺). Plants grown under aluminum stress have inhibited root growth and function due to reduced cell elongation, inhibited cell division and metabolic interference. As an example, protein inactivation frequently results from displacement of the Mg2+ cofactor with aluminum. These types of consequences result in poor nutrient and water uptake. In addition, because stress perception and response occur in the root apex, aluminum exposure leads to the release of organic acids, such as citrate, from the root as the plant attempts to prevent aluminum uptake.

[1770] The ability to endure soluble aluminum is a major determinant of the geographical distribution and productivity of agricultural crops. Decreases in yield and crop failure frequently occur as a result of aberrant, hot conditions even in areas considered suitable for the cultivation of a given species or cultivar. Only modest increases in the aluminum tolerance of crop species would have a dramatic impact on agricultural productivity. The development of genotypes with increased aluminum tolerance would provide a more reliable means to minimize crop losses and diminish the use of costly practices to modify the environment.

[1771] Microarray technology allows monitoring of gene expression levels for thousands of genes in a single experiment. This is achieved by simultaneously hybridizing two differentially labeled fluorescent cDNA pools to glass slides that contain spots of DNA (Schena et al. (1995) Science 270: 467-70). The Arabidopsis Functional Genomics Consortium (AFGC) has recently made public the results from such microarray experiments conducted with AFGC chips containing 10,000 non-redundant ESTs, selected from 37,000 randomly sequenced ESTs generated from mRNA of different tissues and developmental stages.

[1772] The sequences of the ESTs showing at least two-fold increases or decreases over the controls were identified, compared to the Ceres full-length cDNA and genomic sequence databanks, and identical Ceres clones identified. MA_diff table reports the results of this analysis, indicating those Ceres clones which are up or down regulated over controls, thereby indicating the Ceres clones which are aluminum response responsive genes.

[1773] The MA_diff Table(s) reports the transcript levels of the experiment (see EXPT ID: Aluminum (relating to SMD 7304, SMD 7305)). For transcripts that had higher levels in the samples than the control, a “+” is shown. A “−” is shown for when transcript levels were reduced in root tips as compared to the control. For more experimental detail see the Example section below.

[1774] Aluminum genes are those sequences that showed differential expression as compared to controls, namely those sequences identified in the MA_diff tables with a “+” or “−” indication.

[1775] Aluminum Genes Identified by Cluster Analyses of Differential Expression

[1776] Aluminum Genes Identified by Correlation to Genes that are Differentially Expressed

[1777] As described above, the transcription profiles of genes that act together are well correlated. Applicants not only have identified the genes that are differentially expressed in the microarray experiments, but also have identified the genes that act in concert with them. The MA_clust table indicates groups of genes that have well correlated transcription profiles and therefore participate in the same pathway or network.

[1778] A pathway or network of Aluminum genes is any group in the MA_clust that comprises a cDNA ID that also appears in Expt ID Aluminum (relating to SMD 7304, SMD 7305) of the MA_diff table(s).

[1779] Aluminum Genes Identified by Correlation to Genes that Cause Physiological Consequences

[1780] Additionally, the differential expression data and the phenotypic observations can be merged to identify pathways or networks of Aluminum genes. A group in the MA_clust is considered a Aluminum pathway or network if the group comprises a cDNA ID that also appears in Knock-in or Knock-out tables that causes one or more of the phenotypes described in section above.

[1781] Aluminum Genes Identified by Amino Acid Sequence Similarity

[1782] Aluminum genes from other plant species typically encode polypeptides that share amino acid similarity to the sequences encoded by corn and Arabidopsis Aluminum genes. Groups of Aluminum genes are identified in the Protein Group table. In this table, any protein group that comprises a peptide ID that corresponds to a cDNA ID member of a Aluminum pathway or network is a group of proteins that also exhibits Aluminum functions/utilities.

[1783] III.E.10.a. Use of Aluminum Response Genes to Modulate Phenotypes

[1784] Changes in aluminum concentrations in a plant's surrounding environment results in modulation of many genes and gene products. Examples of such aluminum response genes and gene products are shown in the Reference and Sequence Tables. These genes and/or products are responsible for effects on traits such as plant vigor and seed yield.

[1785] While aluminum responsive polynucleotides and gene products can act alone, combinations of these polynucleotides also affect growth and development. Useful combinations include different aluminum responsive polynucleotides and/or gene products that have similar transcription profiles or similar biological activities, and members of the same or similar biochemical pathways. In addition, the combination of a aluminum responsive polynucleotide and/or gene product with another environmentally responsive polynucleotide is also useful because of the interactions that exist between hormone-regulated pathways, stress pathways, nutritional pathways and development. Here, in addition to polynucleotides having similar transcription profiles and/or biological activities, useful combinations include polynucleotides that may have different transcription profiles but which participate in a common pathway.

[1786] Such aluminum responsive genes and gene products can function to either increase or dampen the above phenotypes or activities either
[1787] in response to changes in aluminum concentration or
[1788] in the absence of aluminum fluctuations.

[1789] More specifically, aluminum responsive genes and gene products are useful to or modulate one or more phenotypes including growth; roots (such as inhibition of root elongation); stems; leaves; whole plant; development (such as cell growth, elongation, and division) and mediates response to oxidative stress, calcium-mediated defense, antioxidant defense and pathogenesis.

[1790] To produce the desired phenotype(s) above, one or more of the aluminum response genes or gene products can be tested by screening for the desired trait. Specifically, the gene, mRNA levels, or protein levels can be altered in a plant utilizing the procedures described herein and the phenotypes can be assayed. As an example, a plant can be transformed according to Bechtold and Pelletier (1998, Methods. Mol. Biol. 82:259-266) and visually inspected for the desired phenotype or metabolically and/or functionally assayed according to Li and Fleming (1999, FEBS Lett 461: 1-5), Delhaize et al. (1999, J Biol Chem 274: 7082-8), Sigimoto and Sakamoto (1997, Genes Genet Syst 72: 311-6), Esaki et al. (2000, Plant Physiol 122: 657-65), Leonard and Gerber (1988, Mutat Res 196: 247-57), Baisakhi et al. (2000, Mutat Res 465: 1-9), Ma (2000, Plant Cell Physiol 41: 383-90) and Koyama et al. (1999, Plant Cell 40: 482-8)

[1791] Alternatively, the activities of one or more of the aluminum responsive genes can be modulated to change biochemical or metabolic activities and/or pathways such as those noted below. Such biological activities can be measured according to the citations included in the Table below:

| | BIOCHEMICAL OR | |
|---|---|---|
| | METABOLIC | |
| GENERAL | ACTIVITIES AND/OR | |
| CATEGORY | PATHWAYS | ASSAY |
| Cell Growth and | Phospholipase D (PLD) | Toda et al. (1999) |
| Development | activity | Biosci Biotechnol |
| | | Biochem 63: 210-212 |
| | Regulation of | |
| | Phosphtidylserine | |
| | Synthase (PSS) | |
| | Cell wall strengthening | Hamel et al. (1998) |
| | | Planta 205: 531-38 |
| Stress Response | Regulation of oxidative stress | Esaki et al. (2000) |
| | | Plant Physiol 122: |
| | | 657-655 |
| | Regulation of | Baisakhi et al. |
| | antioxidant defense and | (2000) Mutat Res |
| | DNA repair | 465: 1-9 |
| | Secretion of Organic | Koyama et al. |
| | Acids (e.g. maleate, | (1999) Plant Cell |
| | citrate) from root apex | 40: 482-8 |
| | Ca2+mediated Defense | Plieth et al. (1999) |
| | Responses Against Low | Plant J 18: 634-50 |
| | pH | |
| Signaling | H+ transport | Degenhardt et al. |
| | | (1988) Plant Physil |
| | | 117: 19-27 |
| | Auxin transport | Rashotte et al. |
| | | (2000) Plant |
| | | Physiol 122: 481-90 |

[1792] Other biological activities that can be modulated by aluminum response genes and their products are listed in the REFERENCE Table. Assays for detecting such biological activities are described in the Protein Domain table.

| | | | EXAMPLES OF |
|---|---|---|---|
| TRANSCRIPT | | PHYSIOLOGICAL | BIOCHEMICAL |
| LEVELS | TYPE OF GENES | CONSEQUENCES | ACTIVITY |
| Up regulated | responders to | Aluminum | Transporters |
| transcripts | aluminum | perception | Metabolic enzymes |
| | application | Aluminum uptake | Change in cell |
| | | and transport | membrane structure |
| | | Aluminum | and potential |
| | | metabolism | Kinases and |
| | | Synthesis of | phosphatases |
| | | secondary | Transcription |
| | | metabolites and/or | activators |
| | | proteins | Change in chromatin |
| | | Modulation of | structure and/or |
| | | aluminum | localized DNA |
| | | response | topology |
| | | transduction | |
| | | pathways | |
| | | Specific gene | |
| | | transcription | |
| | | initiation | |
| Down-regulated | responder to | Negative | Transcription factors |
| transcripts | aluminum | regulation of | Change in protein |
| | repressors of | aluminum | structure by |
| | aluminum state of | pathways | phosphorylation |
| | metabolism | Changes in | (kinases) or |
| | Genes with | pathways and | dephosphorylation |
| | discontinued | processes | (phosphatases) |
| | expression or | operating in cells | Change in chromatin |
| | unsTable mRNA in | Changes in other | structure and/or DNA |
| | presence of aluminum | metabolisms than | topology |
| | | aluminum | Stability of factors for |
| | | | protein synthesis and |
| | | | degradation |
| | | | Metabolic enzymes |

### Use of Promoters of Aluminum Responsive Genes

[1793] Promoters of Aluminum responsive genes are useful for transcription of any desired polynucleotide or plant or non-plant origin. Further, any desired sequence can be transcribed in a similar temporal, tissue, or environmentally specific patterns as the Aluminum responsive genes where the desired sequence is operably linked to a promoter of a Aluminum responsive gene. The protein product of such a polynucleotide is usually synthesized in the same cells, in response to the same stimuli as the protein product of the gene from which the promoter was derived. Such promoter are also useful to produce antisense mRNAs to down-regulate the product of proteins, or to produce sense mRNAs to down-regulate mRNAs via sense suppression.

[1794] III.E.11. Cadmium Responsive Genes, Gene Components and Products

[1795] Cadmium (Cd) has both toxic and non-toxic effects on plants. Plants exposed to non-toxic concentrations of cadmium are blocked for viral disease due to the inhibition of systemic movement of the virus. Surprisingly, higher, toxic levels of Cd do not inhibit viral systemic movement, suggesting that cellular factors that interfere with the viral movement are triggered by non-toxic Cd concentrations but repressed in high Cd concentrations. Furthermore, exposure to non-toxic Cd levels appears to reverse posttranslational gene silencing, an inherent plant defense mechanism. Consequently, exploring the effects of Cd exposure has potential for advances in plant disease control in addition to soil bio-remediation and the improvement of plant performance in agriculture.

[1796] Changes in cadmium concentrations in a plant's surrounding environment results in modulation of many genes and gene products. Microarray technology allows monitoring of gene expression levels for thousands of genes in a single experiment. This is achieved by simultaneously hybridizing two differentially labeled fluorescent cDNA pools to glass slides that contain spots of DNA (Schena et al. (1995) Science 270: 467-70). The US Arabidopsis Functional Genomics Consortium (AFGC) has recently made public the results from such microarray experiments conducted with AFGC chips containing some 10,000 non-redundant ESTs, selected from about 37,000 randomly sequenced ESTs generated from mRNA of different tissues and developmental stages.

[1797] The sequences of the ESTs showing at least two-fold increases or decreases in plants treated with 10 μM cadmium compared with untreated plants were identified, compared to the Ceres full length cDNA and genomic sequence databanks, and the equivalent Ceres clones identified. The MA_diff table(s) report(s) the results of this analysis, indicating those Ceres clones which are up or down regulated over controls, thereby indicating the Ceres clones which represent cadmium responsive genes.

[1798] Examples of such cadmium responsive genes and gene products are shown in the Reference and Sequence Tables. These genes and/or products are responsible for effects on traits such as plant vigor and seed yield.

[1799] While cadmium responsive polynucleotides and gene products can act alone, combinations of these polynucleotides also affect growth and development. Useful combinations include different cadmium responsive polynucleotides and/or gene products that have similar transcription profiles or similar biological activities, and members of the same or similar biochemical pathways. Whole pathways or segments of pathways are controlled by transcription factor proteins and proteins controlling the activity of signal transduction pathways. Therefore, manipulation of such protein levels is especially useful for altering phenotypes and biochemical activities of plants. In addition, the combination of a cadmium responsive polynucleotide and/or gene product with other environmentally responsive polynucleotides is also useful because of the interactions that exist between, for example, stress and pathogen induced pathways, nutritional pathways and development. Here, in addition to polynucleotides having similar transcription profiles and/or biological activities, useful combinations include polynucleotides that may have different transcription profiles but which participate in common or overlapping pathways.

[1800] The MA_diff Table(s) reports the transcript levels of the experiment (see EXPT ID: Cadium (relating to SMD 7427, SMD 7428)). For transcripts that had higher levels in the samples than the control, a “+” is shown. A “−” is shown for when transcript levels were reduced in root tips as compared to the control. For more experimental detail see the Example section below.

[1801] Cadium genes are those sequences that showed differential expression as compared to controls, namely those sequences identified in the MA_diff tables with a “+” or “−” indication.

[1802] Cadium Genes Identified by Cluster Analyses of Differential Expression

[1803] Cadium Genes Identified by Correlation to Genes that are Differentially Expressed

[1804] As described above, the transcription profiles of genes that act together are well correlated. Applicants not only have identified the genes that are differentially expressed in the microarray experiments, but also have identified the genes that act in concert with them. The MA_clust table indicates groups of genes that have well correlated transcription profiles and therefore participate in the same pathway or network.

[1805] A pathway or network of Cadium genes is any group in the MA_clust that comprises a cDNA ID that also appears in Expt ID Cadium (relating to SMD 7427, SMD 7428) of the MA_diff table(s).

[1806] Cadium Genes Identified by Correlation to Genes that Cause Physiological Consequences

[1807] Additionally, the differential expression data and the phenotypic observations can be merged to identify pathways or networks of Cadium genes. A group in the MA_clust is considered a Cadium pathway or network if the group comprises a cDNA ID that also appears in Knock-in or Knock-out tables that causes one or more of the phenotypes described in section above.

[1808] Cadium Genes Identified by Amino Acid Sequence Similarity

[1809] Cadium genes from other plant species typically encode polypeptides that share amino acid similarity to the sequences encoded by corn and Arabidopsis Cadium genes. Groups of Cadium genes are identified in the Protein Group table. In this table, any protein group that comprises a peptide ID that corresponds to a cDNA ID member of a Cadium pathway or network is a group of proteins that also exhibits Cadium functions/utilities.

[1810] Such cadmium responsive genes and gene products can function to either increase or dampen phenotypes or activities either in response to changes in cadmium concentration or in the absence of cadmium fluctuations. Further, promoters of cadmium responsive genes, as described in the Reference tables, for example, are useful to modulate transcription that is induced by cadmium or any of the following phenotypes or biological activities below.

[1811] III.E.11.a. Use of Cadmium Responsive Genes, Gene Components and Products to Modulate Phenotypes

[1812] Cadmium responsive genes and gene products are useful to or modulate one or more phenotypes including growth, roots, initiation and maintenance of cell division, stems, leaves, development, mitochondria, post-embryonic root meristem development, senescence, stress response, modulation of jasmonic acid and other stress control pathways, metabolic detoxification, heavy metals, plant and seed yield; and fruit yield.

[1813] Further, any desired sequence can be transcribed in similar temporal, tissue, or environmentally specific patterns as the cadmium responsive genes when the desired sequence is operably linked to a promoter of a cadmium responsive gene.

[1814] To regulate any of the phenotype(s) above, activities of one or more of the cadmium responsive genes or gene products can be modulated and tested by screening for the desired trait. Specifically, the gene, mRNA levels, or protein levels can be altered in a plant utilizing the procedures described herein and the phenotypes can be assayed. As an example, a plant can be transformed according to Bechtold and Pelletier (1998) Methods. Mol. Biol. 82:259-266) and/or screened for variants as in Winkler et al. (1998) Plant Physiol 118: 743-50 and visually inspected for the desired phenotype or metabolically and/or functionally assayed according to Ghoshroy et al. (1998, Plant J 13: 591-602), Citovsky et al. (1998, Plant J 16: 13-20), Clemens et al. (1999, EMBO J 18: 3325-33), Chen et al. (2000, Chemosphere 41: 229-34), Xian and Oliver (1998, Plant Cell 10: 1539-90), Romero-Peurtas et al. (1999, Free Rad Res 31: S25-31), Gaur and Noraho (1995, Biomed Environ Sci 8: 202-10), Thomine et al. (2000, PNAS USA 97: 4991-6), Howden et al. (1995, Plant Physiol 107: 1067-73), Kesseler and Brand (1994, Eur J Biochem 225: 907-22) and Vernoux et al. (2000, Plant Cell 12: 97-110).

[1815] III.E.10.b. Use of Cadmium-Responsive Genes, Gene Components and Products to Modulate Biochemical Activities

[1816] The activities of one or more of the cadmium responsive genes can be modulated to change biochemical or metabolic activities and/or pathways such as those noted below. Such biological activities can be measured according to the citations included in the Table below:

| | BIOCHEMICAL OR | |
|---|---|---|
| | METABOLIC ACTIVITIES | CITATIONS INCLUDING |
| PROCESS | AND/OR PATHWAYS | ASSAYS |
| Growth, Differentiation | Root Growth | Thomine et al. (2000) PNAS |
| and Development | Initiation and maintenance of | USA 97: 4991-6 |
| | cell division | Vernoux et al. (2000) Plant Cell |
| | Resistance to Cadmium- | 12: 97-110 |
| | inhibition of root growth | |
| Metabolism | Cadmium sensing | Howden et al. (1995) Plant |
| | | Physiol 107: 1067-73 |
| | Cadmium uptake and | Gaur and Noraho (1995) Biomed |
| | transport | Environ Sci 8: 202-10 |
| | Decreased cadmium | Thomine et al. (2000) PNAS |
| | transport | USA 97: 4991-6 |
| | Phytoremediation | |
| | Inhibition of oxidative | Kesseler and Brand (1994) Eur. |
| | phophorylation | Biochem 225: 907-22 |
| Plant Defenses | Viral resistance | Ghoshroy et al. (1998) Plant J |
| | Inhibition of systemic | 13: 591-602 |
| | movement of virus | |
| | Block of viral disease | |
| | Detoxification of heavy | Clemens et al. (1999) EMBO J |
| | metals | 18: 3325-33 |
| | Enhanced stress resistance | Romero-Peurtas et al. (1999) |
| | | Free Rad Res 31: S25-31 |
| | Cadmium resistance | Xiang and Oliver (1998) Plant |
| | via modulation of jasmonic | Cell 10: 1539-90 |
| | acid signaling pathway | |
| Signaling | Relief of post-translational | Citovsky et al. (1998) Plant J 16: |
| | gene silencing | 13-20 |

[1817] Other biological activities that can be modulated by the cadmium responsive genes and gene products are listed in the Reference tables. Assays for detecting such biological activities are described in the Protein Domain table.

[1818] Cadmium responsive genes are characteristically differentially transcribed in response to fluctuating cadmium levels or concentrations, whether internal or external to an organism or cell. The MA_diff table(s) report(s) the changes in transcript levels of various cadmium responsive genes following treatment with 10 μM cadmium, relative to untreated plants.

[1819] Profiles of some cadmium responsive genes are shown in the Table below together with examples of the kinds of associated biological activities.

| | | | EXAMPLES OF |
|---|---|---|---|
| TRANSCRIPT | TYPE OF | PHYSIOLOGICAL | BIOCHEMICAL |
| LEVELS | GENES | CONSEQUENCES | ACTIVITY |
| Up regulated | Responders to | Cadmium perception | Transporters |
| transcripts | cadmium | Cadmium uptake and | Metabolic enzymes |
| | Application | transport | Change in cell membrane |
| | Genes induced by | Cadmium metabolism | structure and potential |
| | cadmium | Synthesis of secondary | Kinases and |
| | | metabolites and/or | Phosphatases |
| | | proteins | Transcription activators |
| | | Modulation of | Change in chromatin |
| | | cadmium response | structure and/or localized |
| | | transduction pathways | DNA topology |
| | | Specific gene | RNA binding proteins |
| | | transcription initiation | |
| | | Genes involved in | |
| | | inhibiting systemic | |
| | | movement of plant | |
| | | viral RNA | |
| | | Genes involved in post | |
| | | translational gene | |
| | | silencing | |
| Down-regulated | Responders to | Negative regulation of | Transcription factors |
| transcripts | cadmium | cadmium pathways | Change in protein |
| | Genes repressed | released | structure by |
| | by cadmium | Changes in pathways | phosphorylation |
| | Genes with | and processes operating | (kinases) or |
| | discontinued | in cells | Dephosphoryaltion |
| | expression or | Changes in metabolism | (phosphatases) |
| | unsTable mRNA | other than cadmium | Change in chromatin |
| | in presence of | pathways | structure and/or DNA |
| | cadmium | Genes involved in | topology |
| | | facilitating systemic | Factors for protein |
| | | movement of plant | synthesis and degradation |
| | | viral RNA | Metabolic enzymes |
| | | Genes involved in | RNA binding proteins |
| | | promoting post | |
| | | translational gene | |
| | | silencing | |

### Use of Promoters of Cadmium Responsive Genes

[1820] Promoters of Cadmium responsive genes are useful for transcription of any desired polynucleotide or plant or non-plant origin. Further, any desired sequence can be transcribed in a similar temporal, tissue, or environmentally specific patterns as the Cadmium responsive genes where the desired sequence is operably linked to a promoter of a Cadmium responsive gene. The protein product of such a polynucleotide is usually synthesized in the same cells, in response to the same stimuli as the protein product of the gene from which the promoter was derived. Such promoter are also useful to produce antisense mRNAs to down-regulate the product of proteins, or to produce sense mRNAs to down-regulate mRNAs via sense suppression.

[1821] III.12. Disease Responsive Genes, Gene Components and Products

[1822] Often growth and yield are limited by the ability of a plant to tolerate stress conditions, including pathogen attack. To combat such conditions, plant cells deploy a battery of inducible defense responses, including the triggering of an oxidative burst and the transcription of pathogenesis-related protein (PR protein) genes. These responses depend on the recognition of a microbial avirulence gene product (avr) by a plant resistance gene product (R), and a series of downstream signaling events leading to transcription-independent and transcription-dependent disease resistance responses. Reactive oxygen species (ROS) such as H₂O₂ and NO from the oxidative burst plays a signaling role, including initiation of the hypersensitive response (HR) and induction of systemic acquired resistance (SAR) to secondary infection by unrelated pathogens. PR proteins are able to degrade the cell walls of invading microorganisms, and phytoalexins are directly microbicidal.

[1823] The presence of an avirulent pathogen and/or changes in the concentrations of O₂⁻, H₂O₂ and NO in the environment surrounding a plant cell modulate the activities of many genes and, therefore, the levels of many gene products. Examples of tobacco mosaic virus (TMV) responsive genes and gene products, many of them operating through an ROS signaling system, are shown in The Reference and Sequence Tables. These genes and/or products are responsible for effects on traits such as plant vigor and seed yield. The genes were discovered and characterized from a much larger set by experiments designed to find genes whose mRNA products changed in response to application of TMV to plants.

[1824] Microarray technology allows monitoring of gene expression levels for thousands of genes in a single experiment. This is achieved by hybridizing labeled fluorescent cDNA pools to glass slides that contain spots of DNA (Schena et al. (1995) Science 270: 467-70). The US Arabidopsis Functional Genomics Consortium (AFGC) has recently made public the results from such microarray experiments conducted with AFGC chips containing some 10,000 non-redundant ESTs, selected from about 37,000 randomly sequenced ESTs generated from mRNA of different tissues and developmental stages.

[1825] The sequences of the ESTs showing at least two-fold increases or decreases in response to TMV infection over the non infected controls were identified, compared to the Ceres full length cDNA and genomic sequence databanks, and equivalent Ceres clones identified. The MA_diff table(s) report(s) the results of this analysis, indicating those Ceres clones which are up or down regulated over controls, thereby indicating the Ceres clones which represent disease responsive genes.

[1826] Manipulation of one or more disease responsive gene activities is useful to modulate the biological processes and/or phenotypes listed below. Disease responsive genes and gene products can act alone or in combination. Useful combinations include disease responsive genes and/or gene products with similar transcription profiles, similar biological activities, or members of the same or functionally related biochemical pathways. Whole pathways or segments of pathways are controlled by transcription factor proteins and proteins controlling the activity of signal transduction pathways. Therefore, manipulation of such protein levels is especially useful for altering phenotypes and biochemical activities of plants.

[1827] Such disease responsive genes and gene products can function to either increase or dampen the above phenotypes or activities either in response to changes in active oxygen concentration or in the absence of active oxygen fluctuations. The MA_diff Table(s) reports the transcript levels of the experiment (see EXPT ID: Disease (relating to SMD 7342, SMD 7343)). For transcripts that had higher levels in the samples than the control, a “+” is shown. A “−” is shown for when transcript levels were reduced in root tips as compared to the control. For more experimental detail see the Example section below.

[1828] Disease genes are those sequences that showed differential expression as compared to controls, namely those sequences identified in the MA_diff tables with a “+” or “−” indication.

[1829] Disease Genes Identified by Cluster Analyses of Differential Expression

[1830] Disease Genes Identified by Correlation to Genes that are Differentially Expressed

[1831] As described above, the transcription profiles of genes that act together are well correlated. Applicants not only have identified the genes that are differentially expressed in the microarray experiments, but also have identified the genes that act in concert with them. The MA_clust table indicates groups of genes that have well correlated transcription profiles and therefore participate in the same pathway or network.

[1832] A pathway or network of Disease genes is any group in the MA_clust that comprises a cDNA ID that also appears in Expt ID Disease (relating to SMD 7342, SMD 7343) of the MA_diff table(s).

[1833] Disease Genes Identified by Correlation to Genes that Cause Physiological Consequences

[1834] Additionally, the differential expression data and the phenotypic observations can be merged to identify pathways or networks of Disease genes. A group in the MA_clust is considered a Disease pathway or network if the group comprises a cDNA ID that also appears in Knock-in or Knock-out tables that causes one or more of the phenotypes described in section above.

[1835] Disease Genes Identified by Amino Acid Sequence Similarity

[1836] Disease genes from other plant species typically encode polypeptides that share amino acid similarity to the sequences encoded by corn and Arabidopsis Disease genes. Groups of Disease genes are identified in the Protein Group table. In this table, any protein group that comprises a peptide ID that corresponds to a cDNA ID member of a Disease pathway or network is a group of proteins that also exhibits Disease functions/utilities.

[1837] Further, promoters of disease responsive genes, as described in the Reference tables, for example, are useful to modulate transcription that is induced by disease or any of the following phenotypes or biological activities below. Further, any desired sequence can be transcribed in similar temporal, tissue, or environmentally specific patterns as the disease responsive genes when the desired sequence is operably linked to a promoter of a disease responsive gene.

[1838] III.E.12.a. Use of Disease Responsive Genes, Gene Components and Products to Modulate Phenotypes

[1839] Disease responsive genes and gene products are useful to or modulate one or more phenotypes including pathogen tolerance and/or resistance; Avr/R locus interactions; non-host interactions; HR; SAR; resistance to bacteria e.g. to Erwinia stewartii, Pseudomonas syringae, Pseudomonas tabaci, Stuart's wilt, etc.; resistance to fungi, e.g. to downy mildews such as Scleropthora macrospora, Sclerophthora rayissiae, Sclerospora graminicola, Peronosclerospora sorghi, Peronosclerospora philippinensis, Peronosclerospora sacchari, Peronosclerospora maydis; rusts such as Puccinia sorphi, Puccinia polysora, Physopella zeae, etc.; and to other fungal diseases e.g. Cercospora zeae-maydis, Colletotrichum graminicola, Fusarium monoliforme, Exserohilum turcicum, Bipolaris maydis, Phytophthora parasitica, Peronospora tabacina, Septoria, etc.; resistance to viruses or viroids e.g. to tobacco or cucumber mosaic virus, ringspot virus, necrosis virus, pelargonium leaf curl virus, red clover mottle virus, tomato bushy stunt virus, and like viruses; rrResistance to insects, such as to aphids e.g. Myzus persicae; to beetles and beetle larvae; to lepidoptera larvae, e.g. Heliothus etc.; resistance to Nematodes, e.g. Meloidogyne incognita etc.; local resistance in primary (infected) or secondary (uninfected) leaves; stress tolerance; winter survival; cold tolerance; salt tolerance; heavy metal tolerance, such as cadmium; tolerance to physical wounding; increased organelle tolerance to redox stress, such as in mitochondria, and chloroplasts; cell death; programmed cell death, including death of diseased tissue and during senescence; fruit drop; biomass; fresh and dry weight during any time in plant life, such as maturation; number of flowers, seeds, branches, and/or leaves; seed yield, including number, size, weight, and/or harvest index; fruit yield, including number, size, weight, and/or harvest index; plant development; time to fruit maturity; cell wall strengthening and reinforcement; plant product quality; paper making quality; food additives; treatment of indications modulated by free radicals; cancer; kinds of low molecular weight compounds such as phytoalexins; abundance of low molecular weight compounds such as phytoalexins; other phenotypes based on gene silencing.

[1840] To regulate any of the phenotype(s) above, activities of one or more of the disease responsive genes or gene products can be modulated and the plants can be tested by screening for the desired trait. Specifically, the gene, mRNA levels, or protein levels can be altered in a plant utilizing the procedures described herein and the phenotypes can be screened for variants as in Winkler et al. (1998) Plant Physiol 118: 743-50 and assayed, for example, in accordance to Alvarez et al., (1998) Cell 92: 773-784; Halhbrock and Scheel, (1989) Ann. Rev. Plant Physiol. Plant Mol. Biol. 40: 347-369; Lamb et al., (1997) Ann. Rev. Plant Mol. Biol. Plant Physiol. 48: 251-275; Lapwood et al. (1984) Plant Pathol. 33: 13-20; Levine et al. (1996) Curr. Biol. 6: 427-437; McKersie et al., (2000) Plant Physiol. 122: 1427-1437; Olson and Varner (1993) Plant J. 4: 887-892; Pastore et al., (2000), FEBS Lett 470: 88-92; Pastori et al., (1997) Plant Physiol. 113: 411-418; Romero-Puertas et al., (1999) Free Radic. Res. 1999 31 Suppl: S25-31; Shirataki et al., Anticancer Res 20: 423-426 (2000); Wu et al., (1995) Plant Cell 7: 1357-1368.

[1841] III.E.12.b. Use of Disease Responsive Genes, Gene Components and Products to Modulate Biochemical Activities

[1842] The activities of one or more of the disease responsive genes can be modulated to change biochemical or metabolic activities and/or pathways such as those noted below. Such biological activities are documented and can be measured according to the citations above and included in the Table below:

| | BIOCHEMICAL OR | |
|---|---|---|
| | METABOLIC ACTIVITIES | CITATIONS INCLUDING |
| PROCESS | AND/OR PATHWAYS | ASSAYS |
| Resistance to Pathogens | Induction of ROS signaling | Wu et. al. (1995) Plant Cell 7: |
| | pathways | 1357-68 |
| | Modulation of nitric oxide | Delledonne et al. (1998) Nature |
| | signaling | 394: 585-588 |
| | Induction of PR proteins, | Chamnongpol et. al. (1998) Proc. |
| | phytoalexins, and defense | Nat. Acad Sci USA 12; 95: 5818-23. |
| | pathways | Davis et al. (1993) |
| | | Phytochemistry 32: 607-611 |
| | Induction of cellular | Chen et. al. Plant J. (1996) |
| | protectant genes such as | 10: 955-966 |
| | glutathione S-transferase | Gadea et. al. (1999) Mol Gen |
| | (GST) and ascorbate | Genet 262: 212-219 |
| | peroxidase | Wu et. al. (1995) Plant Cell 7: |
| | | 1357-68 |
| | ROS levels following | Orozco-Cardenas and Ryan |
| | wounding and changes in | (1999) Proc. Nat. Acad. Sci. USA |
| | physical pressure | 25; 96: 6553-7. |
| | | Yahraus et al. (1995) Plant |
| | | Physiol. 109: 1259-1266 |
| | Salicyclic acid levels and | Durner and Klessig (1996) |
| | signaling | J.Biol. Chem. 271: 28492-501 |
| Responses to Wounding | Expression of genes Involved | Legendre et al. (1993) Plant |
| | in wound repair and cell | Physiol. 102: 233-240 |
| | division | |
| Responses to Environmental | Expression of genes involved | Shi et al. (2000) Proc. Natl. Acad. |
| Stress | in responses to drought, cold, | Sci. USA 97: 6896-6901 |
| | salt, heavy metals | |
| Reinforcement of Cell Walls | Modulation of the Production | Bradley et al. (1992) Cell 70, 21-30 |
| | of ExtracTable Proline-Rich | |
| | Protein | |
| | Modulation of Lignification | Mansouri et al. (1999) Physiol. |
| | | Plant 106: 355-362 |
| Programmed Cell Death | Induction of PCD activating | Levine et al. (1996) Curr. Biol. 6: |
| | genes | 427-437. Reynolds et. al. (1998) |
| | | Biochem. J. 330: 115-20 |
| | Suppression of PCD | Pennell and Lamb (1997) Plant |
| | suppressing genes | Cell 9, 1157-1168 |

[1843] Other biological activities that can be modulated by the disease responsive genes and their products are listed in the Reference Table. Assays for detecting such biological activities are described in the Protein Domain table.

[1844] Disease responsive genes are characteristically differentially transcribed in response to fluctuating levels of disease. The MA_diff table(s) report(s) the changes in transcript levels of various disease responsive genes in the aerial parts of a plant 3 days after the plant was sprayed with a suspension of TMV relative to control plants sprayed with water.

[1845] The data from this experiment reveal a number of types of disease responsive genes and gene products, including “early responders,” and “delayed responders”. Profiles of individual disease responsive genes are shown in the Table below with examples of which associated biological activities are modulated when the activities of one or more such genes vary in plants.

| | | | EXAMPLES OF |
|---|---|---|---|
| GENE | FUNCTIONAL | | BIOCHEMICAL |
| EXPRESSION | CATEGORY | PHYSIOLOGICAL | ACTIVITY |
| LEVELS | OF GENE | CONSequence | OF GENE PRODUCTS |
| Upregulated | Early | ROS Perception and | Transcription factors, |
| transcripts | Responders to | Response | kinases, phosphatases, GTP- |
| | Pathogens | | binding proteins (G- |
| | | | proteins), leucine rich repeat |
| | | | proteins (LRRs), |
| | | | transporters, calcium |
| | | | binding proteins, chromatin |
| | | | remodeling proteins |
| | | Initiation of Gene | Glutathione S-transferase |
| | | Transcription | (GST), |
| | | | heat shock proteins, |
| | | | salicylic acid (SA) response |
| | | | pathway proteins, jasmonate |
| | | | response pathway proteins, |
| | | | dehydrins, peroxidases, |
| | | | catalases |
| | Delayed | Initiation of Defence | Proteases, pathogen |
| | Responders to | Gene Transcription | response (PR) proteins, |
| | Pathogens | | cellulases, chitinases, |
| | | | cutinases, glucanases, other |
| | | | degrading enzymes, calcium |
| | | | channel blockers, |
| | | | phenylalanine ammonia |
| | | | lyase, proteins of defense |
| | | | pathways, cell wall proteins |
| | | | incuding proline rich |
| | | | proteins and glycine rich |
| | | | proteins, epoxide hydrolase, |
| | | | methyl transferases |
| | | Activation of cell death | Transcription factors |
| | | pathways | kinases, phosphatases, DNA |
| | | | surveillance proteins, p53, |
| | | | proteases, endonucleases, |
| | | | GTP-binding proteins (G- |
| | | | proteins), leucine rich repeat |
| | | | proteins (LRRs), |
| | | | transporters, calcium |
| | | | binding proteins, |
| | | | mitochondrial and |
| | | | chloroplast energy related |
| | | | proteins, ribosome |
| | | | inactivating proteins |
| | | Initiation of Cellular | Reactive oxygen scavenging |
| | | Protectant Gene | enzymes, GST, catalase, |
| | | Transcription | peroxidase, ascorbate |
| | | | oxidase |
| Downregulated | Early | Negative regulation of | Transcription factors, |
| transcripts | responders to | pathogen inducible | kinases, phosphatases, GTP- |
| | pathogens | pathways released | binding proteins (G- |
| | | | proteins), leucine rich repeat |
| | | | proteins (LRRs), |
| | | | transporters, calcium |
| | | | binding proteins, chromatin |
| | | | remodelling proteins |
| | Genes repressed | Negative regulation of | Transcription factors, |
| | by TMV | ROS inducible | kinases, phosphatases, GTP- |
| | | pathways released | binding proteins (G- |
| | | | proteins), leucine rich repeat |
| | | | proteins (LRRs), |
| | | | transporters, calcium |
| | | | binding proteins, chromatin |
| | | | remodelling proteins |
| | Delayed | Negative regulation of | Transcription factors, |
| | Responders to | pathogen inducible | kinases, phosphatases, GTP- |
| | Pathogens | pathways released | binding proteins (G- |
| | | | proteins), leucine rich repeat |
| | | | proteins (LRRs), |
| | | | transporters, calcium |
| | | | binding proteins, chromatin |
| | | | remodelling proteins |
| | Genes repressed | Negative regulation of | Transcription factors, |
| | by TMV | genes suppressing | kinases, phosphatases, GTP- |
| | | programmed cell death | binding proteins (G- |
| | | released | proteins), leucine rich repeat |
| | | | proteins (LRRs), |
| | | | transporters, calcium |
| | | | binding proteins, chromatin |
| | | | remodelling proteins |

### Use of Promoters of Disease Responsive Genes

[1846] Promoters of Disease responsive genes are useful for transcription of any desired polynucleotide or plant or non-plant origin. Further, any desired sequence can be transcribed in a similar temporal, tissue, or environmentally specific patterns as the Disease responsive genes where the desired sequence is operably linked to a promoter of a Disease responsive gene. The protein product of such a polynucleotide is usually synthesized in the same cells, in response to the same stimuli as the protein product of the gene from which the promoter was derived. Such promoter are also useful to produce antisense mRNAs to down-regulate the product of proteins, or to produce sense mRNAs to down-regulate mRNAs via sense suppression.

[1847] II.E.13. Defense (LOL2) Responsive Genes, Gene Components and Products

[1848] Often growth and yield are limited by the ability of a plant to tolerate stress conditions, including pathogen attack. To combat such conditions, plant cells deploy a battery of inducible defense responses, including the triggering of an oxidative burst and the transcription of pathogenesis-related protein (PR protein) genes. Reactive oxygen species (ROS) such as H₂O₂ and NO from the oxidative burst play a signaling role, including initiation of the hypersensitive response (HR) and induction of systemic acquired resistance (SAR) to secondary infection by unrelated pathogens. Some PR proteins are able to degrade the cell walls of invading microorganisms, and phytoalexins are directly microbicidal. Other defense related pathways are regulated by salicylic acid (SA) or methyl jasmonate (MeJ).

[1849] These responses depend on the recognition of a microbial avirulence gene product (avr) by a plant resistance gene product (R), and a series of downstream signaling events leading to transcription-independent and transcription-dependent disease resistance responses. Current models suggest that R− gene-encoded receptors specifically interact with pathogen-encoded ligands to trigger a signal transduction cascade. Several components include ndr1 and eds1 loci. NDR1, EDS1, PR1, as well as PDF1.2, a MeJ regulated gene and Nim1, a SA regulated gene, are differentially regulated in plants with mutations in the LOL2 gene.

[1850] LOL2 shares a novel zinc finger motif with LSD1, a negative regulator of cell death and defense response. Due to an alternative splice site the LOL2 gene encodes two different proteins, one of which contains an additional, putative DNA binding motif. Northern analysis demonstrated that LOL2 transcripts containing the additional DNA binding motif are predominantly upregulated after treatment with both virulent and avirulent Pseudomonas syringae pv maculicola strains. Modulation in this gene can also confer enhanced resistance to virulent and avirulent Peronospora parasitica isolates

[1851] Examples of LOL2 responsive genes and gene products are shown in the Reference, Sequence, Protein Group, Protein Group Matrix, MA_diff and MA_clust tables. These genes and/or products are responsible for effects on traits such as plant vigor, disease resistance, and seed yield. The genes were discovered and characterized from a much larger set by microarray experiments designed to find genes whose mRNA products changed when the LOL2 gene was mutated in plants.

[1852] Microarray technology allows monitoring of gene expression levels for thousands of genes in a single experiment. This is achieved by hybridizing labeled fluorescent cDNA pools to glass slides that contain spots of DNA (Schena et al. (1995) Science 270: 467-70). The US Arabidopsis Functional Genomics Consortium (AFGC) has recently made public the results from such microarray experiments conducted with AFGC chips containing some about 10,000 non-redundant ESTs, selected from about 37,000 randomly sequenced ESTs generated from mRNA of different tissues and developmental stages.

[1853] The sequences of the ESTs showing at least two-fold increases or decreases in plants with the LOL2 mutation versus wildtype were obtained. Specifically, the plant line lol-2-2 tested, a loss of function mutation. The ESTs were compared to the Ceres full length cDNA and genomic sequence databanks, and equivalent Ceres clones identified. The MA_diff table reports the results of this analysis, indicating those Ceres clones which are up or down regulated over controls, thereby indicating the Ceres clones which represent LOL2 responsive genes.

[1854] Manipulation of one or more LOL2 responsive gene activities is useful to modulate the biological processes and/or phenotypes listed below. LOL2 responsive genes and gene products can act alone or in combination. Useful combinations include LOL2 responsive genes and/or gene products with similar transcription profiles, similar biological activities, or members of the same or functionally related biochemical pathways. Whole pathways or segments of pathways are controlled by transcription factor proteins and proteins controlling the activity of signal transduction pathways. Therefore, manipulation of such protein levels is especially useful for altering phenotypes and biochemical activities of plants.

[1855] Such LOL2 responsive genes and gene products can function to either increase or dampen the above phenotypes or activities either in response to changes in active LOL2 gene or in the absence. The MA_diff Table(s) reports the transcript levels of the experiment (see EXPT ID: lol2 (relating to SMD 8031, SMD 8032)). For transcripts that had higher levels in the samples than the control, a “+” is shown. A “−” is shown for when transcript levels were reduced in root tips as compared to the control. For more experimental detail see the Example section below.

[1856] Defense genes are those sequences that showed differential expression as compared to controls, namely those sequences identified in the MA_diff tables with a “+” or “−” indication.

[1857] Defense Genes Identified by Cluster Analyses of Differential Expression

[1858] Defense Genes Identified by Correlation to Genes that are Differentially Expressed

[1859] As described above, the transcription profiles of genes that act together are well correlated. Applicants not only have identified the genes that are differentially expressed in the microarray experiments, but also have identified the genes that act in concert with them. The MA_clust table indicates groups of genes that have well correlated transcription profiles and therefore participate in the same pathway or network.

[1860] A pathway or network of Defense genes is any group in the MA_clust that comprises a cDNA ID that also appears in Expt ID lol2 (relating to SMD 8031, SMD 8032) of the MA_diff table(s).

[1861] Defense Genes Identified by Correlation to Genes that Cause Physiological Consequences

[1862] Additionally, the differential expression data and the phenotypic observations can be merged to identify pathways or networks of Defense genes. A group in the MA dust is considered a Defense pathway or network if the group comprises a cDNA ID that also appears in Knock-in or Knock-out tables that causes one or more of the phenotypes described in section above.

[1863] Defense Genes Identified by Amino Acid Sequence Similarity

[1864] Defense genes from other plant species typically encode polypeptides that share amino acid similarity to the sequences encoded by corn and Arabidopsis Defense genes. Groups of Defense genes are identified in the Protein Group table. In this table, any protein group that comprises a peptide ID that corresponds to a cDNA ID member of a Defense pathway or network is a group of proteins that also exhibits Defense functions/utilities.

[1865] Further, promoters of LOL2 responsive genes, as described in the Reference tables, for example, are useful to modulate transcription that is induced by LOL2 responsive genes or any of the following phenotypes or biological activities below. Further, any desired sequence can be transcribed in similar temporal, tissue, or environmentally specific patterns as the LOL2 responsive genes when the desired sequence is operably linked to a promoter of a LOL2 responsive gene.

[1866] III.E.12.a. Use of Lol2 Responsive Genes, Gene Components and Products to Modulate Phenotypes

[1867] LOL2 responsive genes and gene products are useful to or modulate one or more phenotypes including pathogen tolerance and/or resistance; Avr/r locus interactions; Non-Host interactions; HR; SAR, e.g., disease responsive genes acting in conjunction with infection with any of the organisms listed below; resistance to bacteria e.g. to Erwinia stewartii, Pseudomonas syringae, Pseudomonas tabaci, Stuart's wilt, etc.; resistance to fungi e.g. to downy mildews such as Scleropthora macrospora, Sclerophthora rayissiae, Sclerospora graminicola, Peronosclerospora sorghi, Peronosclerospora philippinensis, Peronosclerospora sacchari, Peronosclerospora maydis; rusts such as Puccinia sorphi, Puccinia polysora, Physopella zeae, etc.; and to other fungal diseases e.g. Cercospora zeae-maydis, Colletotrichum graminicola, Fusarium monoliforme, Exserohilum turcicum, Bipolaris maydis, Phytophthora parasitica, Peronospora tabacina, Septoria, etc.; resistance to viruses or viroids e.g. to tobacco or cucumber mosaic virus, ringspot virus, necrosis virus, pelargonium leaf curl virus, red clover mottle virus, tomato bushy stunt virus, and like viruses; resistance to insects, such as to aphids e.g. Myzus persicae; to beetles and beetle larvae; to lepidoptera larvae, e.g. Heliothus etc.; resistance to nematodes, e.g. Meloidogyne incognita etc.; local resistance in primary (infected) or secondary (uninfected) leaves; stress tolerance; winter survival; cold tolerance; salt tolerance, heavy metal tolerance, such as cadmium; tolerance to physical wounding; increased organelle tolerance to redox stress, such as in mitochondria, and chloroplasts; cell death; programmed cell death, including death of diseased tissue and during senescence; fruit drop; biomass; fresh and dry weight during any time in plant life, such as maturation; number of flowers, seeds, branches, and/or leaves; seed yield, including number, size, weight, and/or harvest index; fruit yield, including number, size, weight, and/or harvest index; plant development; time to fruit maturity; cell wall strengthening and reinforcement; plant product quality; paper making quality; food additives; treatment of indications modulated by free radicals; cancer; kinds of low molecular weight compounds such as phytoalexins; abundance of low molecular weight compounds such as phytoalexins; and other phenotypes based on gene silencing.

[1868] To regulate any of the phenotype(s) above, activities of one or more of the LOL2 responsive genes or gene products can be modulated and the plants can be tested by screening for the desired trait. Specifically, the gene, mRNA levels, or protein levels can be altered in a plant utilizing the procedures described herein and the phenotypes can be screened for variants as in Winkler et al. (1998) Plant Physiol 118: 743-50 and assayed, for example, in accordance to Alvarez et al., (1998) Cell 92: 773-784; Halhbrock and Scheel, (1989) Ann. Rev. Plant Physiol. Plant Mol. Biol. 40: 347-369; Lamb et al., (1997) Ann. Rev. Plant Mol. Biol. Plant Physiol. 48: 251-275; Lapwood et al. (1984) Plant Pathol. 33: 13-20; Levine et al. (1996) Curr. Biol. 6: 427-437; McKersie et al., (2000) Plant Physiol. 122: 1427-1437; Olson and Varner (1993) Plant J. 4: 887-892; Pastore et al., (2000), FEBS Lett 470: 88-92; Pastori et al., (1997) Plant Physiol. 113: 411-418; Romero-Puertas et al., (1999) Free Radic. Res. 1999 31 Suppl: S25-31; Shirataki et al., Anticancer Res 20: 423-426 (2000); Wu et al., (1995) Plant Cell 7: 1357-1368.

[1869] III.E.12.b. Use of Defense Responsive Genes to Modulate Biochemical Activities

[1870] The activities of one or more of the defense (LOL2) responsive genes can be modulated to change biochemical or metabolic activities and/or pathways such as those noted below. Such biological activities are documented and can be measured according to the citations above and included in the Table below:

| | BIOCHEMICAL OR | |
|---|---|---|
| | METABOLIC ACTIVITIES | CITATIONS INCLUDING |
| PROCESS | AND/OR PATHWAYS | ASSAYS |
| Resistance To Pathogens | Induction Of ROS Signaling | Wu et. al. (1995) Plant Cell 7: |
| | Pathways | 1357-68 |
| | Modulation Of Nitric Oxide | Delledonne et al. (1998) Nature |
| | Signaling | 394: 585-588 |
| | Induction Of PR Proteins, | Chamnongpol et. al. (1998) Proc. |
| | Phytoalexins, And Defense | Nat. Acad Sci USA 12; 95: 5818-23. |
| | Pathways | Davis et al. (1993) Phytochemistry |
| | | 32: 607-611 |
| | Induction Of Cellular | Chen et. al. Plant J. (1996) 10: 955-966 |
| | Protectant Genes Such As | Gadea et. al. (1999) Mol Gen Genet |
| | Glutathione S-Transferase | 262: 212-219 |
| | (GST) And Ascorbate | Wu et.al.(1995) Plant Cell 7: |
| | Peroxidase | 1357-68 |
| | ROS Levels Following | Orozco-Cardenas and Ryan (1999) |
| | Wounding And Changes In | Proc. Nat. Acad. Sci. USA |
| | Physical Pressure | 25; 96: 6553-7. |
| | | Yahraus et al. (1995) Plant |
| | | Physiol. 109: 1259-1266 |
| | Salicyclic Acid Levels And | Durner and Klessig (1996) |
| | Signaling | J. Biol. Chem. 271: 28492-501 |
| Responses To Wounding | Expression Of Genes Involved | Legendre et al. (1993) Plant |
| | In Wound Repair And Cell | Physiol. 102: 233-240 |
| | Division | |
| Responses To | Expression Of Genes Involved | Shi et al. (2000) Proc. Natl. Acad. |
| Environmental Stress | In Responses To Drought, | Sci. USA 97: 6896-6901 |
| | Cold, Salt, Heavy Metals | |
| Reinforcement Of Cell | Modulation Of The Production | Bradley et al. (1992) Cell 70, 21-30 |
| Walls | Of ExtracTable Proline-Rich | |
| | Protein | |
| | Modulation Of Lignification | Mansouri et al. (1999) Physiol. |
| | | Plant 106: 355-362 |
| Programmed Cell Death | Induction Of Pcd Activating | Levine et al. (1996) Curr. Biol. 6: |
| | Genes | 427-437. Reynolds et.al. (1998) |
| | | Biochem. J. 330: 115-20 |
| | Suppression Of PCD | Pennell and Lamb (1997) Plant |
| | Suppressing Genes | Cell 9, 1157-1168 |

[1871] Other biological activities that can be modulated by the LOL2 responsive genes and their products are listed in the Reference tables. Assays for detecting such biological activities are described in the Protein Domain table.

[1872] LOL2 responsive genes are characteristically differentially transcribed in response to fluctuating levels of disease. MA_diff table reports the changes in transcript levels of various LOL2 responsive genes in the lol-2 line versus control plants.

[1873] The data from this experiment reveal a number of types of LOL2 responsive genes and gene products. Profiles of individual LOL2 responsive genes are shown in the Table below with examples of which associated biological activities are modulated when the activities of one or more such genes vary in plants.

| | | | EXAMPLES OF |
|---|---|---|---|
| GENE | FUNCTIONAL | | BIOCHEMICAL |
| EXPRESSION | CATEGORY | PHYSIOLOGICAL | ACTIVITY |
| LEVELS | OF GENE | CONSequence | OF GENE PRODUCTS |
| Upregulated | Early | ROS Perception and | Transcription factors, |
| transcripts | Responders to | Response | kinases, phosphatases, GTP- |
| | the LOL2 | | binding proteins (G- |
| | Mutation | | proteins), leucine rich repeat |
| | | | proteins (LRRs), |
| | | | transporters, calcium |
| | | | binding proteins, chromatin |
| | | | remodeling proteins |
| | | Initiation of Gene | Glutathione S-transferase |
| | | Transcription | (GST), |
| | | | heat shock proteins, |
| | | | salicylic acid (SA) response |
| | | | pathway proteins, jasmonate |
| | | | response pathway proteins, |
| | | | dehydrins, peroxidases, |
| | | | catalases |
| | Delayed | Initiation of Defence | Proteases, pathogen |
| | Responders to | Gene Transcription | response (PR) proteins, |
| | the LOL2 | | cellulases, chitinases, |
| | Mutation | | cutinases, glucanases, other |
| | | | degrading enzymes, calcium |
| | | | channel blockers, |
| | | | phenylalanine ammonia |
| | | | lyase, proteins of defense |
| | | | pathways, cell wall proteins |
| | | | incuding proline rich |
| | | | proteins and glycine rich |
| | | | proteins, epoxide hydrolase, |
| | | | methyl transferases |
| | | Activation of cell death | Transcription factors |
| | | pathways | kinases, phosphatases, DNA |
| | | | surveillance proteins, p53, |
| | | | proteases, endonucleases, |
| | | | GTP-binding proteins (G- |
| | | | proteins), leucine rich repeat |
| | | | proteins (LRRs), |
| | | | transporters, calcium |
| | | | binding proteins, |
| | | | mitochondrial and |
| | | | chloroplast energy related |
| | | | proteins, ribosome |
| | | | inactivating proteins |
| | | Initiation of Cellular | Reactive oxygen scavenging |
| | | Protectant Gene | enzymes, GST, catalase, |
| | | Transcription | peroxidase, ascorbate |
| | | | oxidase |
| Downregulated | Early | Negative regulation of | Transcription factors, |
| transcripts | Responders to | LOL2 Mutation | kinases, phosphatases, GTP- |
| | the LOL2 | inducible pathways | binding proteins (G- |
| | Mutation | released | proteins), leucine rich repeat |
| | | | proteins (LRRs), |
| | | | transporters, calcium |
| | | | binding proteins, chromatin |
| | | | remodelling proteins |
| | Genes | Negative regulation of | Transcription factors, |
| | Repressed by | ROS inducible | kinases, phosphatases, GTP- |
| | the LOL2 | pathways released | binding proteins (G- |
| | Mutation | | proteins), leucine rich repeat |
| | | | proteins (LRRs), |
| | | | transporters, calcium |
| | | | binding proteins, chromatin |
| | | | remodelling proteins |
| | Delayed | Negative regulation of | Transcription factors, |
| | Responders to | LOL2 Mutation | kinases, phosphatases, GTP- |
| | the LOL2 | inducible pathways | binding proteins (G- |
| | Mutation | released | proteins), leucine rich repeat |
| | | | proteins (LRRs), |
| | | | transporters, calcium |
| | | | binding proteins, chromatin |
| | | | remodelling proteins |
| | Genes | Negative Regulation Of | Transcription Factors, |
| | Repressed By | Genes Suppressing | Kinases, Phosphatases, |
| | The LOL2 | Programmed Cell | GTP-Binding Proteins (G- |
| | Mutation | Death Released | Proteins), Leucine Rich |
| | | | Repeat Proteins (Lrrs), |
| | | | Transporters, Calcium |
| | | | Binding Proteins, |
| | | | Chromatin Remodelling |
| | | | Proteins |

### Use of Promoters of Defense Responsive Genes

[1874] Promoters of Defense responsive genes are useful for transcription of any desired polynucleotide or plant or non-plant origin. Further, any desired sequence can be transcribed in a similar temporal, tissue, or environmentally specific patterns as the Defense responsive genes where the desired sequence is operably linked to a promoter of a Defense responsive gene. The protein product of such a polynucleotide is usually synthesized in the same cells, in response to the same stimuli as the protein product of the gene from which the promoter was derived. Such promoter are also useful to produce antisense mRNAs to down-regulate the product of proteins, or to produce sense mRNAs to down-regulate mRNAs via sense suppression.

[1875] III.E.14. Iron Responsive Genes, Gene Components and Products

[1876] Iron (Fe) deficiency in humans is the most prevalent nutritional problem worldwide today. Increasing iron availability via diet is a sustainable malnutrition solution for many of the world's nations. One-third of the world's soils, however, are iron deficient. Consequently, to form a food-based solution to iron malnutrition, we need a better understanding of iron uptake, storage and utilization by plants. Furthermore, exposure to non-toxic Fe levels appears to affect inherent plant defense mechanisms. Consequently, exploring the effects of Fe exposure has potential for advances in plant disease resistance in addition to human nutrition.

[1877] Microarray technology allows monitoring of gene expression levels for thousands of genes in a single experiment. This is achieved by simultaneously hybridizing two differentially labeled fluorescent FeNA pools to glass slides that contain spots of DNA (Schena et al. (1995) Science 270: 467-70). The Arabidopsis Functional Genomics Consortium (AFGC) has recently made public the results from such microarray experiments conducted with AFGC chips containing 10,000 non-redundant ESTs, selected from 37,000 randomly sequenced ESTs generated from mRNA of different tissues and developmental stages.

[1878] The sequences of the ESTs showing at least two-fold increases or decreases over the controls were identified, compared to the Ceres full length FeNA and genomic sequence databanks, and identical Ceres clones identified. MA_diff table reports the results of this analysis, indicating those Ceres clones that are up or down regulated over controls, thereby indicating the Ceres clones which are iron responsive genes.

[1879] The MA_diff Table(s) reports the transcript levels of the experiment (see EXPT ID: Iron (relating to SMD 7114, SMD 7115, SMD 7125)). For transcripts that had higher levels in the samples than the control, a “+” is shown. A “−” is shown for when transcript levels were reduced in root tips as compared to the control. For more experimental detail see the Example section below.

[1880] Iron genes are those sequences that showed differential expression as compared to controls, namely those sequences identified in the MA_diff tables with a “+” or “−” indication.

[1881] Iron Genes Identified by Cluster Analyses of Differential Expression

[1882] Iron Genes Identified by Correlation to Genes that are Differentially Expressed

[1883] As described above, the transcription profiles of genes that act together are well correlated. Applicants not only have identified the genes that are differentially expressed in the microarray experiments, but also have identified the genes that act in concert with them. The MA_clust table indicates groups of genes that have well correlated transcription profiles and therefore participate in the same pathway or network.

[1884] A pathway or network of Iron genes is any group in the MA_clust that comprises a cDNA ID that also appears in Expt ID Iron (relating to SMD 7114, SMD 7115, SMD 7125) of the MA_diff table(s).

[1885] Iron Genes Identified by Correlation to Genes that Cause Physiological Consequences

[1886] Additionally, the differential expression data and the phenotypic observations can be merged to identify pathways or networks of Iron genes. A group in the MA_clust is considered a Iron pathway or network if the group comprises a cDNA ID that also appears in Knock-in or Knock-out tables that causes one or more of the phenotypes described in section above.

[1887] Iron Genes Identified by Amino Acid Sequence Similarity

[1888] Iron genes from other plant species typically encode polypeptides that share amino acid similarity to the sequences encoded by corn and Arabidopsis Iron genes. Groups of Iron genes are identified in the Protein Group table. In this table, any protein group that comprises a peptide ID that corresponds to a cDNA ID member of a Iron pathway or network is a group of proteins that also exhibits Iron functions/utilities.

[1889] III.E.14.a. Use of Iron Responsive Genes to Modulate Phenotypes

[1890] Iron responsive genes and gene products are useful to or modulate one or more phenotypes including growth; roots; root hair formation; stems, leaves; development; senescence; plant nutrition; uptake and assimilation of organic compounds; uptake and assimilation of inorganic compounds; animal (including human) nutrition; improved dietary mineral nutrition; stress response metabolic detoxification; and heavy metals.

[1891] To improve any of the phenotype(s) above, activities of one or more of the iron responsive genes or gene products can be modulated and tested by screening for the desired trait. Specifically, the gene, mRNA levels, or protein levels can be altered in a plant utilizing the procedures described herein and the phenotypes can be assayed. As an example, a plant can be transformed according to Bechtold and Pelletier (1998, Methods. Mol. Biol. 82:259-266) and visually inspected for the desired phenotype or metabolically and/or functionally assayed according to Schmidt et al. (2000, Plant Physiol 122:1109-18), Meagher (2000) Current Opinion in Plant Biology 3: 153-62), Deak (1999, Nature Biotechnology (1999, Nature Biotechnology 17: 192-96), Wei and Theil (2000, J. Biol Chem 275: 17488-93) and Vansuyt et al. (1997, FEBS Letters 410: 195-200).

[1892] III.E.14.b. Use of Iron-Responsive Genes, Gene Components and Products to Modulate Biochemical Activities

[1893] The activities of one or more of the iron responsive genes can be modulated to change biochemical or metabolic activities and/or pathways such as those noted below. Such biological activities can be measured according to the citations included in the Table below:

| | BIOCHEMICAL OR | CITATIONS |
|---|---|---|
| | METABOLIC ACTIVITIES | INCLUDING |
| PROCESS | AND/OR PATHWAYS | ASSAYS |
| Growth, | Root Growth | Robinson et al. (1999) |
| Differentiation | Initiation of root | Nature 397: 694-97 |
| and | hairs | |
| Development | | |
| Metabolisms | Iron sensing | Thomine et al. (2000) |
| | Iron uptake and transport | PNAS USA 97: 4991-6 |
| | decreased iron | Thomine et al. (2000) |
| | transport | PNAS USA 97: 4991-6 |
| | | Zhu (1999) Plant |
| | phytoremediation | Physiol 119: 73-79 |
| Plant | Protection from oxidative | Deak (1999) Nature |
| Defenses | damage | Biotechnology 17: 192-6 |
| Signaling | Specific gene | Brand and Perrimon |
| | transcription gene | (1993) Development |
| | silencing | 118: 401-415 |

[1894] Other biological activities that can be modulated by the iron responsive genes and gene products are listed in the REFERENCE Table. Assays for detecting such biological activities are described in the Protein Domain table.

[1895] Iron responsive genes are characteristically differentially transcribed in response to fluctuating iron levels or concentrations, whether internal or external to an organism or cell. MA_diff table reports the changes in transcript levels of various iron responsive genes.

[1896] The microarray comparison consists of probes prepared from root RNA of A. thaliana (Columbia) seedlings grown under iron-sufficient conditions and seedlings grown under iron-deficient. The data from this experiment reveal a number of types genes and gene products. Profiles of these different iron responsive genes are shown in the Table below with examples of associated biological activities.

| | | | EXAMPLES OF |
|---|---|---|---|
| TRANSCRIPT | | PHYSIOLOGICAL | BIOCHEMICAL |
| LEVELS | TYPE OF GENES | CONSEQUENCES | ACTIVITY |
| Up regulated | responders to iron | Iron perception | Transporters |
| transcripts | application | Iron uptake and | Metabolic enzymes |
| | | transport | Change in cell |
| | | Iron metabolism | membrane structure |
| | | Synthesis of | and potential |
| | | secondary | Kinases and |
| | | metabolites | phosphatases |
| | | and/or proteins | Transcription |
| | | Modulation of | activators |
| | | iron response | Change in chromatin |
| | | transduction | structure and/or |
| | | pathways | localized DNA |
| | | Specific gene | topology |
| | | transcription | |
| | | initiation | |
| Down-regulated | responder to iron | Negative | Transcription factors |
| transcripts | repressors of iron state | regulation of iron | Change in protein |
| | of metabolism | pathways | structure by |
| | Genes with | Changes in | phosphorylation |
| | discontinued | pathways and | (kinases) or |
| | expression or | processes | dephosphoryaltion |
| | unsTable mRNA in | operating in cells | (phosphatases) |
| | presence of iron | Changes in other | Change in chromatin |
| | | metabolisms than | structure and/or |
| | | iron | DNA topology |
| | | | Stability of factors |
| | | | for protein synthesis |
| | | | and degradation |
| | | | Metabolic enzymes |

### Use of Promoters of Iron Responsive Genes

[1897] Promoters of Iron responsive genes are useful for transcription of any desired polynucleotide or plant or non-plant origin. Further, any desired sequence can be transcribed in a similar temporal, tissue, or environmentally specific patterns as the Iron responsive genes where the desired sequence is operably linked to a promoter of a Iron responsive gene. The protein product of such a polynucleotide is usually synthesized in the same cells, in response to the same stimuli as the protein product of the gene from which the promoter was derived. Such promoter are also useful to produce antisense mRNAs to down-regulate the product of proteins, or to produce sense mRNAs to down-regulate mRNAs via sense suppression.

[1898] III.E.15. Shade Responsive Genes, Gene Components and Products

[1899] Plants sense the ratio of Red (R):Far Red (FR) light in their environment and respond differently to particular ratios. A low R:FR ratio, for example, enhances cell elongation and favors flowering over leaf production. The changes in R:FR ratios mimic and cause the shading response effects in plants. The response of a plant to shade in the canopy structures of agricultural crop fields influences crop yields significantly. Therefore manipulation of genes regulating the shade avoidance responses can improve crop yields. While phytochromes mediate the shade avoidance response, the down-stream factors participating in this pathway are largely unknown. One potential downstream participant, ATHB-2, is a member of the HD-Zip class of transcription factors and shows a strong and rapid response to changes in the R:FR ratio. ATHB-2 overexpressors have a thinner root mass, smaller and fewer leaves and longer hypocotyls and petioles. This elongation arises from longer epidermal and cortical cells, and a decrease in secondary vascular tissues, paralleling the changes observed in wild-type seedlings grown under conditions simulating canopy shade. On the other hand, plants with reduced ATHB-2 expression have a thick root mass and many larger leaves and shorter hypocotyls and petioles. Here, the changes in the hypocotyl result from shorter epidermal and cortical cells and increased proliferation of vascular tissue. Interestingly, application of Auxin is able to reverse the root phenotypic consequences of high ATHB-2 levels, restoring the wild-type phenotype. Consequently, given that ATHB-2 is tightly regulated by phytochrome, these data suggest that ATHB-2 may link the Auxin and phytochrome pathways in the shade avoidance response pathway.

[1900] Changes in R:FR ratios promote changes in gene expression. Microarray technology allows monitoring of gene expression levels for thousands of genes in a single experiment. This is achieved by hybridizing labeled fluorescent cDNA pools to glass slides that contain spots of DNA (Schena et al. (1995) Science 270: 467-70). The US Arabidopsis Functional Genomics Consortium (AFGC) has recently made public the results from such microarray experiments conducted with AFGC chips containing about 10,000 non-redundant ESTs, selected from about 37,000 randomly sequenced ESTs generated from mRNA of different tissues and developmental stages.

[1901] The sequences of the ESTs showing at least two-fold increases or decreases in plants given 4 hours of FR rich light after growth in high R:FR light compared with the controls of plants grown in high R:FR light only, were identified, compared to the Ceres full length cDNA and genomic sequence databanks, and equivalent Ceres clones identified. The MA_diff table(s) report(s) the results of this analysis, indicating those Ceres clones which are up or down regulated over controls, thereby indicating the Ceres clones which are shade avoidance responsive genes.

[1902] Examples of far red light induced, shade avoidance responsive genes and gene products are shown in the Reference and Sequence Tables. These genes and/or products are responsible for effects on traits such as plant vigor and seed yield.

[1903] While far red light, shade avoidance responsive polynucleotides and gene products can act alone, combinations of these polynucleotides also affect growth and development. Useful combinations include different shade avoidance responsive polynucleotides and/or gene products that have similar transcription profiles or similar biological activities, and members of the same or similar biochemical pathways. In addition, the combination of a shade avoidance responsive polynucleotide and/or gene product with another environmentally responsive polynucleotides is also useful because of the interactions that exist between hormone-regulated pathways, stress and pathogen induced pathways, nutritional pathways, light induced pathways and development. Here, in addition to polynucleotides having similar transcription profiles and/or biological activities, useful combinations include polynucleotides that may have different transcription profiles but which participate in common or overlapping pathways.

[1904] Such far red light induced shade avoidance responsive genes and gene products can function to either increase or dampen the above phenotypes or activities either in response to changes in far red light or in the absence of far red light fluctuations. The MA_diff Table(s) reports the transcript levels of the experiment (see EXPT ID: Shade (relating to SMD 8130, SMD 7230)). For transcripts that had higher levels in the samples than the control, a “+” is shown. A “−” is shown for when transcript levels were reduced in root tips as compared to the control. For more experimental detail see the Example section below.

[1905] Shade genes are those sequences that showed differential expression as compared to controls, namely those sequences identified in the MA_diff tables with a “+” or “−” indication.

[1906] Shade Genes Identified by Cluster Analyses of Differential Expression

[1907] Shade Genes Identified by Correlation to Genes that are Differentially Expressed

[1908] As described above, the transcription profiles of genes that act together are well correlated. Applicants not only have identified the genes that are differentially expressed in the microarray experiments, but also have identified the genes that act in concert with them. The MA_clust table indicates groups of genes that have well correlated transcription profiles and therefore participate in the same pathway or network.

[1909] A pathway or network of Shade genes is any group in the MA_clust that comprises a cDNA ID that also appears in Expt ID Shade (relating to SMD 8130, SMD 7230) of the MA_diff table(s).

[1910] Shade Genes Identified by Correlation to Genes that Cause Physiological Consequences

[1911] Additionally, the differential expression data and the phenotypic observations can be merged to identify pathways or networks of Shade genes. A group in the MA_clust is considered a Shade pathway or network if the group comprises a cDNA ID that also appears in Knock-in or Knock-out tables that causes one or more of the phenotypes described in section above.

[1912] Shade Genes Identified by Amino Acid Sequence Similarity

[1913] Shade genes from other plant species typically encode polypeptides that share amino acid similarity to the sequences encoded by corn and Arabidopsis Shade genes. Groups of Shade genes are identified in the Protein Group table. In this table, any protein group that comprises a peptide ID that corresponds to a cDNA ID member of a Shade pathway or network is a group of proteins that also exhibits Shade functions/utilities.

[1914] Further, promoters of shade avoidance responsive genes, as described in the Reference tables, for example, are useful to modulate transcription that is induced by shade avoidance or any of the following phenotypes or biological activities below. Further, any desired sequence can be transcribed in similar temporal, tissue, or environmentally specific patterns as the shade avoidance responsive genes when the desired sequence is operably linked to a promoter of a circadian (clock) responsive gene.

[1915] III.E.15.a. Use of Far Red Responsive, Shade Avoidance Response Genes to Modulate Phenotypes

[1916] High FR:R, shade avoidance responsive genes and gene products can be used to alter or modulate one or more phenotypes including growth; roots; elongation; lateral root formation; stems; elongation; expansion; leaves; expansion; carotenoid composition; development; cell; photosynthetic apparatus; efficiency; flower; flowering time; fruit; seed; dormancy; control rate and timing of germination; prolongs seed storage and viability; inhibition of hydrolytic enzyme synthesis; seed and fruit yield; senescence; abscission; leaf fall; flower longevity; differentiation; vascularization; and shade (avoidance) responses in plant architecture.

[1917] To regulate any of the phenotype(s) above, activities of one or more of the High FR:R light, shade avoidance responsive genes or gene products can be modulated and the plants tested by screening for the desired trait. Specifically, the gene, mRNA levels, or protein levels can be altered in a plant utilizing the procedures described herein and the phenotypes can be assayed. As an example, a plant can be transformed according to Bechtold and Pelletier (1998, Methods. Mol. Biol. 82:259-266) and/or screened for variants as in Winkler et al. (1998) Plant Physiol 118: 743-50 and visually inspected for the desired phenotype or metabolically and/or functionally assayed according to Carabelli et al. (1996, PNAS USA 93: 3530-3535), Aguirrezabal and Tardieu (1996, J Exp Bot 47: 411-20), Heyer et al. (1995, Plant Physiol 109: 53-61), Garcia-Plazaola et al. (1997, J Exp Bot 48: 1667-74), Schwanz et al. (1996, J Exp Bot 47L 1941-50), Koehne et al. (1999, Biochem Biophys Acta 1412:94-107), Melis (1984, J Cell Biochem 24: 271-85), Steindeler et al. (1999, Development 126: 4235-45), Cruz (1997, J Exp Bot 48: 15-24), Stephanou and Manetas (1997, J Exp Bot 48: 1977-85), Grammatikopoulos et al (1999, J Exp Bot 50:517-21), Krause et al. (1999, Plant Physiol 121: 1349-58), Aukerman et al. (1997, Plant Cell 9: 1317-26), Wagner et al. (1997, Plant Cell 9: 731-43), Weinig (2000) Evolution Int J Org Evolution 54: 124-26), Cocburn et al. (1996, J Exp Bot 47: 647-53), Devlin et al. (1999, Plant Physiol 119: 909-15), Devlin et al. (1998, Plant Cell 10: 1479-87), Finlayson et al. (1998, Plant Physiol 116: 17-25), Morelli and Ruberti (2000, Plant Physiol 122: 621-26), Aphalo et al. (1999, J Exp Bot 50: 1629-34), Sims et al. (1999, J Exp Bot 50:50:645-53) and Ballare (1999, Trends Plant Sci 4: 97-102).

[1918] III.E.15.b. Use of Far Red Light, Shade Avoidance Responsive Genes to Modulate Biochemical Activities

[1919] The activities of one or more of the far red light, shade avoidance responsive genes can be modulated to change biochemical or metabolic activities and/or pathways such as those noted below. Such biological activities can be measured according to the citations included in the Table below:

| | BIOCHEMICAL OR | |
|---|---|---|
| | METABOLIC | |
| | ACTIVITIES AND/OR | CITATIONS INCLUDING |
| PROCESS | PATHWAYS | ASSAYS |
| Cell Growth and | Cell Elongation | Carabelli et al. (1996) PNAS USA |
| Differentiation | | 93: 3530-35 |
| | Leaf Expansion | Heyer et al. (1995) Plant Physiol |
| | | 109: 53-61 |
| Photosynthesis | Development of | Jagtap et al. (1998) J Exp Bot 49: |
| | Photosynthetic Apparatus | 1715-21 |
| | | Melis (1984) J Cell Biochem 24: |
| | | 271-285 |
| | | McCain (1995) Biophys J 69: 1105-10 |
| | Carotenoid Composition | Garcia-Plazaola et al (1997) J Exp |
| | | Bot 48: 1667-74 |
| Carbon/Nitrogen | Carbon and Nitrogen | Cruz (1997) J Exp Bot 48: 15-24 |
| Metabolism | Assimilation | |
| Far red light, shade | | Newton AL, Sharpe BK, Kwan A, |
| avoidance response | | Mackay JP, Crossley M. J Biol |
| binding by transcription | | Chem. 2000May19; 275(20): 15128-34; |
| factors | | Lopez Ribera I, Ruiz-Avila L, |
| | | Puigdomenech P. Biochem Biophys |
| | | Res Commun. 1997 Jul |
| | | 18; 236(2): 510-6; de Pater S, Greco |
| | | V, Pham K, Memelink J, Kijne J. |
| | | Nucleic Acids Res. 1996 Dec 1; |
| | | 24(23): 4624-31. |
| Signaling | UV Light Perception | Stephanou and Manetas (1997) J |
| | | Exp Bot 48: 1977-85 |
| | Far-red/Red Light | Aukerman et al. (1997) Plant Cell |
| | Perception | 9: 1317-26 |
| | | Wagner et al. (1997) Plant Cell 9: |
| | | 731-43 |
| | Interaction of “Shade | Finlayson et al. (1998) Plant |
| | Factor” with Ethylene | Physiol 116: 17-25 |
| | Production/Transduction | |
| | Interaction of “Shade | Reed et al. (1998) Plant Physiol |
| | Factor” with Auxin | 118: 1369-78 |
| | Production/Transduction | |
| | Plant to Plant signalling | Sims et al. (1999) J Exp Bot 50: |
| | | 645-53 |

[1920] Other biological activities that can be modulated by shade avoidance response genes and their products are listed in the REF TABLES. Assays for detecting such biological activities are described in the Protein Domain table.

[1921] High FR:R, shade avoidance responsive genes are differentially transcribed in response to high FR:R ratios. The microarray comparison to reveal such genes consisted of probes prepared from RNA isolated from the aerial tissues of A. thaliana (Columbia) two-week old seedlings grown in high R:FR ratios compared to seedlings grown in high R:FR ratios followed by 4 hours of FR-rich light treatment. The data from this experiment reveal a number of types genes and gene products and examples of the classes of genes are given in the Table below.

| | | | EXAMPLES OF |
|---|---|---|---|
| TRANSCRIPT | | PHYSIOLOGICAL | BIOCHEMICAL |
| LEVELS | TYPE OF GENES | CONSEQUENCES | ACTIVITY |
| Up regulated | Responders to high | Far red light | Transporters |
| transcripts | FR:R light ratios | perception | Metabolic enzymes |
| | Genes induced by | Metabolism | Change in cell |
| | high FR:R light ratio | affected by far red | membrane structure |
| | | light | and potential |
| | | Synthesis of | Kinases and |
| | | secondary | phosphatases |
| | | metabolites and/or | Transcription |
| | | proteins | activators |
| | | Modulation of | Change in chromatin |
| | | high FR:R light | structure and/or |
| | | ratio transduction | localized DNA |
| | | pathways | topology |
| | | Specific gene | Leaf production |
| | | transcription | factors |
| | | initiation | |
| Down-regulated | Responders to high | Changes in | Transcription factors |
| transcripts | FR:R light ratios | pathways and | Change in protein |
| | Genes repressed by | processes | structure by |
| | high FR:R light ratio | operating in cells | phosphorylation |
| | Genes with | Changes in | (kinases) or |
| | discontinued | metabolisms other | dephosphorylation |
| | expression or | than far red | (phosphatases) |
| | unsTable mRNA | stimulated | Change in chromatin |
| | during high FR:R | pathways | structure and/or DNA |
| | ratio light | | topology |
| | | | Stability of factors for |
| | | | protein synthesis and |
| | | | degradation |
| | | | Metabolic enzymes |
| | | | Cell elongation factors |
| | | | Flowering promotion |
| | | | factors |

### Use of Promoters of Shade Avoidance Genes

[1922] Promoters of Shade Avoidance genes are useful for transcription of any desired polynucleotide or plant or non-plant origin. Further, any desired sequence can be transcribed in a similar temporal, tissue, or environmentally specific patterns as the Shade Avoidance genes where the desired sequence is operably linked to a promoter of a Shade Avoidance gene. The protein product of such a polynucleotide is usually synthesized in the same cells, in response to the same stimuli as the protein product of the gene from which the promoter was derived. Such promoter are also useful to produce antisense mRNAs to down-regulate the product of proteins, or to produce sense mRNAs to down-regulate mRNAs via sense suppression.

[1923] III.E.16. Sulfur Responsive Genes, Gene Components and Products

[1924] Sulfur is one of the important macronutrients required by plants. It is taken up from the soil solution by roots as in the form of sulfate anion which higher plants are dependent on to fulfill their nutritional sulfur requirement. After uptake from the soil, sulfate is either accumulated and stored in vacuole or it is assimilated into various organic compounds, e.g. cysteine, glutathione, methionine, etc. Thus, plants also serve as nutritional sulfur sources for animals. Sulfur can be assimilated in one of two ways: it is either incorporated as sulfate in a reaction called sulfation, or it is first reduced to sulfide, the substrate for cysteine synthesis. In plants, majority of sulfur is assimilated in reduced form.

[1925] Sulfur comprises a small by vital fraction of the atoms in many protein molecules. As disulfide bridges, the sulfur atoms aid in stabilizing the folded proteins, such cysteine residues. Cys is the first sulfur-containing amino acids, which in proteins form disulfide bonds that may affect the tertiary structures and enzyme activities. This redox balance is mediated by the disulfide/thiol interchange of thioredoxin or glutaredoxin using NADPH as an electron donor. Sulfur can also become sulfhydryl (SH) groups participating in the active sites of some enzymes and some enzymes require the aid of small molecules that contain sulfur. In addition, the machinery of photosynthesis includes some sulfur-containing compounds, such as ferrodoxin. Thus, sulfate assimilation plays important roles not only in the sulfur nutrition but also in the ubiquitous process that may regulate the biochemical reactions of various metabolic pathways.

[1926] Deficiency of sulfur leads to a marked chlorosis in younger leaves, which may become white in color. Other symptoms of sulfur deficiency also include weak stems and reduced growth. Adding sulfur fertilizer to plants can increase root development and a deeper green color of the leaves in sulfur-deficient plants. However, Sulfur is generally sufficient in soils for two reasons: it is a contaminant in potassium and other fertilizers and a product of industrial combustion. Sulfur limitation in plants is thus likely due to the limitation of the uptake and distribution of sulfate in plants. Seven cell type specific sulfate transporter genes have been isolated from Arabidopsis. In sulfate-starved plants, expression of the high-affinity transporter, AtST1-1, is induced in root epidermis and cortex for acquisition of sulfur. The low affinity transporter, AtST2-1 (AST68), accumulates in the root vascular tissue by sulfate starvation for root-to-shoot transport of sulfate. These studies have shown that the whole-plant process of sulfate transport is coordinately regulated by the expression of these 2 sulfate transporter genes under sulfur limited conditions. Recent studies have proposed that feeding of O-acetylserine, GSH and selenate may regulate the expression of AtST1-1 and AtST2-1 (AST68) in roots either positively or negatively. However, regulatory proteins that may directly control the expression of these genes have not been identified yet.

[1927] It has been established that there are regulatory interactions between assimilatory sulfate and nitrate reduction in plants. The two assimilatory pathways are very similar and well coordinated; deficiency for one element was shown to repress the other pathway. The coordination between them should be taken into consideration when one tries to alter one of pathways.

[1928] Microarray technology allows monitoring of gene expression levels for thousands of genes in a single experiment. This is achieved by simultaneously hybridizing two differentially labeled fluorescent cDNA pools to glass slides that contain spots of DNA (Schena et al. (1995) Science 270: 467-70). The Arabidopsis Functional Genomics Consortium (AFGC) has recently made public the results from such microarray experiments conducted with AFGC chips containing 10,000 non-redundant ESTs, selected from 37,000 randomly sequenced ESTs generated from mRNA of different tissues and developmental stages.

[1929] The sequences of the ESTs showing at least two-fold increases or decreases over the controls were identified, compared to the Ceres full-length cDNA and genomic sequence databanks, and identical Ceres clones identified. MA_diff table reports the results of this analysis, indicating those Ceres clones which are up or down regulated over controls, thereby indicating the Ceres clones which are sulfur response responsive genes.

[1930] The MA_diff Table(s) reports the transcript levels of the experiment (see EXPT ID: Sulfur (relating to SMD 8034, SMD 8035)). For transcripts that had higher levels in the samples than the control, a “+” is shown. A “−” is shown for when transcript levels were reduced in root tips as compared to the control. For more experimental detail see the Example section below.

[1931] Sulfur genes are those sequences that showed differential expression as compared to controls, namely those sequences identified in the MA_diff tables with a “+” or “−” indication.

[1932] Sulfur Genes Identified by Cluster Analyses of Differential Expression

[1933] Sulfur Genes Identified by Correlation to Genes that are Differentially Expressed

[1934] As described above, the transcription profiles of genes that act together are well correlated. Applicants not only have identified the genes that are differentially expressed in the microarray experiments, but also have identified the genes that act in concert with them. The MA_clust table indicates groups of genes that have well correlated transcription profiles and therefore participate in the same pathway or network.

[1935] A pathway or network of Sulfur genes is any group in the MA_clust that comprises a cDNA ID that also appears in Expt ID Sulfur (relating to SMD 8034, SMD 8035) of the MA_diff table(s).

[1936] Sulfur Genes Identified by Correlation to Genes that Cause Physiological Consequences

[1937] Additionally, the differential expression data and the phenotypic observations can be merged to identify pathways or networks of Sulfur genes. A group in the MA_clust is considered a Sulfur pathway or network if the group comprises a cDNA ID that also appears in Knock-in or Knock-out tables that causes one or more of the phenotypes described in section above.

[1938] Sulfur Genes Identified by Amino Acid Sequence Similarity

[1939] Sulfur genes from other plant species typically encode polypeptides that share amino acid similarity to the sequences encoded by corn and Arabidopsis Sulfur genes. Groups of Sulfur genes are identified in the Protein Group table. In this table, any protein group that comprises a peptide ID that corresponds to a cDNA ID member of a Sulfur pathway or network is a group of proteins that also exhibits Sulfur functions/utilities.

[1940] III.E.16.a. Use of Sulfur Responsive Genes to Modulate Phenotypes

[1941] Sulfur responsive genes and gene products are useful to or modulate one or more phenotypes including growth; roots; stems; leaves; development; chloroplasts and mitochondria; fruit development; seed development; seed storage proteins; senescence; differentiation; plastid/chloroplast and mitochondria differentiation; protection against oxidative damage; regulation of enzymes via redox control by thiol groups; metabolic detoxification; photosynthesis; and carbon dioxide fixation.

[1942] To improve any of the phenotype(s) above, activities of one or more of the sulfur responsive genes or gene products can be modulated and tested by screening for the desired trait. Specifically, the gene, mRNA levels, or protein levels can be altered in a plant utilizing the procedures described herein and the phenotypes can be assayed. As an example, a plant can be transformed according to Bechtold and Pelletier (1998, Methods. Mol. Biol. 82:259-266) and visually inspected for the desired phenotype or metabolically and/or functionally assayed according to Saito et al. (1994, Plant Physiol. 106: 887-95), Takahashi et al (1997, Proc. Natl. Acad. Sci. USA 94: 11102-07) and Koprivova et al. (2000, Plant Physiol. 122: 737-46).

[1943] III.E. 16.b. Use of Sulfur-Responsive Genes, Gene Components and Products to Modulate Biochemical Activities

[1944] The activities of one or more of the sulfur responsive genes can be modulated to change biochemical or metabolic activities and/or pathways such as those noted below. Such biological activities can be measured according to the citations included in the Table below:

| | BIOCHEMICAL OR | |
|---|---|---|
| | METABOLIC ACTIVITIES | CITATIONS INCLUDING |
| PROCESS | AND/OR PATHWAYS | ASSAYS |
| Growth, | Root | Klein and Klein (1988) Mineral |
| Differentiation and | Leaf | Nutrition, In CM Wilson and J |
| Development | Stem | Gregory, eds Fundamentals of |
| | Chloroplast/Mitochondria | Plant Science. Harper and Row |
| | development/differentiation | Publishers, Inc., NY, p163 |
| | | Rost et al. (1984) The Absorption |
| | | and Transport System, In R Bem, |
| | | ed, Botany-A Brief Introduction to |
| | | Plant Biology. John Wiley and |
| | | Sons, NY, p96. |
| | | Huluigue et al. (2000) Biochem |
| | | Biophys Res Commun 271: 380-5 |
| | | Kapazoglou et al. (2000) Eur J |
| | | Biochem 267: 352-60 |
| | Seed storage protein | Kim et al. (1999) 209: 282-9 |
| | synthesis | |
| Metabolisms | Sulfate uptake and transport | Takahashi et al. (1997) Proc Natl |
| | | Acad Sci USA 94: 11102-07 |
| | Cysteine Biosynthesis | Saito et al. (1992) Proc Natl Acad |
| | | Sci USA 89: 8078-82 |
| | | Hesse et al. (1999) Amino Acids |
| | | 16: 113-31 |
| | Methionine biosynthesis | Bourgis et al. (1999) Plant Cell 11: |
| | | 1485-98 |
| | Carbon dioxide fixation in | Buchana (1991) Arch Biochem |
| | photosynthesis | Biophys 288: 1-9 |
| | Thioredoxin reduction | Leustek and Saito (1999) Plant |
| | | Phyiol 120: 637-43 |
| | | Mamedova et al. (1999) FEBS |
| | | Lett 462: 421-4 |
| | Nitrogen metabolism | Koprivova et al. (2000) Plant |
| | | Physiol. 122: 737-46 |
| | | Yamaguchi et al. (1999) Biosci |
| | | Biotechnol Biochem 63: 762-6 |
| Plant Defenses | Reduction of oxidative | May et al. (1998) J Expt Bio 49: |
| | stress - oxygen metabolism | 649-67 |
| | and reactive oxygen species | Kreuz et al. (1996) Plant Physiol |
| | Detoxification of toxins, | 111: 349-53 |
| | xenobiotics and heavy | Zhao et al. (1998) Plant Cell 10: |
| | metals | 359-70 |
| | Defense against pathogens | Kyung and Fleming (1997) J Food |
| | or microbes | Prot 60: 67-71 |
| | Disease prevention by | Fahey et al. (1997) Proc Natl Acad |
| | secondary sulfur-containing | Sci USA 94: 10367-72 |
| | compounds | |
| | Activation of kinases and | Davis et al. (1999) Plant Cell 11: |
| | phosphatases | 1179-90 |

[1945] Other biological activities that can be modulated by the sulfur responsive genes and gene products are listed in the REFERENCE Table. Assays for detecting such biological activities are described in the Protein Domain table.

[1946] Sulfur responsive genes are characteristically differentially transcribed in response to fluctuating sulfur levels or concentrations, whether internal or external to an organism or cell. MA_diff table reports the changes in transcript levels of various sulfur responsive genes.

[1947] Profiles of these different sulfur responsive genes are shown in the Table below with examples of associated biological activities.

| | | | EXAMPLES OF |
|---|---|---|---|
| TRANSCRIPT | | PHYSIOLOGICAL | BIOCHEMICAL |
| LEVELS | TYPE OF GENES | CONSEQUENCES | ACTIVITY |
| Up regulated | Responders to sulfur | Sulfur perception | Transporters |
| transcripts | Application | Sulfur uptake and | Metabolic enzymes |
| | | transport | Change in cell |
| | | Sulfur metabolism | membrane structure |
| | | Synthesis of | and potential |
| | | secondary | Kinases and |
| | | metabolites and/or | phosphatases |
| | | proteins | Transcription |
| | | Modulation of | activators |
| | | sulfur response | Change in chromatin |
| | | transduction | structure and/or |
| | | pathways | localized DNA |
| | | Specific gene | topology |
| | | transcription | Redox control |
| | | initiation | |
| Down-regulated | responder to sulfur | Negative | Transcription factors |
| transcripts | repressors of sulfur | regulation of | Change in protein |
| | state of metabolism | sulfur pathways | structure by |
| | Genes with | Changes in | phosphorylation |
| | discontinued | pathways and | (kinases) or |
| | expression | processes | dephosphoryaltion |
| | or unsTable mRNA in | operating in cells | (phosphatases) |
| | presence of sulfur | Changes in other | Change in chromatin |
| | | metabolisms than | structure and/or DNA |
| | | sulfur | topology |
| | | | Stability of factors for |
| | | | protein synthesis and |
| | | | degradation |
| | | | Metabolic enzymes |

### Use of Promoters of Sulfur Responsive Genes

[1948] Promoters of Sulfur responsive genes are useful for transcription of any desired polynucleotide or plant or non-plant origin. Further, any desired sequence can be transcribed in a similar temporal, tissue, or environmentally specific patterns as the Sulfur responsive genes where the desired sequence is operably linked to a promoter of a Sulfur responsive gene. The protein product of such a polynucleotide is usually synthesized in the same cells, in response to the same stimuli as the protein product of the gene from which the promoter was derived. Such promoter are also useful to produce antisense mRNAs to down-regulate the product of proteins, or to produce sense mRNAs to down-regulate mRNAs via sense suppression.

[1949] III.E.17. Zinc Responsive Genes, Gene Components and Products

[1950] Phytoremediation of soils contaminated with toxic levels of heavy metals requires the understanding of plant metal transport and tolerance. The numerous Arabidopsis thaliana studies have given scientists the potential for dissection and elucidation of plant micronutrient/heavy metal uptake and accumulation pathways. It has been shown altered regulation of ZNT1, a Zn/Cd transporter, contributes to high Zn uptake. Isolation and characterization of Zn/Cd hyperaccumulation genes may allow expression in higher biomass plant species for efficient contaminated soil clean up. Identification of additional Zn transport, tolerance and nutrition-related genes involved in heavy metal accumulation will enable manipulation of increased uptake (for phytoremediation) as well as limitation of uptake or leak pathways that contribute to toxicity in crop plants. Additionally, Zn-binding ligands involved in Zn homeostasis or tolerance may be identified, as well as factors affecting the activity or expression of Zn binding transcription factors. Gene products acting in concert to effect Zn uptake, which would not have been identified in complementation experiments, including multimeric transporter proteins, could also be identified.

[1951] Microarray technology allows monitoring of gene expression levels for thousands of genes in a single experiment. This is achieved by simultaneously hybridizing two differentially labeled fluorescent cDNA pools to glass slides that contain spots of DNA (Schena et al. (1995) Science 270: 467-70). The Arabidopsis Functional Genomics Consortium (AFGC) has recently made public the results from such microarray experiments conducted with AFGC chips containing 10,000 non-redundant ESTs, selected from 37,000 randomly sequenced ESTs generated from mRNA of different tissues and developmental stages.

[1952] The sequences of the ESTs showing at least two-fold increases or decreases over the controls were identified, compared to the Ceres full-length cDNA and genomic sequence databanks, and identical Ceres clones identified. The Zn response information was then used in conjunction with the existing annotation to attribute biological function or utility to the full-length cDNA and corresponding genomic sequence.

[1953] The MA_diff Table(s) reports the transcript levels of the experiment (see EXPT ID: Zinc (relating to SMD 7310, SMD 7311)). For transcripts that had higher levels in the samples than the control, a “+” is shown. A “−” is shown for when transcript levels were reduced in root tips as compared to the control. For more experimental detail see the Example section below.

[1954] Zinc genes are those sequences that showed differential expression as compared to controls, namely those sequences identified in the MA_diff tables with a “+” or “−” indication.

[1955] Zinc Genes Identified by Cluster Analyses of Differential Expression

[1956] Zinc Genes Identified by Correlation to Genes that are Differentially Expressed

[1957] As described above, the transcription profiles of genes that act together are well correlated. Applicants not only have identified the genes that are differentially expressed in the microarray experiments, but also have identified the genes that act in concert with them. The MA_clust table indicates groups of genes that have well correlated transcription profiles and therefore participate in the same pathway or network.

[1958] A pathway or network of Zinc genes is any group in the MA_clust that comprises a cDNA ID that also appears in Expt ID Zinc (relating to SMD 7310, SMD 7311) of the MA_diff table(s).

[1959] Zinc Genes Identified by Correlation to Genes that Cause Physiological Consequences

[1960] Additionally, the differential expression data and the phenotypic observations can be merged to identify pathways or networks of Zinc genes. A group in the MA_clust is considered a Zinc pathway or network if the group comprises a cDNA ID that also appears in Knock-in or Knock-out tables that causes one or more of the phenotypes described in section above.

[1961] Zinc Genes Identified by Amino Acid Sequence Similarity

[1962] Zinc genes from other plant species typically encode polypeptides that share amino acid similarity to the sequences encoded by corn and Arabidopsis Zinc genes. Groups of Zinc genes are identified in the Protein Group table. In this table, any protein group that comprises a peptide ID that corresponds to a cDNA ID member of a Zinc pathway or network is a group of proteins that also exhibits Zinc functions/utilities.

[1963] III.E.17.a. Use of Zn Transport, Tolerance and Nutrition-Related Genes to Modulate Phenotypes

[1964] Changes in zinc concentration in the surrounding environment or in contact with a plant results in modulation of many genes and gene products. Examples of such zinc responsive genes and gene products are shown in the Reference, Sequence tables, Protein Group, Protein Group Matrix, MA_diff, and MA_clust tables. These genes and/or products are responsible for effects on traits such as plant vigor and seed yield.

[1965] While zinc responsive polynucleotides and gene products can act alone, combinations of these polynucleotides also affect growth and development. Useful combinations include different zinc responsive polynucleotides and/or gene products that have similar transcription profiles or similar biological activities, and members of the same or similar biochemical pathways. In addition, the combination of a zinc responsive polynucleotide and/or gene product with another environmentally responsive polynucleotide is also useful because of the interactions that exist between hormone-regulated pathways, stress pathways, nutritional pathways and development. Here, in addition to polynucleotides having similar transcription profiles and/or biological activities, useful combinations include polynucleotides that may have different transcription profiles but which participate in a common pathway.

[1966] Such zinc responsive genes and gene products can function to either increase or dampen the above phenotypes or activities either
[1967] in response to changes in zinc concentration or
[1968] in the absence of zinc fluctuations.

[1969] Zn transport, tolerance and nutrition-related genes and gene products can be used to alter or modulate one or more phenotypes including Zn uptake; transport of Zn or other heavy metals into roots; epidermal/cortical uptake; Xylem loading; Zn compartmentation; Xylem unloading; Phloem loading; efflux from cells to apoplast; sequestration in vacuoles/subcellular compartments; Zn tolerance; chelation of Zn; transport of Zn; metabolic and transcriptional control; activity of Zn binding enzymes; and activity of Zn binding transcription factors.

[1970] To improve any of the phenotype(s) above, activities of one or more of the Zn transport, tolerance and nutrition-related genes or gene products can be modulated and the plants can be tested by screening for the desired trait. Specifically, the gene, mRNA levels, or protein levels can be altered in a plant utilizing the procedures described herein and the phenotypes can be assayed, for example, in accordance to Lasat M M, Pence N S, Garvin D F, Ebbs S D, Kochian L V. J Exp Bot. 2000 January; 51(342):71-9; Grotz N, Fox T, Connolly E, Park W, Guerinot M L, Eide D. Proc Natl Acad Sci USA. 1998 Jun. 9; 95(12):7220-4; Crowder M W, Maiti M K, Banovic L, Makaroff C A. FEBS Lett. 1997 Dec. 1; 418(3):351-4; Hart J J, Norvell W A, Welch R M, Sullivan L A, Kochian L V. Plant Physiol. 1998 September; 118(1):219-26.

[1971] III.E.17.b. Use of Zn Transport, Tolerance and Nutrition-Related Genes to Modulate Biochemical Activities

[1972] Alternatively, the activities of one or more of the zinc responsive genes can be modulated to change biochemical or metabolic activities and/or pathways such as those noted below. Such biological activities can be measured according to the citations included in the Table below:

| | BIOCHEMICAL OR | |
|---|---|---|
| | METABOLIC | |
| | ACTIVITIES AND/OR | CITATIONS INCLUDING |
| PROCESS | PATHWAYS | ASSAYS |
| Zn Uptake and | Zn Influx | Lasat MM, Pence NS, Garvin DF, |
| Assimilation | | Ebbs SD, Kochian LV. J Exp Bot. |
| | | 2000 January; 51(342): 71-9. |
| | Zn compartmentation | Hart JJ, Norvell WA, Welch RM, |
| | | Sullivan LA, Kochian LV. Plant |
| | | Physiol. 1998 September; 118(1): |
| | | 219-26. |
| Zn binding by metabolic | | Crowder MW, Maiti MK, Banovic L, |
| enzymes | | Makaroff CA. FEBS Lett. 1997 |
| | | Dec 1; 418(3): 351-4; Kenzior AL, |
| | | Folk WR. FEBS Lett. 1998 Dec |
| | | 4; 440(3): 425-9. |
| Zn binding by | | Newton AL, Sharpe BK, Kwan A, |
| transcription factors | | Mackay JP, Crossley M. J Biol |
| | | Chem. 2000 May 19; 275(20): |
| | | 15128-34; Lopez Ribera I, Ruiz-Avila |
| | | L, Puigdomenech P. Biochem Biophys |
| | | Res Commun. 1997 Jul |
| | | 18; 236(2): 510-6; de Pater S, Greco V, |
| | | Pham K, Memelink J, Kijne J. |
| | | Nucleic Acids Res. 1996 Dec |
| | | 1; 24(23): 4624-31. |
| Synthesis of proteins to | | Schafer HJ, Greiner S, |
| chelate Zn and other | | Rausch T, Haag-Kerwer A. |
| metals | | FEBS Lett. 1997 Mar |
| | | 10; 404(2-3): 216-20. |
| | | Rauser WE. Cell Biochem |
| | | Biophys. 1999; 31(1): 19-48. |
| Synthesis of metabolites | | Rauser WE. Cell Biochem Biophys. |
| to chelate Zn and other | | 1999; 31(1): 19-48. |
| metals | | |

[1973] Other biological activities that can be modulated by Zn transport, tolerance and nutrition-related genes and their products are listed in the Reference tables. Assays for detecting such biological activities are described in the Protein Domain table.

[1974] Zn transport, tolerance and nutrition-related genes are differentially transcribed in response to low Zn concentrations. The microarray comparison consists of probes prepared from root RNA of A. thaliana (Columbia) seedlings hydroponically grown in complete nutrient medium (control) and Zn deficient seedlings grown in −Zn nutrient medium (experimental). The data from this experiment reveal a number of types genes and gene products. MA_diff table reports the changes in transcript levels of various zinc responsive genes in entire seedlings at 1 and 6 hours after a plant was sprayed with a Hoagland's solution enriched with zinc as compared to seedlings sprayed with Hoagland's solution only.

[1975] The data from this time course can be used to identify a number of types of zinc responsive genes and gene products, including “early responding,” “high zinc responders,” “repressors of zinc deprivation pathways” and “zinc deprivation responders.” Profiles of these different zinc responsive genes are shown in the Table below with examples of associated biological activities.

| | | | EXAMPLES OF |
|---|---|---|---|
| TRANSCRIPT | | PHYSIOLOGICAL | BIOCHEMICAL |
| LEVELS | TYPE OF GENE | CONSequence | ACTIVITY |
| Upregulated | Early responders to | Zinc Perception | Transcription |
| transcripts (level at | Zinc | Zinc Uptake | Factors |
| 1 hour ≅ 6 hours) | | Modulation of Zinc | Transporters |
| (level at 1 hour > 6 | | Response Transduction | |
| hours) | | Pathways | |
| | | Specific Gene | |
| | | Transcription Initiation | |
| | Zinc Deprivation | Repression of Pathways | Inhibit Transport of |
| | Responders | to Optimize Zinc | Zinc |
| | | Response Pathways | Degradation |
| Level at 1 hour < 6 | Delayed Zinc | | Zinc Metabolic |
| hours | Responders | | Pathways |
| | Repressor of Zinc | Negative Regulation of | |
| | Deprivation Pathways | Zinc Pathways | |
| Down Regulated | Early responder | Negative Regulators of | Suppressing Zinc |
| transcripts (Level | repressors of Zinc | Zinc Utilization Pathways | Requiring processes |
| at 1 hour ≅ 6 | utilization Pathways | | |
| hours) | | | |
| (Level at 6 hours > | | | |
| 1 hour) | | | |
| Level at 1 hour > 6 | Genes with | Changes in pathways and | |
| hours | discontinued | processes operating I cells | |
| | expression or | | |
| | unsTable mRNA | | |
| | following Zinc uptake | | |

### Use of Promoters of Zinc Responsive Genes

[1976] Promoters of Zinc responsive genes are useful for transcription of any desired polynucleotide or plant or non-plant origin. Further, any desired sequence can be transcribed in a similar temporal, tissue, or environmentally specific patterns as the Zinc responsive genes where the desired sequence is operably linked to a promoter of a Zinc responsive gene. The protein product of such a polynucleotide is usually synthesized in the same cells, in response to the same stimuli as the protein product of the gene from which the promoter was derived. Such promoter are also useful to produce antisense mRNAs to down-regulate the product of proteins, or to produce sense mRNAs to down-regulate mRNAs via sense suppression.

### IV. Utilities of Particular Interest

[1977] Genes capable of modulating the phenotypes in the following table are useful produce the associated utilities in the table. Such genes can be identified by their cDNA ID number in the Knock-in and Knock-out Tables. That is, those genes noted in those Tables to have a phenotype as listed in the following column entitled “Phenotype Modulated by a Gene” are useful for the purpose identified in the corresponding position in the column entitled “Utilities”.

| Phenotype | | |
|---|---|---|
| Modulated by a | | |
| Gene | | Utilities |
| Leaf shape | Cordate | decrease wind opacity, |
| | Cup-shaped | decrease lodging (plant fall over), |
| | Curled | increase biomass by making larger or |
| | | different shaped leaves, |
| | Laceolate | improve the efficiency of mechanical |
| | | harvesting, |
| | Lobed | decrease transpiration for better drought |
| | | tolerance, |
| | Oval | changing leaf shape to collect and absorb |
| | | water, |
| | Ovate | modulation of canopy structure and shading |
| | | for altered irradiance close to the ground, |
| | Serrate | enhanced uptake of pesticides (herbicides, |
| | | fungicides, etc), |
| | Trident | creation of ornamental leaf shapes, |
| | Undulate | increase resistance to pathogens by |
| | | decreasing amount of water that collects on |
| | | leaves, |
| | Vertically Oblong | change proporation of cell types in the |
| | | leaves for enhanced photosynthesis, |
| | | decreased transpiration, and enhanced |
| | Other Shapes | accumulation of desirable compounds |
| | | including secondary metabolites in |
| | | specialized cells, |
| | | decrease insect feeding, |
| | Long petioles | decrease wind opacity, |
| | Short petioles | decrease lodging (plant fall over), |
| | | increase biomass by better positioning of |
| | | the leaf blade, |
| | | decrease insect feeding, |
| | | decrease transpiration for better drought |
| | | tolerance, |
| | | position leaves most effectively for |
| | | photosynthetic efficiency |
| | Fused | ornamental applications to make distinctive |
| | | plants, |
| Reduced fertility | Short siliques | increase or decrease the number of seeds in |
| | | a fruit, |
| | | increasing fruit size, |
| | | modulating fruit shape to better fit |
| | | harvesting or packaging requirements, |
| | | useful for controlling dehisence and seed |
| | | scatter |
| | Reduced fertility | useful in hybrid breeding programs, |
| | Sterility | increasing fruit size, |
| | | production of seedless fruit, |
| | | useful as targets for gametocides, |
| | | modulating fruit shape to better fit |
| | | harvesting or packaging requirements, |
| | | useful for controlling dehisence and seed |
| | | scatter |
| | Flower size | useful for edible flowers |
| | | useful for flower derived products such as |
| | | fragrances |
| | | useful for modulating seed size and number |
| | | in combination with seed-specific genes |
| | | value in the ornamental industry |
| Stature | Large | increasing or decreasing plant biomass, |
| | Small | optimizing plant stature to increase yield |
| | | under various diverse environmental |
| | | conditions, e.g., when water or nutrients |
| | | are limiting, |
| | Dwarfs | decreasing lodging, |
| | | increasing fruit number and size, |
| | | controlling shading and canopy effects |
| Meristems | | Change plant architecture, |
| | | increase or decrease number of leaves as |
| | | well as change the types of leaves to |
| | | increase biomass, |
| | | improve photosynthetic efficiency, |
| | | create new varieties of ornamental plants |
| | | with enhanced leaf design, |
| | | preventing flowering to opimize vegetative |
| | | growth, |
| | | control of apical dominace, |
| | | increase or decrease flowering time to fit |
| | | season, water or fertilizer schedules, |
| | | change arrangement of leaves on the stem |
| | | (phyllotaxy) to optimize plant density, |
| | | decrease insect feeding, |
| | | or decrease pathogen infection, |
| | | increase number of trichome/glandular |
| | | trichome producing leaves |
| | | targets for herbicides, |
| | | generate ectopic meristems and ectopic |
| | | growth of vegetative and floral tissues and |
| | | seeds and fruits |
| Stem | Strong | modify lignin content/composition for |
| | | creation of harder woods or reduce |
| | | difficulty/costs in pulping for |
| | Weak | paper production or increase |
| | | digestibility of forage crops, |
| | | decrease lodging, |
| | | modify cell wall polysaccharides in stems |
| | | and fruits for improved texture and |
| | | nutrition. |
| | | increase biomass |
| | Late/Early Bolting | Break the need for long vernalization of |
| | | vernalization-dependent crops, e.g., winter |
| | | wheat, thereby increasing yield |
| | | decrease or increase generaton time |
| | | increase biomass |
| Lethals | Embryo-lethal | produce seedless fruit, |
| | | use as herbicide targets |
| | Embryo-defective | produce seedless fruit, |
| | | use as herbicide targets |
| | Seedling | use as herbicide targets, |
| | | useful for metabolic engineering, |
| | Pigment-lethals | use as herbicide targets, |
| | | increase photosynthetic efficiency |
| Pigment | Dark Green | Increase nutritional value, |
| | | enhanced photosynthesis and carbon |
| | | dioxide combustion and therefore increase |
| | | plant vigor and biomass, |
| | | enhanced photosynthetic efficiency and |
| | | therefore increase plant vigor and biomass, |
| | | prolong vegetative development, |
| | | enhanced protection against pathogens, |
| | YGV1 | Useful as targets for herbicides, |
| | | increase photosynthetic efficiency and |
| | | therefore increase plant vigor and biomass, |
| | YGV2 | Useful as targets for herbicides, |
| | | control of change from embryonic to adult |
| | | organs, |
| | | increase metabolic efficiency, |
| | | increase photosynthetic efficiency and |
| | | therefore increased plant vigor and biomass, |
| | YGV3 | Useful as targets for herbicides, |
| | | nitrogen sensing/uptake/usage, |
| | | increase metabolic efficiency and therefore |
| | | increased plant vigor and biomass, |
| | Interveinal chlorosis | to increase photosynthetic efficiency and |
| | | therefore increase plant vigor and biomass |
| | | to increase or decrease nitrogen transport |
| | | and therefore increase plant vigor and |
| | | biomass |
| | | use as herbicide targets |
| | | increase metabolic efficiency, |
| Roots | Short (primary root) | to access water from rainfall, |
| | | to access rhizobia spray application, for |
| | | anaerobic soils, |
| | | useful to facilitate harvest of root crops, |
| | Thick (primary root) | useful for increasing biomass of root crops, |
| | | for preventing plants dislodging during |
| | | picking and harvesting, |
| | | as root grafts, for animal feeds |
| | Branching (primary root) | modulation allows betters access to water, |
| | | minerals, fertilizers, rhizobia prevent soil |
| | | erosion, s |
| | | increasing root biomass |
| | | decrease root lodging, |
| | Long (lateral roots) | modulation allows improved access to |
| | | water, nutrients, fertilizer, rhizobia, prevent |
| | | soil erosion |
| | | increase root biomass |
| | | decrease root lodging |
| | | modulation allows control on the depth of |
| | | root growth in soil to access water and |
| | | nutriennts |
| | | modulation allows hormonal control of root |
| | | growth and development (size) |
| | Agravitropic | modulation allows control on the depth of |
| | | root growth in soil |
| | Curling (primary root) | modulation allows hormonal control of root |
| | | growth and development (size) |
| | | useful in anaerobic soils in allowing roots |
| | | to stay close to surface |
| | | harvesting of root crops |
| | Poor germination | |
| Trichome | Reduced Number | Genes useful for decreasing transpiration, |
| | Glabrous | increased production of glandular trichomes |
| | | for oil or other secreted chemicals of value, |
| | Increased Number | use as deterrent for insect herbivory and |
| | | ovipostion |
| | | modulation will increase resistance to UV |
| | | light, |
| Wax mutants | | decrease insect herbivory and oviposition, |
| | | compostion changes for the cosmetics |
| | | industry, |
| | | decrease transpiration, |
| | | provide pathogen resistance, |
| | | UV protection, |
| | | modulation of leaf runoff properties and |
| | | improved access for herbicides and |
| | | fertilizers |
| Cotyledons | | modulation of seeds structure in legumes, |
| | | increase nutritional value, |
| | | improve seedling competion under field |
| | | conditions, |
| Seeds | Transparent testa | genes useful for metabolic engineering |
| | | anthocyanin and flavonoid pathways |
| | Light | improved nutritional content |
| | Dark | |
| | | decrease petal abscission |
| Flowers | Other | decrease pod shattering |
| Hypocotysl | Long | to improve germination rates |
| | | to improve plant survivability |
| | Short | to improve germination rates |
| | | to improve plant survivability |

### V. Enhanced Foods

[1978] Animals require external supplies of amino acids that they cannot synthesize themselves. Also, some amino acids are required in larger quantities. The nutritional values of plants for animals and humans can thus be modified by regulating the amounts of the constituent amino acids that occur as free amino acids or in proteins. For instance, higher levels of lysine and/or methionine would enhance the nutritional value of corn seed. Applicants herein provide several methods for modulating the amino acid content:
[1979] (1) expressing a naturally occurring protein that has a high percentage of the desired amino acid(s);
[1980] (2) expressing a modified or synthetic coding sequence that has an enhanced percentage of the desired amino acids; or
[1981] (3) expressing the protein(s) that are capable of synthesizing more of the desired amino acids.
   A specific example is expressing proteins with enhanced, for example, methionine content, preferentially in a corn or cereal seed used for animal nutrition or in the parts of plants used for nutritional purposes.

[1982] A protein is considered to have a high percentage of an amino acid if the amount of the desired amino acid is at least 1% of the total number of residues in a protein; more preferably 2% or greater. Amino acids of particular interest are tryptophan, lysine, methionine, phenylalanine, threonine leucine, valine, and isoleucine. Examples of naturally occurring proteins with a high percentage of any one of the amino acid of particular interest are listed in the Enhanced Amino Acid Table.

[1983] The sequence(s) encoding the selected protein(s), are operably linked to a promoter and other regulatory sequences and transformed into a plant as described below. The promoter is chosen optimally for promoting the desired level of expression of the protein in the selected organ e.g. a promoter highly functional in seeds. Modifications may be made to the sequence encoding the protein to ensure protein transport into, for example, organelles or storage bodies or its accumulation in the organ. Such modifications may include addition of signal sequences at or near the N terminus and amino acid residues to modify protein stability or appropriate glycosylation. Other modifications may be made to the transcribed nucleic acid sequence to enhance the stability or translatability of the mRNA, in order to ensure accumulation of more of the desired protein. Suitable versions of the gene construct and transgenic plants are selected on the basis of, for example, the improved amino acid content and nutritional value measured by standard biochemical tests and animal feeding trials.

### VI. Use of Novel Genes to Facilitate Exploitation of Plants as Factories for the Synthesis of Valuable Molecules

[1984] Plants and their constituent cells, tissues, and organs are factories that manufacture small organic molecules such as sugars, amino acids, fatty acids, vitamins, etc., as well as macromolecules such as proteins, nucleic acids, oils/fats and carbohydrates. Plants have long been a source of pharmaceutically beneficial chemicals; particularly, the secondary metabolites and hormone-related molecules synthesized by plants. Plants can also be used as factories to produce carbohydrates or lipids that comprises a carbon backbone useful as precursors of plastics, fiber, fuel, paper, pulp, rubber, solvents, lubricants, construction materials, detergents, and other cleaning materials. Plants can also generate other compounds that are of economic value, such as dyes, flavors, and fragrances. Both the intermediates as well as the end-products of plant bio-synthetic pathways have been found useful.

[1985] With the polynucleotides and polypeptides of the instant invention, modification of both in-vitro and in-vivo synthesis of such products is possible. One method of increasing the amount of either the intermediates or the end-products synthesized in a cell is to increase the expression of one or more proteins in the synthesis pathway as discussed below. Another method of increasing production of an intermediate is to inhibit expression of protein(s) that synthesize the end-product from the intermediate. Levels of end-products and intermediates can also be modified by changing the levels of enzymes that specifically change or degrade them. The kinds of molecules made can be also be modified by changing the genes encoding specific enzymes performing reactions at specific steps of the biosynthetic pathway. These genes can be from the same or a different organism. The molecular structures in the biosynthetic pathways can thus be modified or diverted into different branches of a pathway to make novel end-products:

[1986] Novel genes comprising selected promoters and sequences encoding enzymes are transformed into the selected plant to modify the levels, composition and/or structure of, without limitation:
[1987] Terpenoids
[1988] Alkaloids
[1989] Hormones, including brassinosteriods
[1990] Flavonoids
[1991] Steroids
[1992] Vitamins such as
   [1993] Retinol
   [1994] Riboflavin
   [1995] Thiamine
[1996] Caffeine
[1997] Morphine and other alkaloids
[1998] Peptides and amino acid synthesis
[1999] Antioxidants
[2000] Starches and lipids
[2001] Fatty acids
[2002] Fructose, mannose and other sugars
[2003] Glycerolipid
[2004] Citric acid
[2005] Lignin
[2006] Flavors
[2007] Fragrances
[2008] Essential oils
[2009] Colors or dyes
[2010] Gum
[2011] Gels
[2012] Waxes

[2013] The modifications are made by designing one or more novel genes per application comprising promoters, to ensure production of the enzyme(s) in the relevant cells, in the right amount, and polynucleotides encoding the relevant enzyme. The promoters and polynucleotides are the subject of this application. The novel genes are transformed into the relevant species using standard procedures. Their effects are measured by standard assays for the specific chemical/biochemical products.

[2014] These polynucleotides and proteins of the invention that participate in the relevant pathways and are useful for changing production of the above chemicals and biochemicals are identified in the Reference tables by their enzyme function. More specifically, proteins of the invention that have the enzymatic activity of one of the entries in the following table entitled “Enzymes Effecting Modulation of Biological Pathways” are of interest to modulate the corresponding pathways to produce precursors or final products noted above that are of industrial use. Biological activities of particular interest are listed below.

[2015] Other polynucleotides and proteins that regulate where, when and to what extent a pathway is active in a plant are extremely useful for modulating the synthesis and accumulation of valuable chemicals. These elements including transcription factors, proteins involved in signal transduction and other proteins in the control of gene expression are described elsewhere in this application.

| Pathway | | |
|---|---|---|
| Name | Enzyme Description | Comments |
| Alkaloid | Morphine 6- | Also acts on other alkaloids, including codeine, |
| biosynthesis I | dehydrogenase | normorphine and ethylmorphine, but only very |
| | | slowly on 7,8-saturated derivatives such as |
| | | dihydromorphine and dihydrocodeine In the |
| | | reverse direction, also reduces naloxone to the |
| | | 6-alpha-hydroxy analog Activated by 2- |
| | | mercaptoethanol |
| | Codeinone reductase | Stereospecifically catalyses the reversible |
| | (NADPH) | reduction of codeinone to codeine, which is a |
| | | direct precursor of morphine in the opium |
| | | poppy plant, Papaver somniferum |
| | Salutaridine reductase | Stereospecifically catalyses the reversible |
| | (NADPH) | reduction of salutaridine to salutaridinol, which |
| | | is a direct precursor of morphinan alkaloids in |
| | | the poppy plant, Papaver somniferum |
| | (S)-stylopine synthase | Catalyses an oxidative reaction that does not |
| | | incorporate oxygen into the product Forms the |
| | | second methylenedioxy bridge of the |
| | | protoberberine alkaloid stylopine from |
| | | oxidative ring closure of adjacent phenolic and |
| | | methoxy groups of cheilanthifoline |
| | (S)-cheilanthifoline | Catalyses an oxidative reaction that does not |
| | synthase | incorporate oxygen into the product Forms the |
| | | methylenedioxy bridge of the protoberberine |
| | | alkaloid cheilanthifoline from oxidative ring |
| | | closure of adjacent phenolic and methoxy |
| | | groups of scoulerine |
| | Salutaridine synthase | Forms the morphinan alkaloid salutaridine by |
| | | intramolecular phenol oxidation of reticuline |
| | | without the incorporation of oxygen into the |
| | | product |
| | (S)-canadine synthase | Catalyses an oxidative reaction that does not |
| | | incorporate oxygen into the product Oxidation |
| | | of the methoxyphenol group of the alkaloid |
| | | tetrahydrocolumbamine results in the |
| | | formation of the methylenedioxy bridge of |
| | | canadine |
| | Protopine 6- | Involved in benzophenanthridine alkaloid |
| | monooxygenase | synthesis in higher plants |
| | Dihydrosanguinarine | Involved in benzophenanthridine alkaloid |
| | 10-monooxygenase | synthesis in higher plants |
| | Monophenol | A group of copper proteins that also catalyse |
| | monooxygenase | the reaction of EC 1.10.3.1, if only 1,2- |
| | | benzenediols are available as substrate |
| | L-amino acid oxidase | |
| | 1,2-dehydroreticulinium | Stereospecifically reduces the 1,2- |
| | reductase (NADPH) | dehydroreticulinium ion to (R)-reticuline, |
| | | which is a direct precursor of morphinan |
| | | alkaloids in the poppy plant, papaver |
| | | somniferum The enzyme does not catalyse the |
| | | reverse reaction to any significant extent under |
| | | physiological conditions |
| | Dihydrobenzo- | Also catalyzes: dihydrochelirubine + O(2) = |
| | phenanthridine oxidase | chelirubine + H(2)O(2) Also catalyzes: |
| | | dihydromacarpine + O(2) = macarpine + |
| | | H(2)O(2) Found in higher plants Produces |
| | | oxidized forms of the benzophenanthridine |
| | | alkaloids |
| | Reticuline oxidase | The product of the reaction, (S)-scoulerine, is a |
| | | precursor of protopine, protoberberine and |
| | | benzophenanthridine alkaloid biosynthesis in |
| | | plants Acts on (S)-reticuline and related |
| | | compounds, converting the N-methyl group |
| | | into the methylene bridge (\grave{ }berberine |
| | | bridge[PRIME]) of (S)- |
| | | tetrahydroprotoberberines |
| | 3[PRIME]-hydroxy-N- | Involved in isoquinoline alkaloid metabolism |
| | methyl-(S)-coclaurine | in plants Has also been shown to catalyse the |
| | 4[PRIME]-O- | methylation of (R,S)-laudanosoline, (S)- |
| | methyltransferase | 3[PRIME]-hydroxycoclaurine and (R,S)-7-O- |
| | | methylnoraudanosoline |
| | (S)-scoulerine 9-O- | The product of this reaction is a precursor for |
| | methyltransferase | protoberberine alkaloids in plants |
| | Columbamine O- | The product of this reaction is a protoberberine |
| | methyltransferase | alkaloid that is widely distributed in the plant |
| | | kingdom Distinct in specificity from EC |
| | | 2.1.1.88 |
| | 10-hydroxydihydro- | Part of the pathway for synthesis of |
| | sanguinarine 10-O- | benzophenanthridine alkaloids in plants |
| | methyltransferase | |
| | 12-hydroxydi- | Part of the pathway for synthesis of |
| | hydrochelirubine 12-O- | benzophenanthridine alkaloid macarpine in |
| | methyltransferase | plants |
| | (R,S)-norcoclaurine 6- | Norcoclaurine is 6,7-dihydroxy-1-[(4- |
| | O-methyltransferase | hydroxyphenyl)methyl]-1,2,3,4- |
| | | tetrahydroisoquinoline The enzyme will also |
| | | catalyse the 6-O-methylation of (R,S)- |
| | | norlaudanosoline to form 6-O-methyl- |
| | | norlaudanosoline, but this alkaloid has not |
| | | been found to occur in plants |
| | Salutaridinol 7-O- | At higher pH values the product, 7-O- |
| | acetyltransferase | acetylsalutaridinol, spontaneously closes the 4-> |
| | | 5 oxide bridge by allylic elimination to form |
| | | the morphine precursor thebaine From the |
| | | opium poppy plant, Papaver somniferum |
| | Aspartate | Also acts on L-tyrosine, L-phenylalanine and |
| | aminotransferase | L-tryptophan. This activity can be formed from |
| | | EC 2.6.1.57 by controlled proteolysis |
| | Tyrosine | L-phenylalanine can act instead of L-tyrosine |
| | aminotransferase | The mitochondrial enzyme may be identical |
| | | with EC 2.6.1.1 The three isoenzymic forms |
| | | are interconverted by EC 3.4.22.4 |
| | Aromatic amino acid | L-methionine can also act as donor, more |
| | transferase | slowly Oxaloacetate can act as acceptor |
| | | Controlled proteolysis converts the enzyme to |
| | | EC 2.6.1.1 |
| | Tyrosine decarboxylase | The bacterial enzyme also acts on 3- |
| | | hydroxytyrosine and, more slowly, on 3- |
| | | hydroxyphenylalanine |
| | Aromatic-L-amino-acid | Also acts on L-tryptophan, 5-hydroxy-L- |
| | decarboxylase | tryptophan and dihydroxy-L-phenylalanine |
| | | (DOPA) |
| Alkaloid | Tropine dehydrogenase | Oxidizes other tropan-3-alpha-ols, but not the |
| biosynthesis | | corresponding beta-derivatives |
| II | | |
| | Tropinone reductase | |
| | Hyoscyamine (6S)- | |
| | dioxygenase | |
| | 6-beta- | |
| | hydroxyhyoscyamine | |
| | epoxidase | |
| | Amine oxidase (copper- | A group of enzymes including those oxidizing |
| | containing) | primary amines, diamines and histamine One |
| | | form of EC 1.3.1.15 from rat kidney also |
| | | catalyses this reaction |
| | Putrescine N- | |
| | methyltransferase | |
| | Ornithine | |
| | decarboxylase | |
| | Oxalyl-CoA | |
| | decarboxylase | |
| | Phenylalanine | May also act on L-tyrosine |
| | ammonia-lyase | |
| Androgen and | 3-beta-hydroxy- | Acts on 3-beta-hydroxyandrost-5-en-17-one to |
| estrogen | delta(5)-steroid | form androst-4-ene-3,17-dione and on 3-beta- |
| metabolism | dehydrogenase | hydroxypregn-5-en-20-one to form |
| | | progesterone |
| | 11-beta-hydroxysteroid | |
| | dehydrogenase | |
| | Estradiol 17-alpha- | |
| | dehydrogenase | |
| | 3-alpha-hydroxy-5- | |
| | beta-androstane-17-one | |
| | 3-alpha-dehydrogenase | |
| | 3-alpha (17-beta)- | Also acts on other 17-beta-hydroxysteroids, on |
| | hydroxysteroid | the 3-alpha-hydroxy group of pregnanes and |
| | dehydrogenase (NAD+) | bile acids, and on benzene dihydrodiol |
| | | Different from EC 1.1.1.50 or EC 1.1.1.213 |
| | 3-alpha-hydroxysteroid | Acts on other 3-alpha-hydroxysteroids and on |
| | dehydrogenase (B- | 9-, 11- and 15-hydroxyprostaglandin B- |
| | specific) | specific with respect to NAD(+) or NADP(+) |
| | | (cf. EC 1.1.1.213) |
| | 3(or 17)beta- | Also acts on other 3-beta- or 17-beta- |
| | hydroxysteroid | hydroxysteroids (cf EC 1.1.1.209) |
| | dehydrogenase | |
| | Estradiol 17 beta- | Also acts on (S)-20-hydroxypregn-4-en-3-one |
| | dehydrogenase | and related compounds, oxidizing the (S)-20- |
| | | group B-specific with respect to NAD(P)(+) |
| | Testosterone 17-beta- | |
| | dehydrogenase | |
| | Testosterone 17-beta- | Also oxidizes 3-hydroxyhexobarbital to 3- |
| | dehydrogenase | oxohexobarbital |
| | (NADP+) | |
| | Steroid 11-beta- | Also hydroxylates steroids at the 18-position, |
| | monooxygenase | and converts 18-hydroxycorticosterone into |
| | | aldosterone |
| | Estradiol 6-beta- | |
| | monooxygenase | |
| | Androst-4-ene-3,17- | Has a wide specificity A single enzyme from |
| | dione monooxygenase | Cylindrocarpon radicicola (EC 1.14.13.54) |
| | | catalyses both this reaction and that catalysed |
| | | by EC 1.14.99.4 |
| | 3-oxo-5-alpha-steroid | |
| | 4-dehydrogenase | |
| | 3-oxo-5-beta-steroid 4- | |
| | dehydrogenase | |
| | UDP- | Family of enzymes accepting a wide range of |
| | glucuronosyltransferase | substrates, including phenols, alcohols, amines |
| | | and fatty acids Some of the activities catalysed |
| | | were previously listed separately as EC |
| | | 2.4.1.42, EC 2.4.1.59, EC 2.4.1.61, EC |
| | | 2.4.1.76, EC 2.4.1.77, EC 2.4.1.84, EC |
| | | 2.4.1.107 and EC 2.4.1.108 A temporary |
| | | nomenclature for the various forms whose |
| | | delineation is in a state of flux |
| | Steroid sulfotransferase | Broad specificity resembling EC 2.8.2.2, but |
| | | also acts on estrone |
| | Alcohol | Primary and secondary alcohols, including |
| | sulfotransferase | aliphatic alcohols, ascorbate, chloramphenicol, |
| | | ephedrine and hydroxysteroids, but not |
| | | phenolic steroids, can act as acceptors (cf. EC |
| | | 2.8.2.15) |
| | Estrone sulfotransferase | |
| | Arylsulfatase | A group of enzymes with rather similar |
| | | specificities |
| | Steryl-sulfatase | Also acts on some related steryl sulfates |
| | 17-alpha- | |
| | hydroxyprogesterone | |
| | aldolase | |
| | Steroid delta-isomerase | |
| C21-Steroid | 3-beta-hydroxy- | Acts on 3-beta-hydroxyandrost-5-en-17-one to |
| hormone | delta(5)-steroid | form androst-4-ene-3,17-dione and on 3-beta- |
| metabolism | dehydrogenase | hydroxypregn-5-en-20-one to form |
| | | progesterone |
| | 11-beta-hydroxysteroid | |
| | dehydrogenase | |
| | 20-alpha- | A-specific with respect to NAD(P)(+) |
| | hydroxysteroid | |
| | dehydrogenase | |
| | 3-alpha-hydroxysteroid | Acts on other 3-alpha-hydroxysteroids and on |
| | dehydrogenase (B- | 9-, 11- and 15-hydroxyprostaglandin B- |
| | specific) | specific with respect to NAD(+) or NADP(+) |
| | | (cf. EC 1.1.1.213) |
| | 3-alpha(or 20-beta)- | The 3-alpha-hydroxyl group or 20-beta- |
| | hydroxysteroid | hydroxyl group of pregnane and androstane |
| | dehydrogenase | steroids can act as donors |
| | Steroid 11-beta- | Also hydroxylates steroids at the 18-position, |
| | monooxygenase | and converts 18-hydroxycorticosterone into |
| | | aldosterone |
| | Corticosterone 18- | |
| | monooxygenase | |
| | Cholesterol | The reaction proceeds in three stages, with |
| | monooxygenase (side- | hydroxylation at C-20 and C-22 preceding |
| | chain cleaving) | scission of the side-chain at C-20 |
| | Steroid 21- | |
| | monooxygenase | |
| | Progesterone 11-alpha- | |
| | monooxygenase | |
| | Steroid 17-alpha- | |
| | monooxygenase | |
| | Cholestenone 5-beta- | |
| | reductase | |
| | Cortisone beta- | |
| | reductase | |
| | Progesterone 5-alpha- | Testosterone and 20-alpha-hydroxy-4-pregnen- |
| | reductase | 3-one can act in place of progesterone |
| | 3-oxo-5-beta-steroid 4- | |
| | dehydrogenase | |
| | Steroid delta-isomerase | |
| Flavonoids, | Coniferyl-alcohol | Specific for coniferyl alcohol; does not act on |
| stilbene and | dehydrogenase | cinnamyl alcohol, 4-coumaryl alcohol or |
| lignin | | sinapyl alcohol |
| biosynthesis | | |
| | Cinnamyl-alcohol | Acts on coniferyl alcohol, sinapyl alcohol, 4- |
| | dehydrogenase | coumaryl alcohol and cinnamyl alcohol (cf. EC |
| | | 1.1.1.194) |
| | Dihydrokaempferol 4- | Also acts, in the reverse direction, on (+)- |
| | reductase | dihydroquercetin and (+)-dihydromyricetin |
| | | Each dihydroflavonol is reduced to the |
| | | corresponding cis-flavon-3,4-diol NAD(+) can |
| | | act instead of NADP(+), more slowly Involved |
| | | in the biosynthesis of anthocyanidins in plants |
| | Flavonone 4-reductase | Involved in the biosynthesis of 3- |
| | | deoxyanthocyanidins from flavonones such as |
| | | naringenin or eriodictyol |
| | Peroxidase | |
| | Caffeate 3,4- | |
| | dioxygenase | |
| | Naringenin 3- | |
| | dioxygenase | |
| | Trans-cinnamate 4- | Also acts on NADH, more slowly |
| | monooxygenase | |
| | Trans-cinnamate 2- | |
| | monooxygenase | |
| | Flavonoid 3[PRIME]- | Acts on a number of flavonoids, including |
| | monooxygenase | naringenin and dihydrokaempferol Does not |
| | | act on 4-coumarate or 4-coumaroyl-CoA |
| | Monophenol | A group of copper proteins that also catalyse |
| | monooxygenase | the reaction of EC 1.10.3.1, if only 1,2- |
| | | benzenediols are available as substrate |
| | Cinnamoyl-CoA | Also acts on a number of substituted |
| | reductase | cinnamoyl esters of coenzyme A |
| | Caffeoyl-CoA O- | |
| | methyltransferase | |
| | Luteolin O- | Also acts on luteolin-7-O-beta-D-glucoside |
| | methyltransferase | |
| | Caffeate O- | 3,4-dihydroxybenzaldehyde and catechol can |
| | methyltransferase | act as acceptor, more slowly |
| | Apigenin 4[PRIME]-O- | Converts apigenin into acacetin Naringenin |
| | methyltransferase | (5,7,4[PRIME]-trihydroxyflavonone) can also |
| | | act as acceptor, more slowly |
| | Quercetin 3-O- | Specific for quercetin. Related enzymes bring |
| | methyltransferase | about the 3-O-methylation of other flavonols, |
| | | such as galangin and kaempferol |
| | Isoflavone-7-O-beta- | The 6-position of the glucose residue of |
| | glucoside | formononetin can also act as acceptor Some |
| | 6[PRIME][PRIME]-O- | other 7-O-glucosides of isoflavones, flavones |
| | malonyltransferase | and flavonols can also act, more slowly |
| | Pinosylvin synthase | Not identical with EC 2.3.1.74 or EC 2.3.1.95 |
| | Naringenin-chalcone | In the presence of NADH and a reductase, |
| | synthase | 6[PRIME]-deoxychalcone is produced |
| | Trihydroxystilbene | Not identical with EC 2.3.1.74 or EC 2.3.1.146 |
| | synthase | |
| | Quinate O- | Caffeoyl-CoA and 4-coumaroyl-CoA can also |
| | hydroxycinnamoyltransferase | act as donors, more slowly Involved in the |
| | | biosynthesis of chlorogenic acid in sweet |
| | | potato and, with EC 2.3.1.98 in the formation |
| | | of caffeoyl-CoA in tomato |
| | Coniferyl-alcohol | Sinapyl alcohol can also act as acceptor |
| | glucosyltransferase | |
| | 2-coumarate O-beta- | Coumarinate (cis-2-hydroxycinnamate) does |
| | glucosyltransferase | not act as acceptor |
| | Scopoletin | |
| | glucosyltransferase | |
| | Flavonol-3-O-glucoside | Converts flavonol 3-O-glucosides to 3-O- |
| | L-rhamnosyltransferase | rutinosides Also acts, more slowly, on rutin, |
| | | quercetin 3-O-galactoside and flavonol O3- |
| | | rhamnosides |
| | Flavone 7-O-beta- | A number of flavones, flavonones and |
| | glucosyltransferase | flavonols can function as acceptors Different |
| | | from EC 2.4.1.91 |
| | Flavonol 3-O- | Acts on a variety of flavonols, including |
| | glucosyltransferase | quercetin and quercetin 7-O-glucoside |
| | | Different from EC 2.4.1.81 |
| | Flavone | 7-O-beta-D-glucosides of a number of |
| | apiosyltransferase | flavonoids and of 4-substituted phenols can act |
| | | as acceptors |
| | Coniferin beta- | Also hydrolyzes syringin, 4-cinnamyl alcohol |
| | glucosidase | beta-glucoside, and, more slowly, some other |
| | | aryl beta-glycosides A plant cell-wall enzyme |
| | | involved in the biosynthesis of lignin |
| | Beta-glucosidase | Wide specificity for beta-D-glucosides. Some |
| | | examples also hydrolyse one or more of the |
| | | following: beta-D-galactosides, alpha-L- |
| | | arabinosides, beta-D-xylosides, and beta-D- |
| | | fucosides |
| | Chalcone isomerase | |
| | 4-coumarate--CoA | |
| | ligase | |

| Pathway Name | Enzyme Description | Enzyme Comments |
|---|---|---|
| Ascorbate and aldarate | D-threo-aldose 1- | Acts on L-fucose, D-arabinose and L- |
| metabolism | dehydrogenase | xylose The animal enzyme was also |
| | | shown to act on L-arabinose, and the |
| | | enzyme from Pseudomonas caryophyllion |
| | | L-glucose |
| | L-threonate 3- | |
| | dehydrogenase | |
| | Glucuronate reductase | Also reduces D-galacturonate May be |
| | | identical with EC 1.1.1.2 |
| | Glucuronolactone | |
| | reductase | |
| | L-arabinose 1- | |
| | dehydrogenase | |
| | L-galactonolactone | Acts on the 1,4-lactones of L-galactonic, |
| | oxidase | D-altronic, L-fuconic, D-arabinic and D- |
| | | threonic acids Not identical with EC |
| | | 1.1.3.8 (cf. EC 1.3.2.3) |
| | L-gulonolactone | The product spontaneously isomerizes to |
| | oxidase | L-ascorbate |
| | L-ascorbate oxidase | |
| | L-ascorbate peroxidase | |
| | Ascorbate 2,3- | |
| | dioxygenase | |
| | 2,5-dioxovalerate | |
| | dehydrogenase | |
| | Aldehyde | Wide specificity, including oxidation of |
| | dehydrogenase (NAD+) | D-glucuronolactone to D-glucarate |
| | Galactonolactone | Cf. EC 1.1.3.24 |
| | dehydrogenase | |
| | Monodehydroascorbate | |
| | reductase (NADH) | |
| | Glutathione | |
| | dehydrogenase | |
| | (ascorbate) | |
| | L-arabinonolactonase | |
| | Gluconolactonase | Acts on a wide range of hexono-1,5- |
| | | lactones |
| | Uronolactonase | |
| | 1,4-lactonase | Specific for 1,4-lactones with 4-8 carbon |
| | | atoms Does not hydrolyse simple |
| | | aliphatic esters, acetylcholine, sugar |
| | | lactones or substituted aliphatic lactones, |
| | | e.g. 3-hydroxy-4-butyrolactone |
| | 2-dehydro-3- | |
| | deoxyglucarate aldolase | |
| | L-arabinonate | |
| | dehydratase | |
| | Glucarate dehydratase | |
| | 5-dehydro-4- | |
| | deoxyglucarate | |
| | dehydratase | |
| | Galactarate dehydratase | |
| | 2-dehydro-3-deoxy-L- | |
| | arabinonate | |
| | dehydratase | |
| Carbon fixation | Malate dehydrogenase | Also oxidizes some other 2- |
| | | hydroxydicarboxylic acids |
| | Malate dehydrogenase | Does not decarboxylates added |
| | (decarboxylating) | oxaloacetate |
| | Malate dehydrogenase | Also decarboxylates added oxaloacetate |
| | (oxaloacetate | |
| | decarboxylating) | |
| | (NADP+) | |
| | Malate dehydrogenase | Activated by light |
| | (NADP+) | |
| | Glyceraldehyde-3- | |
| | phosphate | |
| | dehydrogenase | |
| | (NADP+) | |
| | (phosphorylating) | |
| | Transketolase | Wide specificity for both reactants, e.g. |
| | | converts hydroxypyruvate and R—CHO |
| | | into CO(2) and R—CHOH—CO—CH(2)OH |
| | | Transketolase from Alcaligenes faecalis |
| | | shows high activity with D-erythrose as |
| | | acceptor |
| | Aspartate | Also acts on L-tyrosine, L-phenylalanine |
| | aminotransferase | and L-tryptophan. This activity can be |
| | | formed from EC 2.6.1.57 by controlled |
| | | proteolysis |
| | Alanine | 2-aminobutanoate acts slowly instead of |
| | aminotransferase | alanine |
| | Sedoheptulokinase | |
| | Phosphoribulokinase | |
| | Pyruvate kinase | UTP, GTP, CTP, ITP and dATP can also |
| | | act as donors Also phosphorylates |
| | | hydroxylamine and fluoride in the |
| | | presence of CO(2) |
| | Phosphoglycerate | |
| | kinase | |
| | Pyruvate, phosphate | |
| | dikinase | |
| | Fructose- | The animal enzyme also acts on |
| | bisphosphatase | sedoheptulose 1,7-bisphosphate |
| | Sedoheptulose- | |
| | bisphosphatase | |
| | Phosphoenolpyruvate | |
| | carboxylase | |
| | Ribulose-bisphosphate | Will utilize O(2) instead of CO(2), |
| | carboxylase | forming 3-phospho-D-glycerate and 2- |
| | | phosphoglycolate |
| | Phosphoenolpyruvate | |
| | carboxykinase (ATP) | |
| | Fructose-bisphosphate | Also acts on (3S,4R)-ketose 1-phosphates |
| | aldolase | The yeast and bacterial enzymes are zinc |
| | | proteins The enzymes increase electron- |
| | | attraction by the carbonyl group, some |
| | | (Class I) forming a protonated imine with |
| | | it, others (Class II), mainly of microbial |
| | | origin, polarizing it with a metal ion, e.g |
| | | zinc |
| | Phosphoketolase | |
| | Ribulose-phosphate 3- | Also converts D-erythrose 4-phosphate |
| | epimerase | into D-erythrulose 4-phosphate and D- |
| | | threose 4-phosphate |
| | Triosephosphate | |
| | isomerase | |
| | Ribose 5-phosphate | Also acts on D-ribose 5-diphosphate and |
| | epimerase | D-ribose 5-triphosphate |
| Phenylalanine | (R)-4- | Also acts, more slowly, on (R)-3- |
| metabolism | hydroxyphenyllactate | phenyllactate, (R)-3-(indole-3-yl)lactate |
| | dehydrogenase | and (R)-lactate |
| | Hydroxyphenyl- | Also acts on 3-(3,4- |
| | pyruvate reductase | dihydroxyphenyl)lactate Involved with |
| | | EC 2.3.1.140 in the biosynthesis of |
| | | rosmarinic acid |
| | Aryl-alcohol | A group of enzymes with broad |
| | dehydrogenase | specificity towards primary alcohols with |
| | | an aromatic or cyclohex-1-ene ring, but |
| | | with low or no activity towards short- |
| | | chain aliphatic alcohols |
| | Peroxidase | |
| | Catechol 1,2- | Involved in the metabolism of nitro- |
| | dioxygenase | aromatic compounds by a strain of |
| | | Pseudomonas putida |
| | 2,3-dihydroxybenzoate | |
| | 3,4-dioxygenase | |
| | 3-carboxyethylcatechol | |
| | 2,3-dioxygenase | |
| | Catechol 2,3- | The enzyme from Alcaligines sp. strain |
| | dioxygenase | O-1 has also been shown to catalyse the |
| | | reaction: 3-Sulfocatechol + O(2) + H(2)O = |
| | | 2-hydroxymuconate + bisulfite. It has |
| | | been referred to as 3-sulfocatechol 2,3- |
| | | dioxygenase. Further work will be |
| | | necessary to show whether or not this is a |
| | | distinct enzyme |
| | 4- | |
| | hydroxyphenylpyruvate | |
| | dioxygenase | |
| | Protocatechuate 3,4- | |
| | dioxygenase | |
| | Hydroxyquinol 1,2- | The product isomerizes to 2- |
| | dioxygenase | maleylacetate (cis-hex-2-enedioate) |
| | | Highly specific; catechol and pyrogallol |
| | | are acted on at less than 1% of the rate at |
| | | which benzene-1,2,4-triol is oxidized |
| | Protocatechuate 4,5- | |
| | dioxygenase | |
| | Phenylalanine 2- | Also catalyses a reaction similar to that |
| | monooxygenase | of EC 1.4.3.2, forming 3-phenylpyruvate, |
| | | NH(3) and H(2)O(2), but more slowly |
| | Anthranilate 1,2- | |
| | dioxygenase | |
| | (deaminating, | |
| | decarboxylating) | |
| | Benzoate 1,2- | A system, containing a reductase which |
| | dioxygenase | is an iron-sulfur flavoprotein (FAD), and |
| | | an iron-sulfur oxygenase |
| | Toluene dioxygenase | A system, containing a reductase which |
| | | is an iron-sulfur flavoprotein (FAD), an |
| | | iron-sulfur oxygenase, and a ferredoxin |
| | | Some other aromatic compounds, |
| | | including ethylbenzene, 4-xylene and |
| | | some halogenated toluenes, are converted |
| | | into the corresponding cis-dihydrodiols |
| | Naphthalene 1,2- | A system, containing a reductase which |
| | dioxygenase | is an iron-sulfur flavoprotein (FAD), an |
| | | iron-sulfur oxygenase, and ferredoxin |
| | Benzene 1,2- | A system, containing a reductase which |
| | dioxygenase | is an iron-sulfur flavoprotein, an iron- |
| | | sulfur oxygenase and ferredoxin |
| | Salicylate 1- | |
| | monooxygenase | |
| | Trans-cinnamate 4- | Also acts on NADH, more slowly |
| | monooxygenase | |
| | Benzoate 4- | |
| | monooxygenase | |
| | 4-hydroxybenzoate 3- | Most enzymes from Pseudomonas are |
| | monooxygenase | highly specific for NAD(P)H (cf EC |
| | | 1.14.13.33) |
| | 3-hydroxybenzoate 4- | Also acts on a number of analogs of 3- |
| | monooxygenase | hydroxybenzoate substituted in the 2, 4, 5 |
| | | and 6 positions |
| | 3-hydroxybenzoate 6- | Also acts on a number of analogs of 3- |
| | monooxygenase | hydroxybenzoate substituted in the 2, 4, 5 |
| | | and 6 positions NADPH can act instead |
| | | of NADH, more slowly |
| | 4-hydroxybenzoate 3- | The enzyme from Corynebacterium |
| | monooxygenase | cyclohexanicum is highly specific for 4- |
| | (NAD(P)H) | hydroxybenzoate, but uses NADH and |
| | | NADPH at approximately equal rates (cf. |
| | | EC 1.14.13.2). It is less specific for |
| | | NADPH than EC 1.14.13.2 |
| | Anthranilate 3- | The enzyme from Aspergillus niger is an |
| | monooxygenase | iron protein; that from the yeast. |
| | (deaminating) | Trichosporon cutaneum is a flavoprotein |
| | | (FAD) |
| | Melilotate 3- | |
| | monooxygenase | |
| | Phenol 2- | Also active with resorcinol and O-cresol |
| | monooxygenase | |
| | Mandelate 4- | |
| | monooxygenase | |
| | 3-hydroxybenzoate 2- | |
| | monooxygenase | |
| | 4-cresol dehydrogenase | Phenazine methosulfate can act as |
| | (hydroxylating) | acceptor A quinone methide is probably |
| | | formed as intermediate The product is |
| | | oxidized further to 4-hydroxybenzoate |
| | Benzaldehyde | |
| | dehydrogenase (NAD+) | |
| | Aminomuconate- | Also acts on 2-hydroxymuconate |
| | semialdehyde | semialdehyde |
| | dehydrogenase | |
| | Phenylacetaldehyde | |
| | dehydrogenase | |
| | 4-carboxy-2- | Does not act on unsubstituted aliphatic or |
| | hydroxymuconate-6- | aromatic aldehydes or glucose NAD(+) |
| | semialdehyde | can replace NADP(+), but with lower |
| | dehydrogenase | affinity |
| | Aldehyde | |
| | dehydrogenase | |
| | (NAD(P)+) | |
| | Benzaldehyde | |
| | dehydrogenase | |
| | (NADP+) | |
| | Coumarate reductase | |
| | Cis-1,2- | |
| | dihydrobenzene-1,2- | |
| | diol dehydrogenase | |
| | Cis-1,2-dihydro-1,2- | Also acts, at half the rate, on cis- |
| | dihydroxynaphthalene | anthracene dihydrodiol and cis- |
| | dehydrogenase | phenanthrene dihydrodiol |
| | 2-enoate reductase | Acts, in the reverse direction, on a wide |
| | | range of alkyl and aryl alpha,beta- |
| | | unsaturated carboxylate ions 2-butenoate |
| | | was the best substrate tested |
| | Maleylacetate reductase | |
| | Phenylalanine | The enzyme from Bacillus badius and |
| | dehydrogenase | Sporosarcina ureae are highly specific for |
| | | L-phenylalanine, that from Bacillus |
| | | sphaericus also acts on L-tyrosine |
| | L-amino acid oxidase | |
| | Amine oxidase (flavin- | Acts on primary amines, and usually also |
| | containing) | on secondary and tertiary amines |
| | Amine oxidase (copper- | A group of enzymes including those |
| | containing) | oxidizing primary amines, diamines and |
| | | histamine One form of EC 1.3.1.15 from |
| | | rat kidney also catalyses this reaction |
| | D-amino-acid | Acts to some extent on all D-amino acids |
| | dehydrogenase | except D-aspartate and D-glutamate |
| | Aralkylamine | Phenazine methosulfate can act as |
| | dehydrogenase | acceptor Acts on aromatic amines and, |
| | | more slowly, on some long-chain |
| | | aliphatic amines, but not on methylamine |
| | | or ethylamine (cf EC 1.4.99.3) |
| | Glutamine N- | |
| | phenylacetyltransferase | |
| | Acetyl-CoA C- | |
| | acyltransferase | |
| | D-amino-acid N- | |
| | acetyltransferase | |
| | Phenylalanine N- | Also acts, more slowly, on L-histidine |
| | acetyltransferase | and L-alanine |
| | Glycine N- | Not identical with EC 2.3.1.13 or EC |
| | benzoyltransferase | 2.3.1.68 |
| | Aspartate | Also acts on L-tyrosine, L-phenylalanine |
| | aminotransferase | and L-tryptophan. This activity can be |
| | | formed from EC 2.6.1.57 by controlled |
| | | proteolysis |
| | D-alanine | Acts on the D-isomers of leucine, |
| | aminotransferase | aspartate, glutamate, aminobutyrate, |
| | | norvaline and asparagine |
| | Tyrosine | L-phenylalanine can act instead of L- |
| | aminotransferase | tyrosine The mitochondrial enzyme may |
| | | be identical with EC 2.6.1.1 The three |
| | | isoenzymic forms are interconverted by |
| | | EC 3.4.22.4 |
| | Aromatic amino acid | L-methionine can also act as donor, more |
| | transferase | slowly Oxaloacetate can act as acceptor |
| | | Controlled proteolysis converts the |
| | | enzyme to EC 2.6.1.1 |
| | Histidinol-phosphate | |
| | aminotransferase | |
| | 3-oxoadipate CoA- | |
| | transferase | |
| | 3-oxoadipate enol- | Acts on the product of EC 4.1.1.44 |
| | lactonase | |
| | Carboxymethylene- | |
| | butenolidase | |
| | 2-pyrone-4,6- | The product isomerizes to 4- |
| | dicarboxylate lactonase | oxalmesaconate |
| | Hippurate hydrolase | Acts on various N-benzoylamino acids |
| | Amidase | |
| | Acylphosphatase | |
| | 2-hydroxymuconate- | |
| | semialdehyde hydrolase | |
| | Aromatic-L-amino-acid | Also acts on L-tryptophan, 5-hydroxy-L- |
| | decarboxylase | tryptophan and dihydroxy-L- |
| | | phenylalanine (DOPA) |
| | Phenylpyruvate | Also acts on indole-3-pyruvate |
| | decarboxylase | |
| | 4-carboxymucono- | |
| | lactone decarboxylase | |
| | O-pyrocatechuate | |
| | decarboxylase | |
| | Phenylalanine | Also acts on tyrosine and other aromatic |
| | decarboxylase | amino acids |
| | 4-hydroxybenzoate | |
| | decarboxylase | |
| | Protocatechuate | |
| | decarboxylase | |
| | Benzoylformate | |
| | decarboxylase | |
| | 4-oxalocrotonate | Involved in the meta-cleavage pathway |
| | decarboxylase | for the degradation of phenols, cresols |
| | | and catechols |
| | 4-hydroxy-4-methyl-2- | Also acts on 4-hydroxy-4-methyl-2- |
| | oxoglutarate aldolase | oxoadipate and 4-carboxy-4-hydroxy-2- |
| | | oxohexadioate |
| | 2-oxopent-4-enoate | Also acts, more slowly, on cis-2-oxohex- |
| | hydratase | 4-enoate, but not on the trans-isomer |
| | Phenylalanine | May also act on L-tyrosine |
| | ammonia-lyase | |
| | Phenylalanine racemase | |
| | (ATP-hydrolysing) | |
| | Mandelate racemase | |
| | Phenylpyruvate | Also acts on other arylpyruvates |
| | tautomerase | |
| | 5-carboxymethyl-2- | |
| | hydroxymuconate | |
| | delta-isomerase | |
| | Muconolactone delta- | |
| | isomerase | |
| | Muconate | Also acts, in the reverse reaction, on 3- |
| | cycloisomerase | methyl-cis-cis-hexa-dienedioate and, |
| | | very slowly, on cis-trans-hexadienedioate |
| | | Not identical with EC 5.5.1.7 or EC |
| | | 5.5.1.11 |
| | 3-carboxy-cis,cis- | |
| | muconate | |
| | cycloisomerase | |
| | Carboxy-cis,cis- | |
| | muconate cyclase | |
| | Chloromuconate | Spontaneous elimination of HCl produces |
| | cycloisomerase | cis-4-carboxymethylenebut-2-en-4-olide |
| | | Also acts in reverse direction on 2- |
| | | chloro-cis,cis-muconate Not identical |
| | | with EC 5.5.1.1 or EC 5.5.1.11 |
| | Phenylacetate--CoA | Phenoxyacetate can replace phenylacetate |
| | ligase | |
| | Benzoate--CoA ligase | Also acts on 2-, 3- and 4-fluorobenzoate, |
| | | but only very slowly on the |
| | | corresponding chlorobenzoates |
| | 4-hydroxybenzoate-- | |
| | CoA ligase | |
| | Phenylacetate--CoA | Also acts, more slowly, on acetate, |
| | ligase | propanoate and butanoate, but not on |
| | | hydroxy derivatives of phenylacetate and |
| | | related compounds |
| Phenylalanine, tyrosine | Quinate 5- | |
| and tryptophan biosynthesis | dehydrogenase | |
| | Shikimate 5- | |
| | dehydrogenase | |
| | Quinate dehydrogenase | |
| | (pyrroloquinoline- | |
| | quinone) | |
| | Phenylalanine 4- | |
| | monooxygenase | |
| | Prephenate | This enzyme in the enteric bacteria also |
| | dehydrogenase | possesses chorismate mutase activity (EC |
| | | 5.4.99.5) and converts chorismate into |
| | | prephenate |
| | Prephenate | |
| | dehydrogenase | |
| | (NADP+) | |
| | Cyclohexadienyl | Also acts on prephenate and D- |
| | dehydrogenase | prephenyllactate (cf. EC 1.3.1.12) |
| | 2-methyl-branched- | From Ascaris suum The reaction |
| | chain-enoyl-CoA | proceeds only in the presence of another |
| | reductase | flavoprotein (ETF = [PRIME]Electron- |
| | | Transferring Flavoprotein[PRIME]) |
| | Phenylalanine | The enzyme from Bacillus badius and |
| | dehydrogenase | Sporosarcina ureae are highly specific for |
| | | L-phenylalanine, that from Bacillus |
| | | sphaericus also acts on L-tyrosine |
| | L-amino acid oxidase | |
| | Anthranilate | In some organisms, this enzyme is part of |
| | phosphoribosyl- | a multifunctional protein together with |
| | transferase | one or more components of the system |
| | | for biosynthesis of tryptophan (EC |
| | | 4.1.1.48, EC 4.1.3.27, EC 4.2.1.20, and |
| | | EC 5.3.1.24) |
| | 3-phosphoshikimate 1- | |
| | carboxyvinyl- | |
| | transferase | |
| | Aspartate | Also acts on L-tyrosine, L-phenylalanine |
| | aminotransferase | and L-tryptophan. This activity can be |
| | | formed from EC 2.6.1.57 by controlled |
| | | proteolysis |
| | Tyrosine | L-phenylalanine can act instead of L- |
| | aminotransferase | tyrosine The mitochondrial enzyme may |
| | | be identical with EC 2.6.1.1 The three |
| | | isoenzymic forms are interconverted by |
| | | EC 3.4.22.4 |
| | Aromatic amino acid | L-methionine can also act as donor, more |
| | transferase | slowly Oxaloacetate can act as acceptor |
| | | Controlled proteolysis converts the |
| | | enzyme to EC 2.6.1.1 |
| | Histidinol-phosphate | |
| | aminotransferase | |
| | Shikimate kinase | |
| | Indole-3-glycerol- | In some organisms, this enzyme is part of |
| | phosphate synthase | a multifunctional protein together with |
| | | one or more components of the system |
| | | for biosynthesis of tryptophan (EC |
| | | 2.4.2.18, EC 4.1.3.27, EC 4.2.1.20, and |
| | | EC 5.3.1.24) |
| | 2-dehydro-3- | |
| | deoxyphosphoheptonate | |
| | aldolase | |
| | Anthranilate synthase | In some organisms, this enzyme is part of |
| | | a multifunctional protein together with |
| | | one or more components of the system |
| | | for biosynthesis of tryptophan (EC |
| | | 2.4.2.18, EC 4.1.1.48, EC 4.2.1.20, and |
| | | EC 5.3.1.24) The native enzyme in the |
| | | complex with uses either glutamine or |
| | | (less efficiently) NH(3). The enzyme |
| | | separated from the complex uses NH(3) |
| | | only |
| | 3-dehydroquinate | |
| | dehydratase | |
| | Phosphopyruvate | Also acts on 3-phospho-D-erythronate |
| | hydratase | |
| | Tryptophan synthase | Also catalyses the conversion of serine |
| | | and indole into tryptophan and water and |
| | | of indoleglycerol phosphate into indole |
| | | and glyceraldehyde phosphate In some |
| | | organisms, this enzyme is part of a |
| | | multifunctional protein together with one |
| | | or more components of the system for |
| | | biosynthesis of tryptophan (EC 2.4.2.18, |
| | | EC 4.1.1.48, EC 4.1.3.27, and EC |
| | | 5.3.1.24) |
| | Prephenate dehydratase | This enzyme in the enteric bacteria also |
| | | possesses chorismate mutase activity and |
| | | converts chorismate into prephenate |
| | Carboxycyclohexadienyl | Also acts on prephenate and D- |
| | dehydratase | prephenyllactate Cf. EC 4.2.1.51 |
| | 3-dehydroquinate | The hydrogen atoms on C-7 of the |
| | synthase | substrate are retained on C-2 of the |
| | | products |
| | Chorismate synthase | Shikimate is numbered so that the |
| | | double-bond is between C-1 and C-2, but |
| | | some earlier papers numbered in the |
| | | reverse direction |
| | Phosphoribosylanthranilate | In some organisms, this enzyme is part of |
| | isomerase | a multifunctional protein together with |
| | | one or more components of the system |
| | | for biosynthesis of tryptophan (EC |
| | | 2.4.2.18, EC 4.1.1.48, EC 4.1.3.27, and |
| | | EC 4.2.1.20) |
| | Chorismate mutase | |
| | Tyrosine--tRNA ligase | |
| | Phenylalanine--tRNA | |
| | ligase | |
| Starch and sucrose | UDP-glucose 6- | Also acts on UDP-2-deoxyglucose |
| metabolism | dehydrogenase | |
| | Glucoside 3- | The enzyme acts on D-glucose, D- |
| | dehydrogenase | galactose, D-glucosides and D- |
| | | galactosides, but D-glucosides react more |
| | | rapidly than D-galactosides |
| | CDP-4-dehydro-6- | Two proteins are involved but no partial |
| | deoxyglucose reductase | reaction has been observed in the |
| | | presence of either alone |
| | Phosphorylase | The recommended name should be |
| | | qualified in each instance by adding the |
| | | name of the natural substance, e.g. |
| | | maltodextrin phosphorylase, starch |
| | | phosphorylase, glycogen phosphorylase |
| | Levansucrase | Some other sugars can act as D-fructosyl |
| | | acceptors |
| | Glycogen (starch) | The recommended name varies according |
| | synthase | to the source of the enzyme and the |
| | | nature of its synthetic product Glycogen |
| | | synthase from animal tissues is a |
| | | complex of a catalytic subunit and the |
| | | protein glycogenin The enzyme requires |
| | | glucosylated glycogenin as a primer; this |
| | | is the reaction product of EC 2.4.1.186 A |
| | | similar enzyme utilizes ADP-glucose (Cf. |
| | | EC 2.4.1.21) |
| | Cellulose synthase | Involved in the synthesis of cellulose A |
| | (UDP-forming) | similar enzyme utilizes GDP-glucose (Cf. |
| | | EC 2.4.1.29) |
| | Sucrose synthase | |
| | Sucrose-phosphate | |
| | synthase | |
| | Alpha,alpha-trehalose- | See also EC 2.4.1.36 |
| | phosphate synthase | |
| | (UDP-forming) | |
| | UDP- | Family of enzymes accepting a wide |
| | glucuronosyltransferase | range of substrates, including phenols, |
| | | alcohols, amines and fatty acids Some of |
| | | the activities catalysed were previously |
| | | listed separately as EC 2.4.1.42, EC |
| | | 2.4.1.59, EC 2.4.1.61, EC 2.4.1.76, EC |
| | | 2.4.1.77, EC 2.4.1.84, EC 2.4.1.107 and |
| | | EC 2.4.1.108 A temporary nomenclature |
| | | for the various forms whose delineation |
| | | is in a state of flux |
| | 1,4-alpha-glucan | Converts amylose into amylopectin The |
| | branching enzyme | recommended name requires a |
| | | qualification depending on the product, |
| | | glycogen or amylopectin, e.g. glycogen |
| | | branching enzyme, amylopectin |
| | | branching enzyme. The latter has |
| | | frequently been termed Q-enzyme |
| | Cellobiose | |
| | phosphorylase | |
| | Starch (bacterial | The recommended name various |
| | glycogen) synthase | according to the source of the enzyme |
| | | and the nature of its synthetic product, |
| | | e.g. starch synthase, bacterial glycogen |
| | | synthase A similar enzyme utilizes UDP- |
| | | glucose (Cf. EC 2.4.1.11) |
| | 4-alpha- | An enzymic activity of this nature forms |
| | glucanotransferase | part of the mammalian and Yeast |
| | | glycogen branching system (see EC |
| | | 3.2.1.33) |
| | Cellulose synthase | Involved in the synthesis of cellulose A |
| | (GDP-forming) | similar enzyme utilizes UDP-glucose (Cf. |
| | | EC 2.4.1.12) |
| | 1,3-beta-glucan | |
| | synthase | |
| | Phenol beta- | Acts on a wide range of phenols |
| | glucosyltransferase | |
| | Amylosucrase | |
| | Polygalacturonate 4- | |
| | alpha- | |
| | galacturonosyltransferase | |
| | Dextransucrase | |
| | Alpha,alpha-trehalose | |
| | phosphorylase | |
| | Sucrose phosphorylase | In the forward reaction, arsenate may |
| | | replace phosphate In the reverse reaction |
| | | various ketoses and L-arabinose may |
| | | replace D-fructose |
| | Maltose phosphorylase | |
| | 1,4-beta-D-xylan | |
| | synthase | |
| | Hexokinase | D-glucose, D-mannose, D-fructose, |
| | | sorbitol and D-glucosamine can act as |
| | | acceptors ITP and dATP can act as |
| | | donors The liver isoenzyme has |
| | | sometimes been called glucokinase |
| | Phosphoglucokinase | |
| | Glucose-1,6- | D-glucose 6-phosphate can act as |
| | bisphosphate synthase | acceptor, forming D-glucose 1,6- |
| | | bisphosphate |
| | Glucokinase | A group of enzymes found in |
| | | invertebrates and microorganisms highly |
| | | specific for glucose |
| | Fructokinase | |
| | Glucose-1-phosphate | |
| | phosphodismutase | |
| | Protein-N(PI)- | Comprises a group of related enzymes |
| | phosphohistidine-sugar | The protein substrate is a phosphocarrier |
| | phosphotransferase | protein of low molecular mass (9.5 Kd) A |
| | | phosphoenzyme intermediate is formed |
| | | The enzyme translocates the sugar it |
| | | phosphorylates into bacteria Aldohexoses |
| | | and their glycosides and alditols are |
| | | phosphorylated on O-6; fructose and |
| | | sorbose on O-1 Glycerol and |
| | | disaccharides are also substrates |
| | Glucose-1-phosphate | |
| | adenylyltransferase | |
| | Glucose-1-phosphate | |
| | cytidylyltransferase | |
| | Glucose-1-phosphate | Also acts, more slowly, on D-mannose 1- |
| | guanylyltransferase | phosphate |
| | UTP--glucose-1- | |
| | phosphate | |
| | uridylyltransferase | |
| | Pectinesterase | |
| | Trehalose-phosphatase | |
| | Sucrose-phosphatase | |
| | Glucose-6-phosphatase | Wide distribution in animal tissues Also |
| | | catalyses potent transphosphorylations |
| | | from carbamoyl phosphate, hexose |
| | | phosphates, pyrophosphate, |
| | | phosphoenolpyruvate and nucleoside di- |
| | | and triphosphates, to D-glucose, D- |
| | | mannose, 3-methyl-D-glucose, or 2- |
| | | deoxy-D-glucose (cf. EC 2.7.1.62, EC |
| | | 2.7.1.79, and EC 3.9.1.1) |
| | Alpha-amylase | Acts on starch, glycogen and related |
| | | polysaccharides and oligosaccharides in a |
| | | random manner; reducing groups are |
| | | liberated in the alpha-configuration |
| | Oligo-1,6-glucosidase | Also hydrolyses palatinose The enzyme |
| | | from intestinal mucosa is a single |
| | | polypeptide chain also catalysing the |
| | | reaction of EC 3.2.1.48 |
| | Maltose-6[PRIME]- | Hydrolyses a variety of 6-phospho-D- |
| | phosphate glucosidase | glucosides, including maltose 6- |
| | | phosphate, alpha[PRIME]alpha-trehalose |
| | | 6-phosphate, sucrose 6-phosphate and p- |
| | | nitrophenyl-alpha-D-glucopyranoside 6- |
| | | phosphate (as a chromogenic substrate) |
| | | The enzyme is activated by Fe(II), |
| | | Mn(II), Co(II) and Ni(II). It is rapidly |
| | | inactivated in air |
| | Polygalacturonase | |
| | Beta-amylase | Acts on starch, glycogen and related |
| | | polysaccharides and oligosaccharides |
| | | producing beta-maltose by an inversion |
| | Alpha-glucosidase | Group of enzymes whose specificity is |
| | | directed mainly towards the |
| | | exohydrolysis of 1,4-alpha-glucosidic |
| | | linkages, and that hydrolyse |
| | | oligosaccharides rapidly, relative to |
| | | polysaccharides, which are hydrolysed |
| | | relatively slowly, or not at all The |
| | | intestinal enzyme also hydrolyses |
| | | polysaccharides, catalysing the reactions |
| | | of EC 3.2.1.3, and, more slowly, |
| | | hydrolyses 1,6-alpha-D-glucose links |
| | Beta-glucosidase | Wide specificity for beta-D-glucosides. |
| | | Some examples also hydrolyse one or |
| | | more of the following: beta-D- |
| | | galactosides, alpha-L-arabinosides, beta- |
| | | D-xylosides, and beta-D-fucosides |
| | Beta-fructofuranosidase | Substrates include sucrose Also catalyses |
| | | fructotransferase reactions |
| | Alpha,alpha-trehalase | |
| | Glucan 1,4-alpha- | Most forms of the enzyme can rapidly |
| | glucosidase | hydrolyse 1,6-alpha-D-glucosidic bonds |
| | | when the next bond in sequence is 1,4, |
| | | and some preparations of this enzyme |
| | | hydrolyse 1,6- and 1,3-alpha-D- |
| | | glucosidic bonds in other polysaccharides |
| | | This entry covers all such enzymes acting |
| | | on polysaccharides more rapidly than on |
| | | oligosaccharides EC 3.2.1.20 from |
| | | mammalian intestine can catalyse similar |
| | | reactions |
| | Beta-glucuronidase | |
| | Amylo-1,6-glucosidase | In mammals and yeast this enzyme is |
| | | linked to a glycosyltransferase similar to |
| | | EC 2.4.1.25; together these two activities |
| | | constitute the glycogen debranching |
| | | system |
| | Xylan 1,4-beta- | Also hydrolyses xylobiose Some other |
| | xylosidase | exoglycosidase activities have been |
| | | found associated with this enzyme in |
| | | sheep liver |
| | Glucan endo-1,3-beta- | Very limited action on mixed-link (1,3- |
| | D-glucosidase | 1,4-)-beta-D-glucans Hydrolyses |
| | | laminarin, paramylon and pachyman |
| | | Different from EC 3.2.1.6 |
| | Cellulase | Will also hydrolyse 1,4-linkages in beta- |
| | | D-glucans also containing 1,3-linkages |
| | Sucrose alpha- | This enzyme is isolated from intestinal |
| | glucosidase | mucosa as a single polypeptide chain also |
| | | displaying activity towards isomaltose |
| | | (oligo-1,6-glucosidase, cf. EC 3.2.1.10) |
| | Cyclomaltodextrinase | Also hydrolyses linear maltodextrin |
| | Glucan 1,3-beta- | Acts on oligosaccharides but very slowly |
| | glucosidase | on laminaribiose |
| | Levanase | |
| | Galacturan 1,4-alpha- | |
| | galacturonidase | |
| | Glucan 1,4-beta- | Acts on 1,4-beta-D-glucans and related |
| | glucosidase | oligosaccharides Cellobiose is |
| | | hydrolysed, very slowly |
| | Cellulose 1,4-beta- | |
| | cellobiosidase | |
| | Alpha,alpha- | |
| | phosphotrehalase | |
| | ADP-sugar | Has a distinct specificity from the UDP- |
| | diphosphatase | sugar pyrophosphatase (EC 3.6.1.45) |
| | Nucleotide | Substrates include NAD(+), NADP(+), |
| | pyrophosphatase | FAD, CoA and also ATP and ADP |
| | UDP-glucuronate | |
| | decarboxylase | |
| | CDP-glucose 4,6- | |
| | dehydratase | |
| | CDP-abequose | |
| | epimerase | |
| | UDP-glucuronate 4- | |
| | epimerase | |
| | Glucose-6-phosphate | Also catalyses the anomerization of D- |
| | isomerase | glucose 6-phosphate |
| | Phosphoglucomutase | Maximum activity is only obtained in the |
| | | presence of alpha-D-glucose 1,6- |
| | | bisphosphate. This bisphosphate is an |
| | | intermediate in the reaction, being |
| | | formed by transfer of a phosphate residue |
| | | from the enzyme to the substrate, but the |
| | | dissociation of bisphosphate from the |
| | | enzyme complex is much slower than the |
| | | overall isomerization Also, more slowly, |
| | | catalyses the interconversion of 1- |
| | | phosphate and 6-phosphate isomers of |
| | | many other alpha-D-hexoses, and the |
| | | interconversion of alpha-D-ribose 1- |
| | | phosphate and 5-phosphate |
| | Beta- | |
| | phosphoglucomutase | |
| | Maltose alpha-D- | |
| | glucosyltransferase | |
| Tryptophan metabolism | Indole-3-lactate | |
| | dehydrogenase | |
| | Indole-3-acetaldehyde | |
| | reductase (NADH) | |
| | Indole-3-acetaldehyde | |
| | reductase (NADPH) | |
| | 3-hydroxyacyl-CoA | Also oxidizes S-3-hydroxyacyl-N- |
| | dehydrogenase | acylthioethanolamine and S-3- |
| | | hydroxyacylhydrolipoate Some enzymes |
| | | act, more slowly, with NADP(+) Broad |
| | | specificity to acyl chain-length (cf. EC |
| | | 1.1.1.211) |
| | O-aminophenol oxidase | Isophenoxazine may be formed by a |
| | | secondary condensation from the initial |
| | | oxidation product |
| | Catalase | This enzyme can also act as a peroxidase |
| | | (EC 1.11.1.7) for which several organic |
| | | substances, especially ethanol, can act as |
| | | a hydrogen donor A manganese protein |
| | | containing Mn(III) in the resting state, |
| | | which also belongs here, is often called |
| | | pseudocatalase Enzymes from some |
| | | microorganisms, such as Penicillium |
| | | simplicissimum, which exhibit both |
| | | catalase and peroxidase activity, have |
| | | sometimes been referred to as catalase- |
| | | peroxidase |
| | 7,8- | |
| | dihydroxykynurenate | |
| | 8,8A-dioxygenase | |
| | Tryptophan 2,3- | Broad specificity towards tryptamine and |
| | dioxygenase | derivatives including D- and L- |
| | | tryptophan, 5-hydroxytryptophan and |
| | | serotonin |
| | Indole 2,3-dioxygenase | The enzyme from jasminum is a |
| | | flavoprotein containing copper, and |
| | | forms anthranilate as the final product |
| | | One enzyme from Tecoma stans is also a |
| | | flavoprotein containing copper and uses |
| | | three atoms of oxygen per molecule of |
| | | indole, to form anthranil (3,4- |
| | | benzisoxazole) A second enzyme from |
| | | Tecoma stans, which is not a |
| | | flavoprotein, uses four atoms of oxygen |
| | | and forms anthranilate as the final |
| | | product |
| | 2,3-dihydroxyindole | |
| | 2,3-dioxygenase | |
| | Indoleamine-pyrrole | Acts on many substituted and |
| | 2,3-dioxygenase | unsubstituted indoleamines, including |
| | | melatonin Involved in the degradation of |
| | | melatonin |
| | 3-hydroxyanthranilate | The product of the reaction |
| | 3,4-dioxygenase | spontaneously rearrange to quinolinic |
| | | acid (quin) |
| | Tryptophan 2- | |
| | monooxygenase | |
| | Tryptophan 2[PRIME]- | Acts on a number of indolyl-3-alkane |
| | dioxygenase | derivatives, oxidizing the 3-side-chain in |
| | | the 2[PRIME]-position. Best substrates |
| | | are L-tryptophan and 5-hydroxy-L- |
| | | tryptophan |
| | Kynurenine 3- | |
| | monooxygenase | |
| | Unspecific | Acts on a wide range of substrates |
| | monooxygenase | including many xenobiotics, steroids, |
| | | fatty acids, vitamins and prostaglandins |
| | | Reactions catalysed include |
| | | hydroxylation, epoxidation, N-oxidation, |
| | | sulfooxidation, N-, S- and O- |
| | | dealkylations, desulfation, deamination, |
| | | and reduction of azo, nitro, and N-oxide |
| | | groups |
| | Anthranilate 3- | |
| | monooxygenase | |
| | Tryptophan 5- | Activated by phosphorylation, catalysed |
| | monooxygenase | by a CA(2+)-activated protein kinase |
| | Kynurenine 7,8- | |
| | hydroxylase | |
| | Aldehyde | Wide specificity, including oxidation of |
| | dehydrogenase (NAD+) | D-glucuronolactone to D-glucarate |
| | Aminomuconate- | Also acts on 2-hydroxymuconate |
| | semialdehyde | semialdehyde |
| | dehydrogenase | |
| | Aldehyde oxidase | Also oxidizes quinoline and pyridine |
| | | derivatives May be identical with EC |
| | | 1.1.3.22 |
| | Indole-3-acetaldehyde | Also oxidizes indole-3-aldehyde and |
| | oxidase | acetaldehyde, more slowly |
| | Oxoglutarate | Component of the multienzyme 2- |
| | dehydrogenase | oxoglutarate dehydrogenase complex |
| | (lipoamide) | |
| | Kynurenate-7,8- | |
| | dihydrodiol | |
| | dehydrogenase | |
| | Glutaryl-CoA | |
| | dehydrogenase | |
| | L-amino acid oxidase | |
| | Amine oxidase (flavin- | Acts on primary amines, and usually also |
| | containing) | on secondary and tertiary amines |
| | Amine oxidase (copper- | A group of enzymes including those |
| | containing) | oxidizing primary amines, diamines and |
| | | histamine One form of EC 1.3.1.15 from |
| | | rat kidney also catalyses this reaction |
| | Acetylindoxyl oxidase | |
| | Acetylserotonin O- | Some other hydroxyindoles also act as |
| | methyltransferase | acceptor, more slowly |
| | Indole-3-pyruvate C- | |
| | methyltransferase | |
| | Amine N- | A wide range of primary, secondary, and |
| | methyltransferase | tertiary amines can act as acceptors, |
| | | including tryptamine, aniline, nicotine |
| | | and a variety of drugs and other |
| | | xenobiotics |
| | Aralkylamine N- | Narrow specificity towards |
| | acetyltransferase | aralkylamines, including serotonin Not |
| | | identical with EC 2.3.1.5 |
| | Acetyl-CoA C- | |
| | acetyltransferase | |
| | Tryptophan | Also acts on 5-hydroxytryptophan and, to |
| | aminotransferase | a lesser extent on the phenyl amino acids |
| | Kynurenine-- | Also acts on 3-hydroxykynurenine |
| | oxoglutarate | |
| | aminotransferase | |
| | Thioglucosidase | Has a wide specificity for thioglycosides |
| | Amidase | |
| | Formamidase | Also acts, more slowly, on acetamide, |
| | | propanamide and butanamide |
| | Arylformamidase | Also acts on other aromatic |
| | | formylamines |
| | Nitrilase | Acts on a wide range of aromatic nitriles |
| | | including (indole-3-yl)-acetonitrile and |
| | | also on some aliphatic nitriles, and on the |
| | | corresponding acid amides (cf. EC |
| | | 4.2.1.84) |
| | Kynureninase | Also acts on 3[PRIME]- |
| | | hydroxykynurenine and some other (3- |
| | | arylcarbonyl)-alanines |
| | Aromatic-L-amino-acid | Also acts on L-tryptophan, 5-hydroxy-L- |
| | decarboxylase | tryptophan and dihydroxy-L- |
| | | phenylalanine (DOPA) |
| | Phenylpyruvate | Also acts on indole-3-pyruvate |
| | decarboxylase | |
| | Aminocarboxymuconate- | The product rearranges non-enzymically |
| | semialdehyde | to picolinate |
| | decarboxylase | |
| | Tryptophanase | Also catalyses the synthesis of |
| | | tryptophan from indole and serine Also |
| | | catalyses 2,3-elimination and beta- |
| | | replacement reactions of some indole- |
| | | substituted tryptophan analogs of L- |
| | | cysteine, L-serine and other 3-substituted |
| | | amino acids |
| | Enoyl-CoA hydratase | Acts in the reverse direction With cis- |
| | | compounds, yields (3R)-3-hydroxyacyl- |
| | | CoA (cf. EC 4.2.1.74) |
| | Nitrile hydratase | Acts on short-chain aliphatic nitriles, |
| | | converting them into the corresponding |
| | | acid amides Does not act on these amides |
| | | or on aromatic nitriles (cf EC 3.5.5.1) |
| | Tryptophan--tRNA | |
| | ligase | |
| Tyrosine metabolism | Alcohol dehydrogenase | Acts on primary or secondary alcohols or |
| | | hemiacetals The animal, but not the |
| | | yeast, enzyme acts also on cyclic |
| | | secondary alcohols |
| | (R)-4- | Also acts, more slowly, on (R)-3- |
| | hydroxyphenyllactate | phenyllactate, (R)-3-(indole-3-yl)lactate |
| | dehydrogenase | and (R)-lactate |
| | Hydroxyphenylpyruvate | Also acts on 3-(3,4- |
| | reductase | dihydroxyphenyl)lactate Involved with |
| | | EC 2.3.1.140 in the biosynthesis of |
| | | rosmarinic acid |
| | Aryl-alcohol | A group of enzymes with broad |
| | dehydrogenase | specificity towards primary alcohols with |
| | | an aromatic or cyclohex-1-ene ring, but |
| | | with low or no activity towards short- |
| | | chain aliphatic alcohols |
| | Catechol oxidase | Also acts on a variety of substituted |
| | | catechols Many of these enzymes also |
| | | catalyse the reaction listed under EC |
| | | 1.14.18.1; this is especially true for the |
| | | classical tyrosinase |
| | Iodide peroxidase | |
| | 3,4- | |
| | dihydroxyphenylacetate | |
| | 2,3-dioxygenase | |
| | 4- | |
| | hydroxyphenylpyruvate | |
| | dioxygenase | |
| | Stizolobate synthase | The intermediate product undergoes ring |
| | | closure and oxidation, with NAD(P)(+) |
| | | as acceptor, to stizolobic acid |
| | Stizolobinate synthase | The intermediate product undergoes ring |
| | | closure and oxidation, with NAD(P)(+) |
| | | as acceptor, to stizolobinic acid |
| | Gentisate 1,2- | |
| | dioxygenase | |
| | Homogentisate 1,2- | |
| | dioxygenase | |
| | 4-hydroxyphenylacetate | Also acts on 4-hydroxyhydratropate |
| | 1-monooxygenase | forming 2-methylhomogentisate and on |
| | | 4-hydroxyphenoxyacetate forming |
| | | hydroquinone and glycolate |
| | 4-hydroxyphenylacetate | |
| | 3-monooxygenase | |
| | Tyrosine N- | |
| | monooxygenase | |
| | Hydroxyphenylacetonitrile | |
| | 2-monooxygenase | |
| | Tyrosine 3- | Activated by phosphorylation, catalysed |
| | monooxygenase | by EC 2.7.1.128 |
| | Dopamine-beta- | Stimulated by fumarate |
| | monooxygenase | |
| | Monophenol | A group of copper proteins that also |
| | monooxygenase | catalyse the reaction of EC 1.10.3.1, if |
| | | only 1,2-benzenediols are available as |
| | | substrate |
| | Succinate- | |
| | semialdehyde | |
| | dehydrogenase | |
| | (NAD(P)+) | |
| | Aryl-aldehyde | Oxidizes a number of aromatic |
| | dehydrogenase | aldehydes, but not aliphatic aldehydes |
| | Aldehyde | Wide specificity, including oxidation of |
| | dehydrogenase (NAD+) | D-glucuronolactone to D-glucarate |
| | 4-carboxy-2- | Does not act on unsubstituted aliphatic or |
| | hydroxymuconate-6- | aromatic aldehydes or glucose NAD(+) |
| | semialdehyde | can replace NADP(+), but with lower |
| | dehydrogenase | affinity |
| | Aldehyde | |
| | dehydrogenase | |
| | (NAD(P)+) | |
| | 4- | With EC 4.2.1.87, brings about the |
| | hydroxyphenylacetalde | metabolism of octopamine in |
| | hyde dehydrogenase | Pseudomonas |
| | Aldehyde oxidase | Also oxidizes quinoline and pyridine |
| | | derivatives May be identical with EC |
| | | 1.1.3.22 |
| | L-amino acid oxidase | |
| | Amine oxidase (flavin- | Acts on primary amines, and usually also |
| | containing) | on secondary and tertiary amines |
| | Amine oxidase (copper- | A group of enzymes including those |
| | containing) | oxidizing primary amines, diamines and |
| | | histamine One form of EC 1.3.1.15 from |
| | | rat kidney also catalyses this reaction |
| | Aralkylamine | Phenazine methosulfate can act as |
| | dehydrogenase | acceptor Acts on aromatic amines and, |
| | | more slowly, on some long-chain |
| | | aliphatic amines, but not on methylamine |
| | | or ethylamine (cf EC 1.4.99.3) |
| | Phenol O- | Acts on a wide variety of simple alkyl-, |
| | methyltransferase | methoxy- and halo-phenols |
| | Tyramine N- | Has some activity on phenylethylamine |
| | methyltransferase | analogs |
| | Phenylethanolamine N- | Acts on various phenylethanolamines; |
| | methyltransferase | converts noradrenalin into adrenalin |
| | Catechol O- | The mammalian enzymes act more |
| | methyltransferase | rapidly on catecholamines such as |
| | | adrenaline or noradrenaline than on |
| | | catechols |
| | Glutamine N- | |
| | phenylacetyltransferase | |
| | Rosmarinate synthase | Involved with EC 1.1.1.237 in the |
| | | biosynthesis of rosmarinic acid |
| | Hydroxymandelonitrile | 3,4-dihydroxymandelonitrile can also act |
| | glucosyltransferase | as acceptor |
| | Aspartate | Also acts on L-tyrosine, L-phenylalanine |
| | aminotransferase | and L-tryptophan. This activity can be |
| | | formed from EC 2.6.1.57 by controlled |
| | | proteolysis |
| | Dihydroxyphenylalanine | |
| | aminotransferase | |
| | Tyrosine | L-phenylalanine can act instead of L- |
| | aminotransferase | tyrosine The mitochondrial enzyme may |
| | | be identical with EC 2.6.1.1 The three |
| | | isoenzymic forms are interconverted by |
| | | EC 3.4.22.4 |
| | Aromatic amino acid | L-methionine can also act as donor, more |
| | transferase | slowly Oxaloacetate can act as acceptor |
| | | Controlled proteolysis converts the |
| | | enzyme to EC 2.6.1.1 |
| | Histidinol-phosphate | |
| | aminotransferase | |
| | Fumarylacetoacetase | Also acts on other 3,5- and 2,4-dioxo |
| | | acids |
| | Acylpyruvate hydrolase | Acts on formylpyruvate, 2,4- |
| | | dioxopentanoate, 2,4-dioxohexanoate and |
| | | 2,4-dioxoheptanoate |
| | Tyrosine decarboxylase | The bacterial enzyme also acts on 3- |
| | | hydroxytyrosine and, more slowly, on 3- |
| | | hydroxyphenylalanine |
| | Aromatic-L-amino-acid | Also acts on L-tryptophan, 5-hydroxy-L- |
| | decarboxylase | tryptophan and dihydroxy-L- |
| | | phenylalanine (DOPA) |
| | Gentisate | |
| | decarboxylase | |
| | 5-oxopent-3-ene-1,2,5- | |
| | tricarboxylate | |
| | decarboxylase | |
| | Tyrosine phenol-lyase | Also slowly catalyses pyruvate formation |
| | | from D-tyrosine, S-methyl-L-cysteine, |
| | | L-cysteine, L-serine and D-serine |
| | (S)-norcoclaurine | The reaction makes a 6-membered ring |
| | synthase | by forming a bond between C-6 of the |
| | | 3,4-dihydroxyphenyl group of the |
| | | dopamine and C-1 of the aldehyde in the |
| | | imine formed between the substrates The |
| | | product is the precursor of the |
| | | benzylisoquinoline alkaloids in plants |
| | | Will also catalyse the reaction of 4-(2- |
| | | aminoethyl)benzene-1,2-diol + (3,4- |
| | | dihydroxyphenyl)acetaldehyde to form |
| | | (S)-norlaudanosoline, but this alkaloid |
| | | has not been found to occur in plants |
| | Dihydroxyphenylalanine | |
| | ammonia-lyase | |
| | Phenylalanine | May also act on L-tyrosine |
| | ammonia-lyase | |
| | Maleylacetoacetate | Also acts on maleylpyruvate |
| | isomerase | |
| | Maleylpyruvate | |
| | isomerase | |
| | Phenylpyruvate | Also acts on other arylpyruvates |
| | tautomerase | |
| | 5-carboxymethyl-2- | |
| | hydroxymuconate | |
| | delta-isomerase | |
| | Tyrosine 2,3- | |
| | aminomutase | |
| | Phenylacetate--CoA | Also acts, more slowly, on acetate, |
| | ligase | propanoate and butanoate, but not on |
| | | hydroxy derivatives of phenylacetate and |
| | | related compounds |

### VII. Promoters as Sentinels

[2016] Useful promoters include those that are capable of facilitating preferential transcription, i.e. tissue-specific or developmentally regulated gene expression and being a component of facile systems to evaluate the metabolic/physiological state of a plant cell, tissue or organ. Many such promoters are included in this application. Operably linking a sequence to these promoters that can act as a reporter and inserting the construct into a plant allows detection of the preferential in plantar transcription. For example, the quantitative state of responses to environmental conditions can be detected by using a plant having a construct that contains a stress-inducible promoter linked to and controlling expression of a sequence encoding GFP. The greater the stress promoter is induced, the greater the levels of fluorescence from GFP will be produced and this provides a measure of the level of stress being expressed by the plant and/or the ability of the plant to respond internally to the stress.

[2017] More specifically, using this system the activities of any metabolic pathway (catabolic and anabolic), stress-related pathways as on any plant gene repeated activity can be monitored. In addition, assays can be developed using this sentinel system to select for superior genotypes with greater yield characteristics or to select for plants with altered responses to chemical, herbicide, or plant growth regulators or to identify chemical, herbicides or plant growth regulators by their response on such sentinels.

[2018] Specifically, a promoter that is regulated in plants in the desired way, is operably linked to a reporter such as GFP, RFP, etc., and the constructs are introduced into the plant of interest. The behavior of the reporter is monitored using technologies typically specific for that reporter. With GFP, RFP, etc., it could typically be by microscopy of whole plants, organs, tissues or cells under excitation by an appropriate wavelength of UV light.

### VIII. How to Make Different Embodiments of the Invention

[2019] The invention relates to (I) polynucleotides and methods of use thereof, such as

[2020] IA. Probes, Primers and Substrates;

[2021] IB. Methods of Detection and Isolation;
[2022] B.1. Hybridization;
[2023] B.2. Methods of Mapping;
[2024] B.3. Southern Blotting;
[2025] B.4. Isolating cDNA from Related Organisms;
[2026] B.5. Isolating and/or Identifying Orthologous Genes

[2027] IC. Methods of Inhibiting Gene Expression
[2028] C.1. Antisense
[2029] C.2. Ribozyme Constructs;
[2030] C.3. Chimeraplasts;
[2031] C.4 Co-Suppression;
[2032] C.5. Transcriptional Silencing
[2033] C.6. Other Methods to Inhibit Gene Expression

[2034] ID. Methods of Functional Analysis;

[2035] IE. Promoter Sequences and Their Use;

[2036] IF. UTRs and/or Intron Sequences and Their Use; and

[2037] IG. Coding Sequences and Their Use.

[2038] The invention also relates to (II) polypeptides and proteins and methods of use thereof, such as

[2039] IIA. Native Polypeptides and Proteins
[2040] A.1 Antibodies
[2041] A.2 In Vitro Applications

[2042] IIB. Polypeptide Variants, Fragments and Fusions
[2043] B.1 Variants
[2044] B.2 Fragments
[2045] B.3 Fusions

[2046] The invention also includes (III) methods of modulating polypeptide production, such as

[2047] IIIA. Suppression
[2048] A.1 Antisense
[2049] A.2 Ribozymes
[2050] A.3 Co-suppression
[2051] A.4 Insertion of Sequences into the Gene to be Modulated
[2052] A.5 Promoter Modulation
[2053] A.6 Expression of Genes containing Dominant-Negative Mutations

[2054] IIIB. Enhanced Expression
[2055] B.1 Insertion of an Exogenous Gene
[2056] B.2 Promoter Modulation

[2057] The invention further concerns (IV) gene constructs and vector construction, such as

[2058] IVA. Coding Sequences

[2059] IVB. Promoters

[2060] IVC. Signal Peptides

[2061] The invention still further relates to

[2062] V. Transformation Techniques

### I. Polynucleotides

[2063] Exemplified SDFs of the invention represent fragments of the genome of corn, wheat, rice, soybean or Arabidopsis and/or represent mRNA expressed from that genome. The isolated nucleic acid of the invention also encompasses corresponding fragments of the genome and/or cDNA complement of other organisms as described in detail below.

[2064] Polynucleotides of the invention can be isolated from polynucleotide libraries using primers comprising sequences similar to those described, in the attached Reference, Sequences Protein Group, and Protein Group Matrix Tables or complements thereof. See, for example, the methods described in Sambrook et al., supra.

[2065] Alternatively, the polynucleotides of the invention can be produced by chemical synthesis. Such synthesis methods are described below.

[2066] It is contemplated that the nucleotide sequences presented herein may contain some small percentage of errors. These errors may arise in the normal course of determination of nucleotide sequences. Sequence errors can be corrected by obtaining seeds deposited under the accession numbers cited above, propagating them, isolating genomic DNA or appropriate mRNA from the resulting plants or seeds thereof, amplifying the relevant fragment of the genomic DNA or mRNA using primers having a sequence that flanks the erroneous sequence, and sequencing the amplification product.

[2067] I.A. Probes, Primers and Substrates

[2068] SDFs of the invention can be applied to substrates for use in array applications such as, but not limited to, assays of global gene expression, for example under varying conditions of development, growth conditions. The arrays can also be used in diagnostic or forensic methods (WO95/35505, U.S. Pat. No. 5,445,943 and U.S. Pat. No. 5,410,270).

[2069] Probes and primers of the instant invention will hybridize to a polynucleotide comprising a sequence in or encoded by those in the Reference, Sequence, Protein Group, and Protein Group Matrix tables or fragments or complement thereof. Though many different nucleotide sequences can encode an amino acid sequence, the sequences of the reference and Sequence table or sequences that encode polypeptides or fragments thereof described in Protein Group and Protein Group Matrix tables are generally preferred for encoding polypeptides of the invention. However, the sequence of the probes and/or primers of the instant invention need not be identical to those in the Reference and Sequence tables or the complements thereof. For example, some variation in probe or primer sequence and/or length can allow additional family members to be detected, as well as orthologous genes and more taxonomically distant related sequences. Similarly, probes and/or primers of the invention can include additional nucleotides that serve as a label for detecting the formed duplex or for subsequent cloning purposes.

[2070] Probe length will vary depending on the application. For use as primers, probes are 12-40 nucleotides, preferably 18-30 nucleotides long. For use in mapping, probes are preferably 50 to 500 nucleotides, preferably 100-250 nucleotides long. For Southern hybridizations, probes as long as several kilobases can be used as explained below.

[2071] The probes and/or primers can be produced by synthetic procedures such as the triester method of Matteucci et al. J. Am. Chem. Soc. 103:3185 (1981); or according to Urdea et al. Proc. Natl. Acad. 80:7461 (1981) or using commercially available automated oligonucleotide synthesizers.

[2072] I.B. Methods of Detection and Isolation

[2073] The polynucleotides of the invention can be utilized in a number of methods known to those skilled in the art as probes and/or primers to isolate and detect polynucleotides, including, without limitation: Southerns, Northerns, Branched DNA hybridization assays, polymerase chain reaction, and microarray assays, and variations thereof. Specific methods given by way of examples, and discussed below include:

[2074] Hybridization

[2075] Methods of Mapping

[2076] Southern Blotting

[2077] Isolating cDNA from Related Organisms

[2078] Isolating and/or Identifying Orthologous Genes.

Also, the nucleic acid molecules of the invention can used in other methods, such as high density oligonucleotide hybridizing assays, described, for example, in U.S. Pat. Nos. 6,004,753; 5,945,306; 5,945,287; 5,945,308; 5,919,686; 5,919,661; 5,919,627; 5,874,248; 5,871,973; 5,871,971; and 5,871,930; and PCT Pub. Nos. WO 9946380; WO 9933981; WO 9933870; WO 9931252; WO 9915658; WO 9906572; WO 9858052; WO 9958672; and WO 9810858.

[2079] B.1. Hybridization

[2080] The isolated SDFs of the Reference and Sequence tables or SDFs encoding polypeptides of the Protein Group and Protein Group Matrix tables or fragments thereof of the present invention can be used as probes and/or primers for detection and/or isolation of related polynucleotide sequences through hybridization. Hybridization of one nucleic acid to another constitutes a physical property that defines the subject SDF of the invention and the identified related sequences. Also, such hybridization imposes structural limitations on the pair. A good general discussion of the factors for determining hybridization conditions is provided by Sambrook et al. (“Molecular Cloning, a Laboratory Manual, 2nd ed., c. 1989 by Cold Spring Harbor Laboratory Press, Cold Spring Harbor, N.Y.; see esp., chapters 11 and 12). Additional considerations and details of the physical chemistry of hybridization are provided by G. H. Keller and M. M. Manak “DNA Probes”, 2^{nd} Ed. pp. 1-25, c. 1993 by Stockton Press, New York, N.Y.

[2081] Depending on the stringency of the conditions under which these probes and/or primers are used, polynucleotides exhibiting a wide range of similarity to those in the Reference and Sequence or encoding polypeptides of the Protein Group and Protein Group Matrix tables or fragments thereof can be detected or isolated. When the practitioner wishes to examine the result of membrane hybridizations under a variety of stringencies, an efficient way to do so is to perform the hybridization under a low stringency condition, then to wash the hybridization membrane under increasingly stringent conditions.

[2082] When using SDFs to identify orthologous genes in other species, the practitioner will preferably adjust the amount of target DNA of each species so that, as nearly as is practical, the same number of genome equivalents are present for each species examined. This prevents faint signals from species having large genomes, and thus small numbers of genome equivalents per mass of DNA, from erroneously being interpreted as absence of the corresponding gene in the genome.

[2083] The probes and/or primers of the instant invention can also be used to detect or isolate nucleotides that are “identical” to the probes or primers. Two nucleic acid sequences or polypeptides are said to be “identical” if the sequence of nucleotides or amino acid residues, respectively, in the two sequences is the same when aligned for maximum correspondence as described below.

[2084] Isolated polynucleotides within the scope of the invention also include allelic variants of the specific sequences presented in the Reference, Sequence, Protein Group, and Protein Group Matrix tables. The probes and/or primers of the invention can also be used to detect and/or isolate polynucleotides exhibiting at least 80% sequence identity with the sequences of the reference, Sequence or encoding polypeptides of the Protein Group and Protein Group Matrix tables or fragments thereof.

[2085] With respect to nucleotide sequences, degeneracy of the genetic code provides the possibility to substitute at least one base of the base sequence of a gene with a different base without causing the amino acid sequence of the polypeptide produced from the gene to be changed. Hence, the DNA of the present invention may also have any base sequence that has been changed from a sequence in the Reference, Sequence, Protein Group, and Protein Group Matrix tables by substitution in accordance with degeneracy of genetic code. References describing codon usage include: Carels et al., J. Mol. Evol. 46: 45 (1998) and Fennoy et al., Nucl. Acids Res. 21(23): 5294 (1993).

[2086] B.2. Mapping

[2087] The isolated SDF DNA of the invention can be used to create various types of genetic and physical maps of the genome of corn, Arabidopsis, soybean, rice, wheat, or other plants. Some SDFs may be absolutely associated with particular phenotypic traits, allowing construction of gross genetic maps. While not all SDFs will immediately be associated with a phenotype, all SDFs can be used as probes for identifying polymorphisms associated with phenotypes of interest. Briefly, one method of mapping involves total DNA isolation from individuals. It is subsequently cleaved with one or more restriction enzymes, separated according to mass, transferred to a solid support, hybridized with SDF DNA and the pattern of fragments compared. Polymorphisms associated with a particular SDF are visualized as differences in the size of fragments produced between individual DNA samples after digestion with a particular restriction enzyme and hybridization with the SDF. After identification of polymorphic SDF sequences, linkage studies can be conducted. By using the individuals showing polymorphisms as parents in crossing programs, F2 progeny recombinants or recombinant inbreds, for example, are then analyzed. The order of DNA polymorphisms along the chromosomes can be determined based on the frequency with which they are inherited together versus independently. The closer two polymorphisms are together in a chromosome the higher the probability that they are inherited together. Integration of the relative positions of all the polymorphisms and associated marker SDFs can produce a genetic map of the species, where the distances between markers reflect the recombination frequencies in that chromosome segment.

[2088] The use of recombinant inbred lines for such genetic mapping is described for Arabidopsis by Alonso-Blanco et al. (Methods in Molecular Biology, vol. 82, “Arabidopsis Protocols”, pp. 137-146, J. M. Martinez-Zapater and J. Salinas, eds., c. 1998 by Humana Press, Totowa, N.J.) and for corn by Burr (“Mapping Genes with Recombinant Inbreds”, pp. 249-254. In Freeling, M. and V. Walbot (Ed.), The Maize Handbook, c. 1994 by Springer-Verlag New York, Inc.: New York, N.Y., USA; Berlin Germany; Burr et al. Genetics (1998) 118: 519; Gardiner, J. et al., (1993) Genetics 134: 917). This procedure, however, is not limited to plants and can be used for other organisms (such as yeast) or for individual cells.

[2089] The SDFs of the present invention can also be used for simple sequence repeat (SSR) mapping. Rice SSR mapping is described by Morgante et al. (The Plant Journal (1993) 3: 165), Panaud et al. (Genome (1995) 38: 1170); Senior et al. (Crop Science (1996) 36: 1676), Taramino et al. (Genome (1996) 39: 277) and Ahn et al. (Molecular and General Genetics (1993) 241: 483-90). SSR mapping can be achieved using various methods. In one instance, polymorphisms are identified when sequence specific probes contained within an SDF flanking an SSR are made and used in polymerase chain reaction (PCR) assays with template DNA from two or more individuals of interest. Here, a change in the number of tandem repeats between the SSR-flanking sequences produces differently sized fragments (U.S. Pat. No. 5,766,847). Alternatively, polymorphisms can be identified by using the PCR fragment produced from the SSR-flanking sequence specific primer reaction as a probe against Southern blots representing different individuals (U. H. Refseth et al., (1997) Electrophoresis 18: 1519).

[2090] Genetic and physical maps of crop species have many uses. For example, these maps can be used to devise positional cloning strategies for isolating novel genes from the mapped crop species. In addition, because the genomes of closely related species are largely syntenic (that is, they display the same ordering of genes within the genome), these maps can be used to isolate novel alleles from relatives of crop species by positional cloning strategies.

[2091] The various types of maps discussed above can be used with the SDFs of the invention to identify Quantitative Trait Loci (QTLs). Many important crop traits, such as the solids content of tomatoes, are quantitative traits and result from the combined interactions of several genes. These genes reside at different loci in the genome, oftentimes on different chromosomes, and generally exhibit multiple alleles at each locus. The SDFs of the invention can be used to identify QTLs and isolate specific alleles as described by de Vicente and Tanksley (Genetics 134:585 (1993)). In addition to isolating QTL alleles in present crop species, the SDFs of the invention can also be used to isolate alleles from the corresponding QTL of wild relatives. Transgenic plants having various combinations of QTL alleles can then be created and the effects of the combinations measured. Once a desired allele combination has been identified, crop improvement can be accomplished either through biotechnological means or by directed conventional breeding programs (for review see Tanksley and McCouch, Science 277:1063 (1997)).

[2092] In another embodiment, the SDFs can be used to help create physical maps of the genome of corn, Arabidopsis and related species. Where SDFs have been ordered on a genetic map, as described above, they can be used as probes to discover which clones in large libraries of plant DNA fragments in YACs, BACs, etc. contain the same SDF or similar sequences, thereby facilitating the assignment of the large DNA fragments to chromosomal positions. Subsequently, the large BACs, YACs, etc. can be ordered unambiguously by more detailed studies of their sequence composition (e.g. Marra et al. (1997) Genomic Research 7:1072-1084) and by using their end or other sequences to find the identical sequences in other cloned DNA fragments. The overlapping of DNA sequences in this way allows large contigs of plant sequences to be built that, when sufficiently extended, provide a complete physical map of a chromosome. Sometimes the SDFs themselves will provide the means of joining cloned sequences into a contig.

[2093] The patent publication WO95/35505 and U.S. Pat. Nos. 5,445,943 and 5,410,270 describe scanning multiple alleles of a plurality of loci using hybridization to arrays of oligonucleotides. These techniques are useful for each of the types of mapping discussed above.

[2094] Following the procedures described above and using a plurality of the SDFs of the present invention, any individual can be genotyped. These individual genotypes can be used for the identification of particular cultivars, varieties, lines, ecotypes and genetically modified plants or can serve as tools for subsequent genetic studies involving multiple phenotypic traits.

[2095] B.3 Southern Blot Hybridization

[2096] The sequences from Reference and Sequence and those encoding polypeptides of Protein Group and Protein Group Matrix tables or fragments thereof can be used as probes for various hybridization techniques. These techniques are useful for detecting target polynucleotides in a sample or for determining whether transgenic plants, seeds or host cells harbor a gene or sequence of interest and thus might be expected to exhibit a particular trait or phenotype.

[2097] In addition, the SDFs from the invention can be used to isolate additional members of gene families from the same or different species and/or orthologous genes from the same or different species. This is accomplished by hybridizing an SDF to, for example, a Southern blot containing the appropriate genomic DNA or cDNA. Given the resulting hybridization data, one of ordinary skill in the art could distinguish and isolate the correct DNA fragments by size, restriction sites, sequence and stated hybridization conditions from a gel or from a library.

[2098] Identification and isolation of orthologous genes from closely related species and alleles within a species is particularly desirable because of their potential for crop improvement. Many important crop traits, such as the solid content of tomatoes, result from the combined interactions of the products of several genes residing at different loci in the genome. Generally, alleles at each of these loci can make quantitative differences to the trait. By identifying and isolating numerous alleles for each locus from within or different species, transgenic plants with various combinations of alleles can be created and the effects of the combinations measured. Once a more favorable allele combination has been identified, crop improvement can be accomplished either through biotechnological means or by directed conventional breeding programs (Tanksley et al. Science 277:1063 (1997)).

[2099] The results from hybridizations of the SDFs of the invention to, for example, Southern blots containing DNA from another species can also be used to generate restriction fragment maps for the corresponding genomic regions. These maps provide additional information about the relative positions of restriction sites within fragments, further distinguishing mapped DNA from the remainder of the genome.

[2100] Physical maps can be made by digesting genomic DNA with different combinations of restriction enzymes.

[2101] Probes for Southern blotting to distinguish individual restriction fragments can range in size from 15 to 20 nucleotides to several thousand nucleotides. More preferably, the probe is 100 to 1,000 nucleotides long for identifying members of a gene family when it is found that repetitive sequences would complicate the hybridization. For identifying an entire corresponding gene in another species, the probe is more preferably the length of the gene, typically 2,000 to 10,000 nucleotides, but probes 50-1,000 nucleotides long might be used. Some genes, however, might require probes up to 1,500 nucleotides long or overlapping probes constituting the full-length sequence to span their lengths.

[2102] Also, while it is preferred that the probe be homogeneous with respect to its sequence, it is not necessary. For example, as described below, a probe representing members of a gene family having diverse sequences can be generated using PCR to amplify genomic DNA or RNA templates using primers derived from SDFs that include sequences that define the gene family.

[2103] For identifying corresponding genes in another species, the next most preferable probe is a cDNA spanning the entire coding sequence, which allows all of the mRNA-coding fragment of the gene to be identified. Probes for Southern blotting can easily be generated from SDFs by making primers having the sequence at the ends of the SDF and using corn or Arabidopsis genomic DNA as a template. In instances where the SDF includes sequence conserved among species, primers including the conserved sequence can be used for PCR with genomic DNA from a species of interest to obtain a probe.

[2104] Similarly, if the SDF includes a domain of interest, that fragment of the SDF can be used to make primers and, with appropriate template DNA, used to make a probe to identify genes containing the domain. Alternatively, the PCR products can be resolved, for example by gel electrophoresis, and cloned and/or sequenced. Using Southern hybridization, the variants of the domain among members of a gene family, both within and across species, can be examined.

[2105] B.4.1 Isolating DNA from Related Organisms

[2106] The SDFs of the invention can be used to isolate the corresponding DNA from other organisms. Either cDNA or genomic DNA can be isolated. For isolating genomic DNA, a lambda, cosmid, BAC or YAC, or other large insert genomic library from the plant of interest can be constructed using standard molecular biology techniques as described in detail by Sambrook et al. 1989 (Molecular Cloning: A Laboratory Manual, 2^{nd} ed. Cold Spring Harbor Laboratory Press, New York) and by Ausubel et al. 1992 (Current Protocols in Molecular Biology, Greene Publishing, New York).

[2107] To screen a phage library, for example, recombinant lambda clones are plated out on appropriate bacterial medium using an appropriate E. coli host strain. The resulting plaques are lifted from the plates using nylon or nitrocellulose filters. The plaque lifts are processed through denaturation, neutralization, and washing treatments following the standard protocols outlined by Ausubel et al. (1992). The plaque lifts are hybridized to either radioactively labeled or non-radioactively labeled SDF DNA at room temperature for about 16 hours, usually in the presence of 50% formamide and 5×SSC (sodium chloride and sodium citrate) buffer and blocking reagents. The plaque lifts are then washed at 42° C. with 1% Sodium Dodecyl Sulfate (SDS) and at a particular concentration of SSC. The SSC concentration used is dependent upon the stringency at which hybridization occurred in the initial Southern blot analysis performed. For example, if a fragment hybridized under medium stringency (e.g., Tm−20° C.), then this condition is maintained or preferably adjusted to a less stringent condition (e.g., Tm−30° C.) to wash the plaque lifts. Positive clones show detectable hybridization e.g., by exposure to X-ray films or chromogen formation. The positive clones are then subsequently isolated for purification using the same general protocol outlined above. Once the clone is purified, restriction analysis can be conducted to narrow the region corresponding to the gene of interest. The restriction analysis and succeeding subcloning steps can be done using procedures described by, for example Sambrook et al. (1989) cited above.

[2108] The procedures outlined for the lambda library are essentially similar to those used for YAC library screening, except that the YAC clones are harbored in bacterial colonies. The YAC clones are plated out at reasonable density on nitrocellulose or nylon filters supported by appropriate bacterial medium in petri plates. Following the growth of the bacterial clones, the filters are processed through the denaturation, neutralization, and washing steps following the procedures of Ausubel et al. 1992. The same hybridization procedures for lambda library screening are followed.

[2109] To isolate cDNA, similar procedures using appropriately modified vectors are employed. For instance, the library can be constructed in a lambda vector appropriate for cloning cDNA such as λgt11. Alternatively, the cDNA library can be made in a plasmid vector. cDNA for cloning can be prepared by any of the methods known in the art, but is preferably prepared as described above. Preferably, a cDNA library will include a high proportion of full-length clones.

[2110] B. 5. Isolating and/or Identifying Orthologous Genes

[2111] Probes and primers of the invention can be used to identify and/or isolate polynucleotides related to those in the Reference, Sequence, Protein Group, and Protein Group Matrix tables. Related polynucleotides are those that are native to other plant organisms and exhibit either similar sequence or encode polypeptides with similar biological activity. One specific example is an orthologous gene. Orthologous genes have the same functional activity. As such, orthologous genes may be distinguished from homologous genes. The percentage of identity is a function of evolutionary separation and, in closely related species, the percentage of identity can be 98 to 100%. The amino acid sequence of a protein encoded by an orthologous gene can be less than 75% identical, but tends to be at least 75% or at least 80% identical, more preferably at least 90%, most preferably at least 95% identical to the amino acid sequence of the reference protein.

[2112] To find orthologous genes, the probes are hybridized to nucleic acids from a species of interest under low stringency conditions, preferably one where sequences containing as much as 40-45% mismatches will be able to hybridize. This condition is established by Tₘ−40° C. to Tm−48° C. (see below). Blots are then washed under conditions of increasing stringency. It is preferable that the wash stringency be such that sequences that are 85 to 100% identical will hybridize. More preferably, sequences 90 to 100% identical will hybridize and most preferably only sequences greater than 95% identical will hybridize. One of ordinary skill in the art will recognize that, due to degeneracy in the genetic code, amino acid sequences that are identical can be encoded by DNA sequences as little as 67% identical or less. Thus, it is preferable, for example, to make an overlapping series of shorter probes, on the order of 24 to 45 nucleotides, and individually hybridize them to the same arrayed library to avoid the problem of degeneracy introducing large numbers of mismatches.

[2113] As evolutionary divergence increases, genome sequences also tend to diverge. Thus, one of skill will recognize that searches for orthologous genes between more divergent species will require the use of lower stringency conditions compared to searches between closely related species. Also, degeneracy of the genetic code is more of a problem for searches in the genome of a species more distant evolutionarily from the species that is the source of the SDF probe sequences.

[2114] Therefore the method described in Bouckaert et al., U.S. Ser. No. 60/121,700 Atty. Dkt. No. 2750-117P, Client Dkt. No. 00010.001, filed Feb. 25, 1999, hereby incorporated in its entirety by reference, can be applied to the SDFs of the present invention to isolate related genes from plant species which do not hybridize to the corn Arabidopsis, soybean, rice, wheat, and other plant sequences of the reference, Sequence, Protein Group, and Protein Group Matrix tables.

[2115] Identification of the relationship of nucleotide or amino acid sequences among plant species can be done by comparing the nucleotide or amino acid sequences of SDFs of the present application with nucleotide or amino acid sequences of other SDFs such as those present in applications listed in the table below:

[2116] The SDFs of the invention can also be used as probes to search for genes that are related to the SDF within a species. Such related genes are typically considered to be members of a gene family. In such a case, the sequence similarity will often be concentrated into one or a few fragments of the sequence. The fragments of similar sequence that define the gene family typically encode a fragment of a protein or RNA that has an enzymatic or structural function. The percentage of identity in the amino acid sequence of the domain that defines the gene family is preferably at least 70%, more preferably 80 to 95%, most preferably 85 to 99%. To search for members of a gene family within a species, a low stringency hybridization is usually performed, but this will depend upon the size, distribution and degree of sequence divergence of domains that define the gene family. SDFs encompassing regulatory regions can be used to identify coordinately expressed genes by using the regulatory region sequence of the SDF as a probe.

[2117] In the instances where the SDFs are identified as being expressed from genes that confer a particular phenotype, then the SDFs can also be used as probes to assay plants of different species for those phenotypes.

[2118] I.C. Methods to Inhibit Gene Expression

[2119] The nucleic acid molecules of the present invention can be used to inhibit gene transcription and/or translation. Example of such methods include, without limitation:

[2120] Antisense Constructs;

[2121] Ribozyme Constructs;

[2122] Chimeraplast Constructs;

[2123] Co-Suppression;

[2124] Transcriptional Silencing; and

[2125] Other Methods of Gene Expression.

[2126] C.1 Antisense

[2127] In some instances it is desirable to suppress expression of an endogenous or exogenous gene. A well-known instance is the FLAVOR-SAVOR™ tomato, in which the gene encoding ACC synthase is inactivated by an antisense approach, thus delaying softening of the fruit after ripening. See for example, U.S. Pat. No. 5,859,330; U.S. Pat. No. 5,723,766; Oeller, et al, Science, 254:437-439 (1991); and Hamilton et al, Nature, 346:284-287 (1990). Also, timing of flowering can be controlled by suppression of the FLOWERING LOCUS C (FLC); high levels of this transcript are associated with late flowering, while absence of FLC is associated with early flowering (S. D. Michaels et al., Plant Cell 11:949 (1999). Also, the transition of apical meristem from production of leaves with associated shoots to flowering is regulated by TERMINAL FLOWER1, APETALA1 and LEAFY. Thus, when it is desired to induce a transition from shoot production to flowering, it is desirable to suppress TFL1 expression (S. J. Liljegren, Plant Cell 11:1007 (1999)). As another instance, arrested ovule development and female sterility result from suppression of the ethylene forming enzyme but can be reversed by application of ethylene (D. De Martinis et al., Plant Cell 11:1061 (1999)). The ability to manipulate female fertility of plants is useful in increasing fruit production and creating hybrids.

[2128] In the case of polynucleotides used to inhibit expression of an endogenous gene, the introduced sequence need not be perfectly identical to a sequence of the target endogenous gene. The introduced polynucleotide sequence will typically be at least substantially identical to the target endogenous sequence.

[2129] Some polynucleotide SDFs in the Reference, Sequence, Protein Group, and Protein Group Matrix tables represent sequences that are expressed in corn, wheat, rice, soybean Arabidopsis and/or other plants. Thus the invention includes using these sequences to generate antisense constructs to inhibit translation and/or degradation of transcripts of said SDFs, typically in a plant cell.

[2130] To accomplish this, a polynucleotide segment from the desired gene that can hybridize to the mRNA expressed from the desired gene (the “antisense segment”) is operably linked to a promoter such that the antisense strand of RNA will be transcribed when the construct is present in a host cell. A regulated promoter can be used in the construct to control transcription of the antisense segment so that transcription occurs only under desired circumstances.

[2131] The antisense segment to be introduced generally will be substantially identical to at least a fragment of the endogenous gene or genes to be repressed. The sequence, however, need not be perfectly identical to inhibit expression. Further, the antisense product may hybridize to the untranslated region instead of or in addition to the coding sequence of the gene. The vectors of the present invention can be designed such that the inhibitory effect applies to other proteins within a family of genes exhibiting homology or substantial homology to the target gene.

[2132] For antisense suppression, the introduced antisense segment sequence also need not be full length relative to either the primary transcription product or the fully processed mRNA. Generally, a higher percentage of sequence identity can be used to compensate for the use of a shorter sequence. Furthermore, the introduced sequence need not have the same intron or exon pattern, and homology of non-coding segments may be equally effective. Normally, a sequence of between about 30 or 40 nucleotides and the full length of the transcript can be used, though a sequence of at least about 100 nucleotides is preferred, a sequence of at least about 200 nucleotides is more preferred, and a sequence of at least about 500 nucleotides is especially preferred.

[2133] C.2. Ribozymes

[2134] It is also contemplated that gene constructs representing ribozymes and based on the SDFs in the Reference and Sequence tables or those encoding polypeptides of the Protein Group and Protein Group Matrix tables and fragment thereof are an object of the invention. Ribozymes can also be used to inhibit expression of genes by suppressing the translation of the mRNA into a polypeptide. It is possible to design ribozymes that specifically pair with virtually any target RNA and cleave the phosphodiester backbone at a specific location, thereby functionally inactivating the target RNA. In carrying out this cleavage, the ribozyme is not itself altered, and is thus capable of recycling and cleaving other molecules, making it a true enzyme. The inclusion of ribozyme sequences within antisense RNAs confers RNA-cleaving activity upon them, thereby increasing the activity of the constructs.

[2135] A number of classes of ribozymes have been identified. One class of ribozymes is derived from a number of small circular RNAs, which are capable of self-cleavage and replication in plants. The RNAs replicate either alone (viroid RNAs) or with a helper virus (satellite RNAs). Examples include RNAs from avocado sunblotch viroid and the satellite RNAs from tobacco ringspot virus, lucerne transient streak virus, velvet tobacco mottle virus, solanum nodiflorum mottle virus and subterranean clover mottle virus. The design and use of target RNA-specific ribozymes is described in Haseloff et al. Nature, 334:585 (1988).

[2136] Like the antisense constructs above, the ribozyme sequence fragment necessary for pairing need not be identical to the target nucleotides to be cleaved, nor identical to the sequences in the Reference and Sequence tables or those encoding polypeptide of the Protein Group and Protein Group Matrix tables or fragments thereof. Ribozymes may be constructed by combining the ribozyme sequence and some fragment of the target gene which would allow recognition of the target gene mRNA by the resulting ribozyme molecule. Generally, the sequence in the ribozyme capable of binding to the target sequence exhibits a percentage of sequence identity with at least 80%, preferably with at least 85%, more preferably with at least 90% and most preferably with at least 95%, even more preferably, with at least 96%, 97%, 98% or 99% sequence identity to some fragment of a sequence in the Reference, Sequence, Protein Group, and Protein Group Matrix tables or the complement thereof. The ribozyme can be equally effective in inhibiting mRNA translation by cleaving either in the untranslated or coding regions. Generally, a higher percentage of sequence identity can be used to compensate for the use of a shorter sequence. Furthermore, the introduced sequence need not have the same intron or exon pattern, and homology of non-coding segments may be equally effective.

[2137] C.3. Chimeraplasts

[2138] The SDFs of the invention, such as those described by Reference, Sequence, Protein Group, and Protein Group Matrix tables, can also be used to construct chimeraplasts that can be introduced into a cell to produce at least one specific nucleotide change in a sequence corresponding to the SDF of the invention. A chimeraplast is an oligonucleotide comprising DNA and/or RNA that specifically hybridizes to a target region in a manner which creates a mismatched base-pair. This mismatched base-pair signals the cell's repair enzyme machinery which acts on the mismatched region resulting in the replacement, insertion or deletion of designated nucleotide(s). The altered sequence is then expressed by the cell's normal cellular mechanisms. Chimeraplasts can be designed to repair mutant genes, modify genes, introduce site-specific mutations, and/or act to interrupt or alter normal gene function (U.S. Pat. Nos. 6,010,907 and 6,004,804; and PCT Pub. No. WO99/58723 and WO99/07865).

[2139] C.4. Sense Suppression

[2140] The SDFs of the reference, Sequence, Protein Group, and Protein Group Matrix tables of the present invention are also useful to modulate gene expression by sense suppression. Sense suppression represents another method of gene suppression by introducing at least one exogenous copy or fragment of the endogenous sequence to be suppressed.

[2141] Introduction of expression cassettes in which a nucleic acid is configured in the sense orientation with respect to the promoter into the chromosome of a plant or by a self-replicating virus has been shown to be an effective means by which to induce degradation of mRNAs of target genes. For an example of the use of this method to modulate expression of endogenous genes see, Napoli et al., The Plant Cell 2:279 (1990), and U.S. Pat. Nos. 5,034,323, 5,231,020, and 5,283,184. Inhibition of expression may require some transcription of the introduced sequence.

[2142] For sense suppression, the introduced sequence generally will be substantially identical to the endogenous sequence intended to be inactivated. The minimal percentage of sequence identity will typically be greater than about 65%, but a higher percentage of sequence identity might exert a more effective reduction in the level of normal gene products. Sequence identity of more than about 80% is preferred, though about 95% to absolute identity would be most preferred. As with antisense regulation, the effect would likely apply to any other proteins within a similar family of genes exhibiting homology or substantial homology to the suppressing sequence.

[2143] C.5. Transcriptional Silencing

[2144] The nucleic acid sequences of the invention, including the SDFs of the reference, Sequence, Protein Group, and Protein Group Matrix tables, and fragments thereof, contain sequences that can be inserted into the genome of an organism resulting in transcriptional silencing. Such regulatory sequences need not be operatively linked to coding sequences to modulate transcription of a gene. Specifically, a promoter sequence without any other element of a gene can be introduced into a genome to transcriptionally silence an endogenous gene (see, for example, Vaucheret, H et al. (1998) The Plant Journal 16: 651-659). As another example, triple helices can be formed using oligonucleotides based on sequences from Reference, Sequence, Protein Group, and Protein Group Matrix tables, fragments thereof, and substantially similar sequence thereto. The oligonucleotide can be delivered to the host cell and can bind to the promoter in the genome to form a triple helix and prevent transcription. An oligonucleotide of interest is one that can bind to the promoter and block binding of a transcription factor to the promoter. In such a case, the oligonucleotide can be complementary to the sequences of the promoter that interact with transcription binding factors.

[2145] C.6. Other Methods to Inhibit Gene Expression

[2146] Yet another means of suppressing gene expression is to insert a polynucleotide into the gene of interest to disrupt transcription or translation of the gene.

[2147] Low frequency homologous recombination can be used to target a polynucleotide insert to a gene by flanking the polynucleotide insert with sequences that are substantially similar to the gene to be disrupted. Sequences from Reference, Sequence, Protein Group, and Protein Group Matrix tables, fragments thereof, and substantially similar sequence thereto can be used for homologous recombination.

[2148] In addition, random insertion of polynucleotides into a host cell genome can also be used to disrupt the gene of interest. Azpiroz-Leehan et al., Trends in Genetics 13:152 (1997). In this method, screening for clones from a library containing random insertions is preferred to identifying those that have polynucleotides inserted into the gene of interest. Such screening can be performed using probes and/or primers described above based on sequences from Reference, Sequence, Protein Group, and Protein Group Matrix tables, fragments thereof, and substantially similar sequence thereto. The screening can also be performed by selecting clones or R₁ plants having a desired phenotype.

[2149] I.D. Methods of Functional Analysis

[2150] The constructs described in the methods under I.C. above can be used to determine the function of the polypeptide encoded by the gene that is targeted by the constructs.

[2151] Down-regulating the transcription and translation of the targeted gene in the host cell or organisms, such as a plant, may produce phenotypic changes as compared to a wild-type cell or organism. In addition, in vitro assays can be used to determine if any biological activity, such as calcium flux, DNA transcription, nucleotide incorporation, etc., are being modulated by the down-regulation of the targeted gene.

[2152] Coordinated regulation of sets of genes, e.g., those contributing to a desired polygenic trait, is sometimes necessary to obtain a desired phenotype. SDFs of the invention representing transcription activation and DNA binding domains can be assembled into hybrid transcriptional activators. These hybrid transcriptional activators can be used with their corresponding DNA elements (i.e., those bound by the DNA-binding SDFs) to effect coordinated expression of desired genes (J. J. Schwarz et al., Mol. Cell. Biol. 12:266 (1992), A. Martinez et al., Mol. Gen. Genet. 261:546 (1999)).

[2153] The SDFs of the invention can also be used in the two-hybrid genetic systems to identify networks of protein-protein interactions (L. McAlister-Henn et al., Methods 19:330 (1999), J. C. Hu et al., Methods 20:80 (2000), M. Golovkin et al., J. Biol. Chem. 274:36428 (1999), K. Ichimura et al., Biochem. Biophys. Res. Comm. 253:532 (1998)). The SDFs of the invention can also be used in various expression display methods to identify important protein-DNA interactions (e.g. B. Luo et al., J. Mol. Biol. 266:479 (1997)).

[2154] I.E. Promoters

[2155] The SDFs of the invention are also useful as structural or regulatory sequences in a construct for modulating the expression of the corresponding gene in a plant or other organism, e.g. a symbiotic bacterium. For example, promoter sequences associated to SDFs of the reference, Sequence, Protein Group, and Protein Group Matrix tables of the present invention can be useful in directing expression of coding sequences either as constitutive promoters or to direct expression in particular cell types, tissues, or organs or in response to environmental stimuli.

[2156] With respect to the SDFs of the present invention a promoter is likely to be a relatively small portion of a genomic DNA (gDNA) sequence located in the first 2000 nucleotides upstream from an initial exon identified in a gDNA sequence or initial “ATG” or methionine codon or translational start site in a corresponding cDNA sequence. Such promoters are more likely to be found in the first 1000 nucleotides upstream of an initial ATG or methionine codon or translational start site of a cDNA sequence corresponding to a gDNA sequence. In particular, the promoter is usually located upstream of the transcription start site. The fragments of a particular gDNA sequence that function as elements of a promoter in a plant cell will preferably be found to hybridize to gDNA sequences presented and described in the Reference table at medium or high stringency, relevant to the length of the probe and its base composition.

[2157] Promoters are generally modular in nature. Promoters can consist of a basal promoter that functions as a site for assembly of a transcription complex comprising an RNA polymerase, for example RNA polymerase II. A typical transcription complex will include additional factors such as TF_{II}B, TF_{II}D, and TF_{II}E. Of these, TF_{II}D appears to be the only one to bind DNA directly. The promoter might also contain one or more enhancers and/or suppressors that function as binding sites for additional transcription factors that have the function of modulating the level of transcription with respect to tissue specificity and of transcriptional responses to particular environmental or nutritional factors, and the like.

[2158] Short DNA sequences representing binding sites for proteins can be separated from each other by intervening sequences of varying length. For example, within a particular functional module, protein binding sites may be constituted by regions of 5 to 60, preferably 10 to 30, more preferably 10 to 20 nucleotides. Within such binding sites, there are typically 2 to 6 nucleotides that specifically contact amino acids of the nucleic acid binding protein. The protein binding sites are usually separated from each other by 10 to several hundred nucleotides, typically by 15 to 150 nucleotides, often by 20 to 50 nucleotides. DNA binding sites in promoter elements often display dyad symmetry in their sequence. Often elements binding several different proteins, and/or a plurality of sites that bind the same protein, will be combined in a region of 50 to 1,000 basepairs.

[2159] Elements that have transcription regulatory function can be isolated from their corresponding endogenous gene, or the desired sequence can be synthesized, and recombined in constructs to direct expression of a coding region of a gene in a desired tissue-specific, temporal-specific or other desired manner of inducibility or suppression. When hybridizations are performed to identify or isolate elements of a promoter by hybridization to the long sequences presented in the Reference tables, conditions are adjusted to account for the above-described nature of promoters. For example short probes, constituting the element sought, are preferably used under low temperature and/or high salt conditions. When long probes, which might include several promoter elements are used, low to medium stringency conditions are preferred when hybridizing to promoters across species.

[2160] If a nucleotide sequence of an SDF, or part of the SDF, functions as a promoter or fragment of a promoter, then nucleotide substitutions, insertions or deletions that do not substantially affect the binding of relevant DNA binding proteins would be considered equivalent to the exemplified nucleotide sequence. It is envisioned that there are instances where it is desirable to decrease the binding of relevant DNA binding proteins to silence or down-regulate a promoter, or conversely to increase the binding of relevant. DNA binding proteins to enhance or up-regulate a promoter and vice versa. In such instances, polynucleotides representing changes to the nucleotide sequence of the DNA-protein contact region by insertion of additional nucleotides, changes to identity of relevant nucleotides, including use of chemically-modified bases, or deletion of one or more nucleotides are considered encompassed by the present invention. In addition, fragments of the promoter sequences described by Reference tables and variants thereof can be fused with other promoters or fragments to facilitate transcription and/or transcription in specific type of cells or under specific conditions.

[2161] Promoter function can be assayed by methods known in the art, preferably by measuring activity of a reporter gene operatively linked to the sequence being tested for promoter function. Examples of reporter genes include those encoding luciferase, green fluorescent protein, GUS, neo, cat and bar.

[2162] I.F. UTRs and Junctions

[2163] Polynucleotides comprising untranslated (UTR) sequences and intron/exon junctions are also within the scope of the invention. UTR sequences include introns and 5′ or 3′ untranslated regions (5′ UTRs or 3′ UTRs). Fragments of the sequences shown in the Reference and Sequence tables can comprise UTRs and intron/exon junctions.

[2164] These fragments of SDFs, especially UTRs, can have regulatory functions related to, for example, translation rate and mRNA stability. Thus, these fragments of SDFs can be isolated for use as elements of gene constructs for regulated production of polynucleotides encoding desired polypeptides.

[2165] Introns of genomic DNA segments might also have regulatory functions. Sometimes regulatory elements, especially transcription enhancer or suppressor elements, are found within introns. Also, elements related to stability of heteronuclear RNA and efficiency of splicing and of transport to the cytoplasm for translation can be found in intron elements. Thus, these segments can also find use as elements of expression vectors intended for use to transform plants.

[2166] Just as with promoters UTR sequences and intron/exon junctions can vary from those shown in the Reference and Sequence tables. Such changes from those sequences preferably will not affect the regulatory activity of the UTRs or intron/exon junction sequences on expression, transcription, or translation unless selected to do so. However, in some instances, down- or up-regulation of such activity may be desired to modulate traits or phenotypic or in vitro activity.

[2167] I.G. Coding Sequences

[2168] Isolated polynucleotides of the invention can include coding sequences that encode polypeptides comprising an amino acid sequence encoded by sequences described in the Reference and Sequence tables or an amino acid sequence presented in the Reference, Sequence, Protein Group, and Protein Group Matrix tables.

[2169] A nucleotide sequence encodes a polypeptide if a cell (or a cell free in vitro system) expressing that nucleotide sequence produces a polypeptide having the recited amino acid sequence when the nucleotide sequence is transcribed and the primary transcript is subsequently processed and translated by a host cell (or a cell free in vitro system) harboring the nucleic acid. Thus, an isolated nucleic acid that encodes a particular amino acid sequence can be a genomic sequence comprising exons and introns or a cDNA sequence that represents the product of splicing thereof. An isolated nucleic acid encoding an amino acid sequence also encompasses heteronuclear RNA, which contains sequences that are spliced out during expression, and mRNA, which lacks those sequences.

[2170] Coding sequences can be constructed using chemical synthesis techniques or by isolating coding sequences or by modifying such synthesized or isolated coding sequences as described above.

[2171] In addition to coding sequences encoding the polypeptide sequences of the reference, Sequence, Protein Group, and Protein Group Matrix tables, which are native to corn, Arabidopsis, soybean, rice, wheat, and other plants, the isolated polynucleotides can be polynucleotides that encode variants, fragments, and fusions of those native proteins. Such polypeptides are described below in part II.

[2172] In variant polynucleotides generally, the number of substitutions, deletions or insertions is preferably less than 20%, more preferably less than 15%; even more preferably less than 10%, 5%, 3% or 1% of the number of nucleotides comprising a particularly exemplified sequence. It is generally expected that non-degenerate nucleotide sequence changes that result in 1 to 10, more preferably 1 to 5 and most preferably 1 to 3 amino acid insertions, deletions or substitutions will not greatly affect the function of an encoded polypeptide. The most preferred embodiments are those wherein 1 to 20, preferably 1 to 10, most preferably 1 to 5 nucleotides are added to, or deleted from and/or substituted in the sequences specifically disclosed in the Reference and Sequence tables or polynucleotides that encode polypeptides of the Protein Group, and Protein Group Matrix tables or fragments thereof.

[2173] Insertions or deletions in polynucleotides intended to be used for encoding a polypeptide preferably preserve the reading frame. This consideration is not so important in instances when the polynucleotide is intended to be used as a hybridization probe.

### II. Polypeptides and Proteins

[2174] IIA. Native Polypeptides and Proteins

[2175] Polypeptides within the scope of the invention include both native proteins as well as variants, fragments, and fusions thereof. Polypeptides of the invention are those encoded by any of the six reading frames of sequences shown in the Reference and Sequence tables, preferably encoded by the three frames reading in the 5′ to 3′ direction of the sequences as shown.

[2176] Native polypeptides include the proteins encoded by the sequences shown in the Reference and Sequence tables. Such native polypeptides include those encoded by allelic variants.

[2177] Polypeptide and protein variants will exhibit at least 75% sequence identity to those native polypeptides of the Reference and Sequence tables. More preferably, the polypeptide variants will exhibit at least 85% sequence identity; even more preferably, at least 90% sequence identity; more preferably at least 95%, 96%, 97%, 98%, or 99% sequence identity. Fragments of polypeptide or fragments of polypeptides will exhibit similar percentages of sequence identity to the relevant fragments of the native polypeptide. Fusions will exhibit a similar percentage of sequence identity in that fragment of the fusion represented by the variant of the native peptide.

[2178] Polypeptide and protein variants of the invention will exhibit at least 75% sequence identity to those motifs or consensus sequences of the Protein Group and Protein Group Matrix tables. More preferably, the polypeptide variants will exhibit at least 85% sequence identity; even more preferably, at least 90% sequence identity; more preferably at least 95%, 96%, 97%, 98%, or 99% sequence identity. Fragments of polypeptide or fragments of polypeptides will exhibit similar percentages of sequence identity to the relevant fragments of the native polypeptide that are indicated in the Protein Group table. Fusions will exhibit a similar percentage of sequence identity in that fragment of the fusion represented by the variant of the native peptide.

[2179] Furthermore, polypeptide variants will exhibit at least one of the functional properties of the native protein. Such properties include, without limitation, protein interaction, DNA interaction, biological activity, immunological activity, receptor binding, signal transduction, transcription activity, growth factor activity, secondary structure, three-dimensional structure, etc. As to properties related to in vitro or in vivo activities, the variants preferably exhibit at least 60% of the activity of the native protein; more preferably at least 70%, even more preferably at least 80%, 85%, 90% or 95% of at least one activity of the native protein.

[2180] One type of variant of native polypeptides comprises amino acid substitutions, deletions and/or insertions. Conservative substitutions are preferred to maintain the function or activity of the polypeptide.

[2181] Within the scope of percentage of sequence identity described above, a polypeptide of the invention may have additional individual amino acids or amino acid sequences inserted into the polypeptide in the middle thereof and/or at the N-terminal and/or C-terminal ends thereof. Likewise, some of the amino acids or amino acid sequences may be deleted from the polypeptide.

[2182] A.1 Antibodies

[2183] Isolated polypeptides can be utilized to produce antibodies. Polypeptides of the invention can generally be used, for example, as antigens for raising antibodies by known techniques. The resulting antibodies are useful as reagents for determining the distribution of the antigen protein within the tissues of a plant or within a cell of a plant. The antibodies are also useful for examining the production level of proteins in various tissues, for example in a wild-type plant or following genetic manipulation of a plant, by methods such as Western blotting.

[2184] Antibodies of the present invention, both polyclonal and monoclonal, may be prepared by conventional methods. In general, the polypeptides of the invention are first used to immunize a suitable animal, such as a mouse, rat, rabbit, or goat. Rabbits and goats are preferred for the preparation of polyclonal sera due to the volume of serum obtainable, and the availability of labeled anti-rabbit and anti-goat antibodies as detection reagents. Immunization is generally performed by mixing or emulsifying the protein in saline, preferably in an adjuvant such as Freund's complete adjuvant, and injecting the mixture or emulsion parenterally (generally subcutaneously or intramuscularly). A dose of 50-200 μg/injection is typically sufficient. Immunization is generally boosted 2-6 weeks later with one or more injections of the protein in saline, preferably using Freund's incomplete adjuvant. One may alternatively generate antibodies by in vitro immunization using methods known in the art, which for the purposes of this invention is considered equivalent to in vivo immunization.

[2185] Polyclonal antisera is obtained by bleeding the immunized animal into a glass or plastic container, incubating the blood at 25° C. for one hour, followed by incubating the blood at 4° C. for 2-18 hours. The serum is recovered by centrifugation (e.g., 1,000×g for 10 minutes). About 20-50 ml per bleed may be obtained from rabbits.

[2186] Monoclonal antibodies are prepared using the method of Kohler and Milstein, Nature 256: 495 (1975), or modification thereof. Typically, a mouse or rat is immunized as described above. However, rather than bleeding the animal to extract serum, the spleen (and optionally several large lymph nodes) is removed and dissociated into single cells. If desired, the spleen cells can be screened (after removal of nonspecifically adherent cells) by applying a cell suspension to a plate, or well, coated with the protein antigen. B-cells producing membrane-bound immunoglobulin specific for the antigen bind to the plate, and are not rinsed away with the rest of the suspension. Resulting B-cells, or all dissociated spleen cells, are then induced to fuse with myeloma cells to form hybridomas, and are cultured in a selective medium (e.g., hypoxanthine, aminopterin, thymidine medium, “HAT”). The resulting hybridomas are plated by limiting dilution, and are assayed for the production of antibodies which bind specifically to the immunizing antigen (and which do not bind to unrelated antigens). The selected Mab-secreting hybridomas are then cultured either in vitro (e.g., in tissue culture bottles or hollow fiber reactors), or in vivo (as ascites in mice).

[2187] Other methods for sustaining antibody-producing B-cell clones, such as by EBV transformation, are known.

[2188] If desired, the antibodies (whether polyclonal or monoclonal) may be labeled using conventional techniques. Suitable labels include fluorophores, chromophores, radioactive atoms (particularly ³²P and ¹²⁵I), electron-dense reagents, enzymes, and ligands having specific binding partners. Enzymes are typically detected by their activity. For example, horseradish peroxidase is usually detected by its ability to convert 3,3′,5,5′-tetramethylbenzidine (TNB) to a blue pigment, quantifiable with a spectrophotometer.

[2189] A.2 In Vitro Applications of Polypeptides

[2190] Some polypeptides of the invention will have enzymatic activities that are useful in vitro. For example, the soybean trypsin inhibitor (Kunitz) family is one of the numerous families of proteinase inhibitors. It comprises plant proteins which have inhibitory activity against serine proteinases from the trypsin and subtilisin families, thiol proteinases and aspartic proteinases. Thus, these peptides find in vitro use in protein purification protocols and perhaps in therapeutic settings requiring topical application of protease inhibitors.

[2191] Delta-aminolevulinic acid dehydratase (EC 4.2.1.24) (ALAD) catalyzes the second step in the biosynthesis of heme, the condensation of two molecules of 5-aminolevulinate to form porphobilinogen and is also involved in chlorophyll biosynthesis (Kaczor et al. (1994) Plant Physiol. 1-4: 1411-7; Smith (1988) Biochem. J. 249: 423-8; Schneider (1976) Z. naturforsch. [C] 31: 55-63). Thus, ALAD proteins can be used as catalysts in synthesis of heme derivatives. Enzymes of biosynthetic pathways generally can be used as catalysts for in vitro synthesis of the compounds representing products of the pathway.

[2192] Polypeptides encoded by SDFs of the invention can be engineered to provide purification reagents to identify and purify additional polypeptides that bind to them. This allows one to identify proteins that function as multimers or elucidate signal transduction or metabolic pathways. In the case of DNA binding proteins, the polypeptide can be used in a similar manner to identify the DNA determinants of specific binding (S. Pierrou et al., Anal. Biochem. 229:99 (1995), S. Chusacultanachai et al., J. Biol. Chem. 274:23591 (1999), Q. Lin et al., J. Biol. Chem. 272:27274 (1997)).

[2193] II.B. Polypeptide Variants, Fragments and Fusions

[2194] Generally, variants, fragments, or fusions of the polypeptides encoded by the maximum length sequence (MLS) can exhibit at least one of the activities of the identified domains and/or related polypeptides described in Sections (C) and (D) of The Reference tables corresponding to the MLS of interest.

[2195] II.B.(1) Variants

[2196] A type of variant of the native polypeptides comprises amino acid substitutions. Conservative substitutions, described above (see II.), are preferred to maintain the function or activity of the polypeptide. Such substitutions include conservation of charge, polarity, hydrophobicity, size, etc. For example, one or more amino acid residues within the sequence can be substituted with another amino acid of similar polarity that acts as a functional equivalent, for example providing a hydrogen bond in an enzymatic catalysis. Substitutes for an amino acid within an exemplified sequence are preferably made among the members of the class to which the amino acid belongs. For example, the nonpolar (hydrophobic) amino acids include alanine, leucine, isoleucine, valine, proline, phenylalanine, tryptophan and methionine. The polar neutral amino acids include glycine, serine, threonine, cysteine, tyrosine, asparagine, and glutamine. The positively charged (basic) amino acids include arginine, lysine and histidine. The negatively charged (acidic) amino acids include aspartic acid and glutamic acid.

[2197] Within the scope of percentage of sequence identity described above, a polypeptide of the invention may have additional individual amino acids or amino acid sequences inserted into the polypeptide in the middle thereof and/or at the N-terminal and/or C-terminal ends thereof. Likewise, some of the amino acids or amino acid sequences may be deleted from the polypeptide. Amino acid substitutions may also be made in the sequences; conservative substitutions being preferred.

[2198] One preferred class of variants are those that comprise (1) the domain of an encoded polypeptide and/or (2) residues conserved between the encoded polypeptide and related polypeptides. For this class of variants, the encoded polypeptide sequence is changed by insertion, deletion, or substitution at positions flanking the domain and/or conserved residues.

[2199] Another class of variants includes those that comprise an encoded polypeptide sequence that is changed in the domain or conserved residues by a conservative substitution.

[2200] Yet another class of variants includes those that lack one of the in vitro activities, or structural features of the encoded polypeptides. One example is polypeptides or proteins produced from genes comprising dominant negative mutations. Such a variant may comprise an encoded polypeptide sequence with non-conservative changes in a particular domain or group of conserved residues.

[2201] II.A.(2) Fragments

[2202] Fragments of particular interest are those that comprise a domain identified for a polypeptide encoded by an MLS of the instant invention and variants thereof. Also, fragments that comprise at least one region of residues conserved between an MLS encoded polypeptide and its related polypeptides are of great interest. Fragments are sometimes useful as polypeptides corresponding to genes comprising dominant negative mutations are.

[2203] II.A.(3) Fusions

[2204] Of interest are chimeras comprising (1) a fragment of the MLS encoded polypeptide or variants thereof of interest and (2) a fragment of a polypeptide comprising the same domain. For example, an AP2 helix encoded by a MLS of the invention fused to second AP2 helix from ANT protein, which comprises two AP2 helices. The present invention also encompasses fusions of MLS encoded polypeptides, variants, or fragments thereof fused with related proteins or fragments thereof.

### Definition of Domains

[2205] The polypeptides of the invention may possess identifying domains as shown in The Reference tables. Specific domains within the MLS encoded polypeptides are indicated in The Reference tables. In addition, the domains within the MLS encoded polypeptide can be defined by the region that exhibits at least 70% sequence identity with the consensus sequences listed in the detailed description below of each of the domains.

[2206] The majority of the protein domain descriptions given in the protein domain table are obtained from Prosite (available on the internet), and Pfam (also available on the internet). Examples of domain descriptions are listed in the Protein Domain table.

[2207] A. Activities of Polypeptides Comprising Signal Peptides

[2208] Polypeptides comprising signal peptides are a family of proteins that are typically targeted to (1) a particular organelle or intracellular compartment, (2) interact with a particular molecule or (3) for secretion outside of a host cell. Example of polypeptides comprising signal peptides include, without limitation, secreted proteins, soluble proteins, receptors, proteins retained in the ER, etc.

[2209] These proteins comprising signal peptides are useful to modulate ligand-receptor interactions, cell-to-cell communication, signal transduction, intracellular communication, and activities and/or chemical cascades that take part in an organism outside or within of any particular cell.

[2210] One class of such proteins are soluble proteins which are transported out of the cell. These proteins can act as ligands that bind to receptor to trigger signal transduction or to permit communication between cells.

[2211] Another class is receptor proteins which also comprise a retention domain that lodges the receptor protein in the membrane when the cell transports the receptor to the surface of the cell. Like the soluble ligands, receptors can also modulate signal transduction and communication between cells.

[2212] In addition the signal peptide itself can serve as a ligand for some receptors. An example is the interaction of the ER targeting signal peptide with the signal recognition particle (SRP). Here, the SRP binds to the signal peptide, halting translation, and the resulting SRP complex then binds to docking proteins located on the surface of the ER, prompting transfer of the protein into the ER.

[2213] A description of signal peptide residue composition is described below in Subsection IV.C.1.

### III. Methods of Modulating Polypeptide Production

[2214] It is contemplated that polynucleotides of the invention can be incorporated into a host cell or in-vitro system to modulate polypeptide production. For instance, the SDFs prepared as described herein can be used to prepare expression cassettes useful in a number of techniques for suppressing or enhancing expression.

[2215] An example are polynucleotides comprising sequences to be transcribed, such as coding sequences, of the present invention can be inserted into nucleic acid constructs to modulate polypeptide production. Typically, such sequences to be transcribed are heterologous to at least one element of the nucleic acid construct to generate a chimeric gene or construct.

[2216] Another example of useful polynucleotides are nucleic acid molecules comprising regulatory sequences of the present invention. Chimeric genes or constructs can be generated when the regulatory sequences of the invention linked to heterologous sequences in a vector construct. Within the scope of invention are such chimeric gene and/or constructs.

[2217] Also within the scope of the invention are nucleic acid molecules, whereof at least a part or fragment of these DNA molecules are presented in the Reference and Sequence tables or polynucleotide encoding polypeptides of the Protein Group or Protein Group Matrix tables of the present application, and wherein the coding sequence is under the control of its own promoter and/or its own regulatory elements. Such molecules are useful for transforming the genome of a host cell or an organism regenerated from said host cell for modulating polypeptide production.

[2218] Additionally, a vector capable of producing the oligonucleotide can be inserted into the host cell to deliver the oligonucleotide.

[2219] More detailed description of components to be included in vector constructs are described both above and below.

[2220] Whether the chimeric vectors or native nucleic acids are utilized, such polynucleotides can be incorporated into a host cell to modulate polypeptide production. Native genes and/or nucleic acid molecules can be effective when exogenous to the host cell.

[2221] Methods of modulating polypeptide expression includes, without limitation:

[2222] Suppression methods, such as
[2223] Antisense
[2224] Ribozymes
[2225] Co-suppression
[2226] Insertion of Sequences into the Gene to be Modulated
[2227] Regulatory Sequence Modulation.

[2228] as well as Methods for Enhancing Production, such as
[2229] Insertion of Exogenous Sequences; and
[2230] Regulatory Sequence Modulation.

[2231] III.A. Suppression

[2232] Expression cassettes of the invention can be used to suppress expression of endogenous genes which comprise the SDF sequence. Inhibiting expression can be useful, for instance, to tailor the ripening characteristics of a fruit (Oeller et al., Science 254:437 (1991)) or to influence seed size (WO98/07842) or to provoke cell ablation (Mariani et al., Nature 357: 384-387 (1992).

[2233] As described above, a number of methods can be used to inhibit gene expression in plants, such as antisense, ribozyme, introduction of exogenous genes into a host cell, insertion of a polynucleotide sequence into the coding sequence and/or the promoter of the endogenous gene of interest, and the like.

[2234] III.A.1. Antisense

[2235] An expression cassette as described above can be transformed into host cell or plant to produce an antisense strand of RNA. For plant cells, antisense RNA inhibits gene expression by preventing the accumulation of mRNA which encodes the enzyme of interest, see, e.g., Sheehy et al., Proc. Nat. Acad. Sci. USA, 85:8805 (1988), and Hiatt et al., U.S. Pat. No. 4,801,340.

[2236] III.A.2. Ribozymes

[2237] Similarly, ribozyme constructs can be transformed into a plant to cleave mRNA and down-regulate translation.

[2238] III.A.3. Co-Suppression

[2239] Another method of suppression is by introducing an exogenous copy of the gene to be suppressed. Introduction of expression cassettes in which a nucleic acid is configured in the sense orientation with respect to the promoter has been shown to prevent the accumulation of mRNA. A detailed description of this method is described above.

[2240] III.A.4. Insertion of Sequences into the Gene to be Modulated

[2241] Yet another means of suppressing gene expression is to insert a polynucleotide into the gene of interest to disrupt transcription or translation of the gene.

[2242] Homologous recombination could be used to target a polynucleotide insert to a gene using the Cre-Lox system (A. C. Vergunst et al., Nucleic Acids Res. 26:2729 (1998), A. C. Vergunst et al., Plant Mol. Biol. 38:393 (1998), H. Albert et al., Plant J. 7:649 (1995)).

[2243] In addition, random insertion of polynucleotides into a host cell genome can also be used to disrupt the gene of interest. Azpiroz-Leehan et al., Trends in Genetics 13:152 (1997). In this method, screening for clones from a library containing random insertions is preferred for identifying those that have polynucleotides inserted into the gene of interest. Such screening can be performed using probes and/or primers described above based on sequences from the Reference and Sequence tables or polynucleotides encoding polypeptides of the Protein Group or Protein Group Matrix tables, fragments thereof, and substantially similar sequence thereto. The screening can also be performed by selecting clones or any transgenic plants having a desired phenotype.

[2244] III.A.5. Regulatory Sequence Modulation

[2245] The SDFs described in the Reference and Sequence tables or polynucleotides encoding polypeptides of the Protein Group or Protein Group Matrix tables, and fragments thereof are examples of nucleotides of the invention that contain regulatory sequences that can be used to suppress or inactivate transcription and/or translation from a gene of interest as discussed in I.C.5.

[2246] III.A.6. Genes Comprising Dominant-Negative Mutations

[2247] When suppression of production of the endogenous, native protein is desired it is often helpful to express a gene comprising a dominant negative mutation. Production of protein variants produced from genes comprising dominant negative mutations is a useful tool for research Genes comprising dominant negative mutations can produce a variant polypeptide which is capable of competing with the native polypeptide, but which does not produce the native result. Consequently, over expression of genes comprising these mutations can titrate out an undesired activity of the native protein. For example, The product from a gene comprising a dominant negative mutation of a receptor can be used to constitutively activate or suppress a signal transduction cascade, allowing examination of the phenotype and thus the trait(s) controlled by that receptor and pathway. Alternatively, the protein arising from the gene comprising a dominant-negative mutation can be an inactive enzyme still capable of binding to the same substrate as the native protein and therefore competes with such native protein.

[2248] Products from genes comprising dominant-negative mutations can also act upon the native protein itself to prevent activity. For example, the native protein may be active only as a homo-multimer or as one subunit of a hetero-multimer. Incorporation of an inactive subunit into the multimer with native subunit(s) can inhibit activity.

[2249] Thus, gene function can be modulated in host cells of interest by insertion into these cells vector constructs comprising a gene comprising a dominant-negative mutation.

[2250] III.B. Enhanced Expression

[2251] Enhanced expression of a gene of interest in a host cell can be accomplished by either (1) insertion of an exogenous gene; or (2) promoter modulation.

[2252] III.B.1. Insertion of an Exogenous Gene

[2253] Insertion of an expression construct encoding an exogenous gene can boost the number of gene copies expressed in a host cell.

[2254] Such expression constructs can comprise genes that either encode the native protein that is of interest or that encode a variant that exhibits enhanced activity as compared to the native protein. Such genes encoding proteins of interest can be constructed from the sequences from the Reference and Sequence tables or polynucleotides encoding polypeptides of the Protein Group or Protein Group Matrix tables, fragments thereof, and substantially similar sequence thereto.

[2255] Such an exogenous gene can include either a constitutive promoter permitting expression in any cell in a host organism or a promoter that directs transcription only in particular cells or times during a host cell life cycle or in response to environmental stimuli.

[2256] III.B.2. Regulatory Sequence Modulation

[2257] The SDFs of the Reference and Sequence tables, and fragments thereof, contain regulatory sequences that can be used to enhance expression of a gene of interest. For example, some of these sequences contain useful enhancer elements. In some cases, duplication of enhancer elements or insertion of exogenous enhancer elements will increase expression of a desired gene from a particular promoter. As other examples, all 11 promoters require binding of a regulatory protein to be activated, while some promoters may need a protein that signals a promoter binding protein to expose a polymerase binding site. In either case, over-production of such proteins can be used to enhance expression of a gene of interest by increasing the activation time of the promoter.

[2258] Such regulatory proteins are encoded by some of the sequences in the Reference and Sequence tables or polynucleotides encoding polypeptides of the Protein Group or Protein Group Matrix tables, fragments thereof, and substantially similar sequences thereto.

[2259] Coding sequences for these proteins can be constructed as described above.

### IV. Gene Constructs and Vector Construction

[2260] To use isolated SDFs of the present invention or a combination of them or parts and/or mutants and/or fusions of said SDFs in the above techniques, recombinant DNA vectors which comprise said SDFs and are suitable for transformation of cells, such as plant cells, are usually prepared. The SDF construct can be made using standard recombinant DNA techniques (Sambrook et al. 1989) and can be introduced to the species of interest by Agrobacterium-mediated transformation or by other means of transformation (e.g., particle gun bombardment) as referenced below.

[2261] The vector backbone can be any of those typical in the art such as plasmids, viruses, artificial chromosomes, BACs, YACs and PACs and vectors of the sort described by

[2262] (a) BAC: Shizuya et al., Proc. Natl. Acad. Sci. USA 89: 8794-8797 (1992); Hamilton et al., Proc. Natl. Acad. Sci. USA 93: 9975-9979 (1996);

[2263] (b) YAC: Burke et al., Science 236:806-812 (1987);

[2264] (c) PAC: Sternberg N. et al., Proc Natl Acad Sci USA. January; 87(1):103-7 (1990);

[2265] (d) Bacteria-Yeast Shuttle Vectors: Bradshaw et al., Nucl Acids Res 23: 4850-4856 (1995);

[2266] (e) Lambda Phage Vectors: Replacement Vector, e.g., Frischauf et al., J. Mol Biol 170: 827-842 (1983); or Insertion vector, e.g., Huynh et al., In: Glover N M (ed) DNA Cloning: A practical Approach, Vol. 1 Oxford: IRL Press (1985);

[2267] (f) T-DNA gene fusion vectors: Walden et al., Mol Cell Biol 1: 175-194 (1990); and

[2268] (g) Plasmid vectors: Sambrook et al., infra.

[2269] Typically, a vector will comprise the exogenous gene, which in its turn comprises an SDF of the present invention to be introduced into the genome of a host cell, and which gene may be an antisense construct, a ribozyme construct chimeraplast, or a coding sequence with any desired transcriptional and/or translational regulatory sequences, such as promoters, UTRs, and 3′ end termination sequences. Vectors of the invention can also include origins of replication, scaffold attachment regions (SARs), markers, homologous sequences, introns, etc.

[2270] A DNA sequence coding for the desired polypeptide, for example a cDNA sequence encoding a full length protein, will preferably be combined with transcriptional and translational initiation regulatory sequences which will direct the transcription of the sequence from the gene in the intended tissues of the transformed plant.

[2271] For example, for over-expression, a plant promoter fragment may be employed that will direct transcription of the gene in all tissues of a regenerated plant. Alternatively, the plant promoter may direct transcription of an SDF of the invention in a specific tissue (tissue-specific promoters) or may be otherwise under more precise environmental control (inducible promoters).

[2272] If proper polypeptide production is desired, a polyadenylation region at the 3′-end of the coding region is typically included. The polyadenylation region can be derived from the natural gene, from a variety of other plant genes, or from T-DNA.

[2273] The vector comprising the sequences from genes or SDF or the invention may comprise a marker gene that confers a selectable phenotype on plant cells. The vector can include promoter and coding sequence, for instance. For example, the marker may encode biocide resistance, particularly antibiotic resistance, such as resistance to kanamycin, G418, bleomycin, hygromycin, or herbicide resistance, such as resistance to chlorosulfuron or phosphinotricin.

[2274] IV.A. Coding Sequences

[2275] Generally, the sequence in the transformation vector and to be introduced into the genome of the host cell does not need to be absolutely identical to an SDF of the present invention. Also, it is not necessary for it to be full length, relative to either the primary transcription product or fully processed mRNA. Furthermore, the introduced sequence need not have the same intron or exon pattern as a native gene. Also, heterologous non-coding segments can be incorporated into the coding sequence without changing the desired amino acid sequence of the polypeptide to be produced.

[2276] IV.B. Promoters

[2277] As explained above, introducing an exogenous SDF from the same species or an orthologous SDF from another species are useful to modulate the expression of a native gene corresponding to that SDF of interest. Such an SDF construct can be under the control of either a constitutive promoter or a highly regulated inducible promoter (e.g., a copper inducible promoter). The promoter of interest can initially be either endogenous or heterologous to the species in question. When re-introduced into the genome of said species, such promoter becomes exogenous to said species. Over-expression of an SDF transgene can lead to co-suppression of the homologous endogeneous sequence thereby creating some alterations in the phenotypes of the transformed species as demonstrated by similar analysis of the chalcone synthase gene (Napoli et al., Plant Cell 2:279 (1990) and van der Krol et al., Plant Cell 2:291 (1990)). If an SDF is found to encode a protein with desirable characteristics, its over-production can be controlled so that its accumulation can be manipulated in an organ- or tissue-specific manner utilizing a promoter having such specificity.

[2278] Likewise, if the promoter of an SDF (or an SDF that includes a promoter) is found to be tissue-specific or developmentally regulated, such a promoter can be utilized to drive or facilitate the transcription of a specific gene of interest (e.g., seed storage protein or root-specific protein). Thus, the level of accumulation of a particular protein can be manipulated or its spatial localization in an organ- or tissue-specific manner can be altered.

[2279] IV.C Signal Peptides

[2280] SDFs of the present invention containing signal peptides are indicated in the Reference, Sequence, the Protein Group and Protein Group Matrix tables. In some cases it may be desirable for the protein encoded by an introduced exogenous or orthologous SDF to be targeted (1) to a particular organelle intracellular compartment, (2) to interact with a particular molecule such as a membrane molecule or (3) for secretion outside of the cell harboring the introduced SDF. This will be accomplished using a signal peptide.

[2281] Signal peptides direct protein targeting, are involved in ligand-receptor interactions and act in cell to cell communication. Many proteins, especially soluble proteins, contain a signal peptide that targets the protein to one of several different intracellular compartments. In plants, these compartments include, but are not limited to, the endoplasmic reticulum (ER), mitochondria, plastids (such as chloroplasts), the vacuole, the Golgi apparatus, protein storage vessicles (PSV) and, in general, membranes. Some signal peptide sequences are conserved, such as the Asn-Pro-Ile-Arg amino acid motif found in the N-terminal propeptide signal that targets proteins to the vacuole (Marty (1999) The Plant Cell 11: 587-599). Other signal peptides do not have a consensus sequence per se, but are largely composed of hydrophobic amino acids, such as those signal peptides targeting proteins to the ER (Vitale and Denecke (1999) The Plant Cell 11: 615-628). Still others do not appear to contain either a consensus sequence or an identified common secondary sequence, for instance the chloroplast stromal targeting signal peptides (Keegstra and Cline (1999) The Plant Cell 11: 557-570). Furthermore, some targeting peptides are bipartite, directing proteins first to an organelle and then to a membrane within the organelle (e.g. within the thylakoid lumen of the chloroplast; see Keegstra and Cline (1999) The Plant Cell 11: 557-570). In addition to the diversity in sequence and secondary structure, placement of the signal peptide is also varied. Proteins destined for the vacuole, for example, have targeting signal peptides found at the N-terminus, at the C-terminus and at a surface location in mature, folded proteins. Signal peptides also serve as ligands for some receptors.

[2282] These characteristics of signal proteins can be used to more tightly control the phenotypic expression of introduced SDFs. In particular, associating the appropriate signal sequence with a specific SDF can allow sequestering of the protein in specific organelles (plastids, as an example), secretion outside of the cell, targeting interaction with particular receptors, etc. Hence, the inclusion of signal proteins in constructs involving the SDFs of the invention increases the range of manipulation of SDF phenotypic expression. The nucleotide sequence of the signal peptide can be isolated from characterized genes using common molecular biological techniques or can be synthesized in vitro.

[2283] In addition, the native signal peptide sequences, both amino acid and nucleotide, described in the Reference, Sequence, Protein Group or Protein Group Matrix tables can be used to modulate polypeptide transport. Further variants of the native signal peptides described in the Reference, Sequence, Protein Group or Protein Group Matrix tables are contemplated. Insertions, deletions, or substitutions can be made. Such variants will retain at least one of the functions of the native signal peptide as well as exhibiting some degree of sequence identity to the native sequence.

[2284] Also, fragments of the signal peptides of the invention are useful and can be fused with other signal peptides of interest to modulate transport of a polypeptide.

### V. Transformation Techniques

[2285] A wide range of techniques for inserting exogenous polynucleotides are known for a number of host cells, including, without limitation, bacterial, yeast, mammalian, insect and plant cells.

[2286] Techniques for transforming a wide variety of higher plant species are well known and described in the technical and scientific literature. See, e.g. Weising et al., Ann. Rev. Genet. 22:421 (1988); and Christou, Euphytica, v. 85, n. 1-3:13-27, (1995).

[2287] DNA constructs of the invention may be introduced into the genome of the desired plant host by a variety of conventional techniques. For example, the DNA construct may be introduced directly into the genomic DNA of the plant cell using techniques such as electroporation and microinjection of plant cell protoplasts, or the DNA constructs can be introduced directly to plant tissue using ballistic methods, such as DNA particle bombardment. Alternatively, the DNA constructs may be combined with suitable T-DNA flanking regions and introduced into a conventional Agrobacterium tumefaciens host vector. The virulence functions of the Agrobacterium tumefaciens host will direct the insertion of the construct and adjacent marker into the plant cell DNA when the cell is infected by the bacteria (McCormac et al., Mol. Biotechnol. 8:199 (1997); Hamilton, Gene 200:107 (1997)); Salomon et al. EMBO J. 3:141 (1984); Herrera-Estrella et al. EMBO J. 2:987 (1983).

[2288] Microinjection techniques are known in the art and well described in the scientific and patent literature. The introduction of DNA constructs using polyethylene glycol precipitation is described in Paszkowski et al. EMBO J. 3:2717 (1984). Electroporation techniques are described in Fromm et al. Proc. Natl. Acad. Sci. USA 82:5824 (1985). Ballistic transformation techniques are described in Klein et al. Nature 327:773 (1987). Agrobacterium tumefaciens-mediated transformation techniques, including disarming and use of binary or co-integrate vectors, are well described in the scientific literature. See, for example Hamilton, C M., Gene 200:107 (1997); Müller et al. Mol. Gen. Genet. 207:171 (1987); Komari et al. Plant J. 10:165 (1996); Venkateswarlu et al. Biotechnology 9:1103 (1991) and Gleave, A P., Plant Mol. Biol. 20:1203 (1992); Graves and Goldman, Plant Mol. Biol. 7:34 (1986) and Gould et al., Plant Physiology 95:426 (1991).

[2289] Transformed plant cells which are derived by any of the above transformation techniques can be cultured to regenerate a whole plant that possesses the transformed genotype and thus the desired phenotype such as seedlessness. Such regeneration techniques rely on manipulation of certain phytohormones in a tissue culture growth medium, typically relying on a biocide and/or herbicide marker which has been introduced together with the desired nucleotide sequences. Plant regeneration from cultured protoplasts is described in Evans et al., Protoplasts Isolation and Culture in “Handbook of Plant Cell Culture,” pp. 124-176, MacMillan Publishing Company, New York, 1983; and Binding, Regeneration of Plants, Plant Protoplasts, pp. 21-73, CRC Press, Boca Raton, 1988. Regeneration can also be obtained from plant callus, explants, organs, or parts thereof. Such regeneration techniques are described generally in Klee et al. Ann. Rev. of Plant Phys. 38:467 (1987). Regeneration of monocots (rice) is described by Hosoyama et al. (Biosci. Biotechnol. Biochem. 58:1500 (1994)) and by Ghosh et al. (J. Biotechnol. 32:1 (1994)). The nucleic acids of the invention can be used to confer desired traits on essentially any plant.

[2290] Thus, the invention has use over a broad range of plants, including species from the genera Anacardium, Arachis, Asparagus, Atropa, Avena, Brassica, Citrus, Citrullus, Capsicum, Carthamus, Cocos, Coffea, Cucumis, Cucurbita, Daucus, Elaeis, Fragaria, Glycine, Gossypium, Helianthus, Heterocallis, Hordeum, Hyoscyamus, Lactuca, Linum, Lolium,Lupinus, Lycopersicon, Malus, Manihot, Majorana, Medicago, Nicotiana, Olea, Oryza, Panieum, Pannesetum, Persea, Phaseolus, Pistachia, Pisum, Pyrus, Prunus, Raphanus, Ricinus, Secale, Senecio, Sinapis, Solanum, Sorghum, Theobromus, Trigonella, Triticum, Vicia, Vitis, Vigna, and, Zea.

[2291] One of skill will recognize that after the expression cassette is stably incorporated in transgenic plants and confirmed to be operable, it can be introduced into other plants by sexual crossing. Any of a number of standard breeding techniques can be used, depending upon the species to be crossed.

[2292] The particular sequences of SDFs identified are provided in the attached Reference and Sequence tables.

### IX. Definitions

[2293] The following terms are utilized throughout this application:

[2294] Allelic variant: An “allelic variant” is an alternative form of the same SDF, which resides at the same chromosomal locus in the organism. Allelic variations can occur in any portion of the gene sequence, including regulatory regions. Allelic variants can arise by normal genetic variation in a population. Allelic variants can also be produced by genetic engineering methods. An allelic variant can be one that is found in a naturally occurring plant, including a cultivar or ecotype. An allelic variant may or may not give rise to a phenotypic change, and may or may not be expressed. An allele can result in a detectable change in the phenotype of the trait represented by the locus. A phenotypically silent allele can give rise to a product.

[2295] Alternatively spliced messages: Within the context of the current invention, “alternatively spliced messages” refers to mature mRNAs originating from a single gene with variations in the number and/or identity of exons, introns and/or intron-exon junctions.

[2296] Chimeric: The term “chimeric” is used to describe genes, as defined supra, or contructs wherein at least two of the elements of the gene or construct, such as the promoter and the coding sequence and/or other regulatory sequences and/or filler sequences and/or complements thereof, are heterologous to each other.

[2297] Constitutive Promoter: Promoters referred to herein as “constitutive promoters” actively promote transcription under most, but not necessarily all, environmental conditions and states of development or cell differentiation. Examples of constitutive promoters include the cauliflower mosaic virus (CaMV) 35S transcript initiation region and the 1′ or 2′ promoter derived from T-DNA of Agrobacterium tumefaciens, and other transcription initiation regions from various plant genes, such as the maize ubiquitin-1 promoter, known to those of skill.

[2298] Coordinately Expressed: The term “coordinately expressed,” as used in the current invention, refers to genes that are expressed at the same or a similar time and/or stage and/or under the same or similar environmental conditions.

[2299] Domain: Domains are fingerprints or signatures that can be used to characterize protein families and/or parts of proteins. Such fingerprints or signatures can comprise conserved (1) primary sequence, (2) secondary structure, and/or (3) three-dimensional conformation. Generally, each domain has been associated with either a family of proteins or motifs. Typically, these families and/or motifs have been correlated with specific in-vitro and/or in-vivo activities. A domain can be any length, including the entirety of the sequence of a protein. Detailed descriptions of the domains, associated families and motifs, and correlated activities of the polypeptides of the instant invention are described below. Usually, the polypeptides with designated domain(s) can exhibit at least one activity that is exhibited by any polypeptide that comprises the same domain(s).

[2300] Endogenous: The term “endogenous,” within the context of the current invention refers to any polynucleotide, polypeptide or protein sequence which is a natural part of a cell or organisms regenerated from said cell.

[2301] Exogenous: “Exogenous,” as referred to within, is any polynucleotide, polypeptide or protein sequence, whether chimeric or not, that is initially or subsequently introduced into the genome of an individual host cell or the organism regenerated from said host cell by any means other than by a sexual cross. Examples of means by which this can be accomplished are described below, and include Agrobacterium-mediated transformation (of dicots—e.g. Salomon et al. EMBO J. 3:141 (1984); Herrera-Estrella et al. EMBO J. 2:987 (1983); of monocots, representative papers are those by Escudero et al., Plant J. 10:355 (1996), Ishida et al., Nature Biotechnology 14:745 (1996), May et al., Bio/Technology 13:486 (1995)), biolistic methods (Armaleo et al., Current Genetics 17:97 1990)), electroporation, in planta techniques, and the like. Such a plant containing the exogenous nucleic acid is referred to here as a T₀ for the primary transgenic plant and T₁ for the first generation. The term “exogenous” as used herein is also intended to encompass inserting a naturally found element into a non-naturally found location.

[2302] Filler sequence: As used herein, “filler sequence” refers to any nucleotide sequence that is inserted into DNA construct to evoke a particular spacing between particular components such as a promoter and a coding region and may provide an additional attribute such as a restriction enzyme site.

[2303] Gene: The term “gene,” as used in the context of the current invention, encompasses all regulatory and coding sequence contiguously associated with a single hereditary unit with a genetic function (see SCHEMATIC 1). Genes can include non-coding sequences that modulate the genetic function that include, but are not limited to, those that specify polyadenylation, transcriptional regulation, DNA conformation, chromatin conformation, extent and position of base methylation and binding sites of proteins that control all of these. Genes comprised of “exons” (coding sequences), which may be interrupted by “introns” (non-coding sequences), encode proteins. A gene's genetic function may require only RNA expression or protein production, or may only require binding of proteins and/or nucleic acids without associated expression. In certain cases, genes adjacent to one another may share sequence in such a way that one gene will overlap the other. A gene can be found within the genome of an organism, artificial chromosome, plasmid, vector, etc., or as a separate isolated entity.

[2304] Gene Family: “Gene family” is used in the current invention to describe a group of functionally related genes, each of which encodes a separate protein.

[2305] Heterologous sequences: “Heterologous sequences” are those that are not operatively linked or are not contiguous to each other in nature. For example, a promoter from corn is considered heterologous to an Arabidopsis coding region sequence. Also, a promoter from a gene encoding a growth factor from corn is considered heterologous to a sequence encoding the corn receptor for the growth factor. Regulatory element sequences, such as UTRs or 3′ end termination sequences that do not originate in nature from the same gene as the coding sequence originates from, are considered heterologous to said coding sequence. Elements operatively linked in nature and—contiguous to each other are not heterologous to each other. On the other hand, these same elements remain operatively linked but become heterologous if other filler sequence is placed between them. Thus, the promoter and coding sequences of a corn gene expressing an amino acid transporter are not heterologous to each other, but the promoter and coding sequence of a corn gene operatively linked in a novel manner are heterologous.

[2306] Homologous gene: In the current invention, “homologous gene” refers to a gene that shares sequence similarity with the gene of interest. This similarity may be in only a fragment of the sequence and often represents a functional domain such as, examples including without limitation a DNA binding domain, a domain with tyrosine kinase activity, or the like. The functional activities of homologous genes are not necessarily the same.

[2307] Inducible Promoter: An “inducible promoter” in the context of the current invention refers to a promoter which is regulated under certain conditions, such as light, chemical concentration, protein concentration, conditions in an organism, cell, or organelle, etc. A typical example of an inducible promoter, which can be utilized with the polynucleotides of the present invention, is PARSK1, the promoter from the Arabidopsis gene encoding a serine-threonine kinase enzyme, and which promoter is induced by dehydration, abscissic acid and sodium chloride (Wang and Goodman, Plant J. 8:37 (1995)) Examples of environmental conditions that may affect transcription by inducible promoters include anaerobic conditions, elevated temperature, or the presence of light.

[2308] Intergenic region: “Intergenic region,” as used in the current invention, refers to nucleotide sequence occurring in the genome that separates adjacent genes.

[2309] Mutant gene: In the current invention, “mutant” refers to a heritable change in DNA sequence at a specific location. Mutants of the current invention may or may not have an associated identifiable function when the mutant gene is transcribed.

[2310] Orthologous Gene In the current invention “orthologous gene” refers to a second gene that encodes a gene product that performs a similar function as the product of a first gene. The orthologous gene may also have a degree of sequence similarity to the first gene. The orthologous gene may encode a polypeptide that exhibits a degree of sequence similarity to a polypeptide corresponding to a first gene. The sequence similarity can be found within a functional domain or along the entire length of the coding sequence of the genes and/or their corresponding polypeptides.

[2311] Percentage of sequence identity: “Percentage of sequence identity,” as used herein, is determined by comparing two optimally aligned sequences over a comparison window, where the fragment of the polynucleotide or amino acid sequence in the comparison window may comprise additions or deletions (e.g., gaps or overhangs) as compared to the reference sequence (which does not comprise additions or deletions) for optimal alignment of the two sequences. The percentage is calculated by determining the number of positions at which the identical nucleic acid base or amino acid residue occurs in both sequences to yield the number of matched positions, dividing the number of matched positions by the total number of positions in the window of comparison and multiplying the result by 100 to yield the percentage of sequence identity. Optimal alignment of sequences for comparison may be conducted by the local homology algorithm of Smith and Waterman Add. APL. Math. 2:482 (1981), by the homology alignment algorithm of Needleman and Wunsch J. Mol. Biol. 48:443 (1970), by the search for similarity method of Pearson and Lipman Proc. Natl. Acad. Sci. (USA) 85: 2444 (1988), by computerized implementations of these algorithms (GAP, BESTFIT, BLAST, PASTA, and TFASTA in the Wisconsin Genetics Software Package, Genetics Computer Group (GCG), 575 Science Dr., Madison, Wis.), or by inspection. Given that two sequences have been identified for comparison, GAP and BESTFIT are preferably employed to determine their optimal alignment. Typically, the default values of 5.00 for gap weight and 0.30 for gap weight length are used. The term “substantial sequence identity” between polynucleotide or polypeptide sequences refers to polynucleotide or polypeptide comprising a sequence that has at least 80% sequence identity, preferably at least 85%, more preferably at least 90% and most preferably at least 95%, even more preferably, at least 96%, 97%, 98% or 99% sequence identity compared to a reference sequence using the programs.

[2312] Plant Promoter: A “plant promoter” is a promoter capable of initiating transcription in plant cells and can drive or facilitate transcription of a fragment of the SDF of the instant invention or a coding sequence of the SDF of the instant invention. Such promoters need not be of plant origin. For example, promoters derived from plant viruses, such as the CaMV35S promoter or from Agrobacterium tumefaciens such as the T-DNA promoters, can be plant promoters. A typical example of a plant promoter of plant origin is the maize ubiquitin-1 (ubi-1) promoter known to those of skill.

[2313] Promoter: The term “promoter,” as used herein, refers to a region of sequence determinants located upstream from the start of transcription of a gene and which are involved in recognition and binding of RNA polymerase and other proteins to initiate and modulate transcription. A basal promoter is the minimal sequence necessary for assembly of a transcription complex required for transcription initiation. Basal promoters frequently include a “TATA box” element usually located between 15 and 35 nucleotides upstream from the site of initiation of transcription. Basal promoters also sometimes include a “CCAAT box” element (typically a sequence CCAAT) and/or a GGGCG sequence, usually located between 40 and 200 nucleotides, preferably 60 to 120 nucleotides, upstream from the start site of transcription.

[2314] Public sequence: The term “public sequence,” as used in the context of the instant application, refers to any sequence that has been deposited in a publicly accessible database. This term encompasses both amino acid and nucleotide sequences. Such sequences are publicly accessible, for example, on the BLAST databases on the NCBI FTP web site (accessible at ncbi.nlm.gov/blast). The database at the NCBI GTP site utilizes “gi” numbers assigned by NCBI as a unique identifier for each sequence in the databases, thereby providing a non-redundant database for sequence from various databases, including GenBank, EMBL, DBBJ, (DNA Database of Japan) and PDB (Brookhaven Protein Data Bank).

[2315] Regulatory Sequence The term “regulatory sequence,” as used in the current invention, refers to any nucleotide sequence that influences transcription or translation initiation and rate, and stability and/or mobility of the transcript or polypeptide product. Regulatory sequences include, but are not limited to, promoters, promoter control elements, protein binding sequences, 5′ and 3′ UTRs, transcriptional start site, termination sequence, polyadenylation sequence, introns, certain sequences within a coding sequence, etc.

[2316] Related Sequences: “Related sequences” refer to either a polypeptide or a nucleotide sequence that exhibits some degree of sequence similarity with a sequence described by The Reference tables and The Sequence tables.

[2317] Scaffold Attachment Region (SAR): As used herein, “scaffold attachment region” is a DNA sequence that anchors chromatin to the nuclear matrix or scaffold to generate loop domains that can have either a transcriptionally active or inactive structure (Spiker and Thompson (1996) Plant Physiol. 110: 15-21).

[2318] Sequence-determined DNA fragments (SDFs): “Sequence-determined DNA fragments” as used in the current invention are isolated sequences of genes, fragments of genes, intergenic regions or contiguous DNA from plant genomic DNA or cDNA or RNA the sequence of which has been determined.

[2319] Signal Peptide: A “signal peptide” as used in the current invention is an amino acid sequence that targets the protein for secretion, for transport to an intracellular compartment or organelle or for incorporation into a membrane. Signal peptides are indicated in the tables and a more detailed description located below.

[2320] Specific Promoter: In the context of the current invention, “specific promoters” refers to a subset of inducible promoters that have a high preference for being induced in a specific tissue or cell and/or at a specific time during development of an organism. By “high preference” is meant at least 3-fold, preferably 5-fold, more preferably at least 10-fold still more preferably at least 20-fold, 50-fold or 100-fold increase in transcription in the desired tissue over the transcription in any other tissue. Typical examples of temporal and/or tissue specific promoters of plant origin that can be used with the polynucleotides of the present invention, are: PTA29, a promoter which is capable of driving gene transcription specifically in tapetum and only during anther development (Koltonow et al., Plant Cell 2:1201 (1990); RCc2 and RCc3, promoters that direct root-specific gene transcription in rice (Xu et al., Plant Mol. Biol. 27:237 (1995); TobRB27, a root-specific promoter from tobacco (Yamamoto et al., Plant Cell 3:371 (1991)). Examples of tissue-specific promoters under developmental control include promoters that initiate transcription only in certain tissues or organs, such as root, ovule, fruit, seeds, or flowers. Other suitable promoters include those from genes encoding storage proteins or the lipid body membrane protein, oleosin. A few root-specific promoters are noted above.

[2321] Stringency: “Stringency” as used herein is a function of probe length, probe composition (G+C content), and salt concentration, organic solvent concentration, and temperature of hybridization or wash conditions. Stringency is typically compared by the parameter Tₘ, which is the temperature at which 50% of the complementary molecules in the hybridization are hybridized, in terms of a temperature differential from Tₘ. High stringency conditions are those providing a condition of Tₘ−5° C. to Tₘ−10° C. Medium or moderate stringency conditions are those providing Tₘ−20° C. to Tₘ−29° C. Low stringency conditions are those providing a condition of Tₘ−40° C. to Tₘ−48° C. The relationship of hybridization conditions to Tₘ (in ° C.) is expressed in the mathematical equation

Tₘ=81.5−16.6(log₁₀[Na⁺])+0.41(% G+C)−(600/N) (1)

where N is the length of the probe. This equation works well for probes 14 to 70 nucleotides in length that are identical to the target sequence. The equation below for Tₘ of DNA-DNA hybrids is useful for probes in the range of 50 to greater than 500 nucleotides, and for conditions that include an organic solvent (formamide).

Tₘ=81.5+16.6 log {[Na⁺]/(1+0.7[Na⁺])}+0.41(% G+C)−500/L0.63(% formamide) (2)

where L is the length of the probe in the hybrid. (P. Tijessen, “Hybridization with Nucleic Acid Probes” in Laboratory Techniques in Biochemistry and Molecular Biology, P. C. vand der Vliet, ed., c. 1993 by Elsevier, Amsterdam.) The Tₘ of equation (2) is affected by the nature of the hybrid; for DNA-RNA hybrids Tₘ is 10-15° C. higher than calculated, for RNA-RNA hybrids Tₘ is 20-25° C. higher. Because the Tₘ decreases about 1° C. for each 1% decrease in homology when a long probe is used (Bonner et al., J. Mol. Biol. 81:123 (1973)), stringency conditions can be adjusted to favor detection of identical genes or related family members.

[2322] Equation (2) is derived assuming equilibrium and therefore, hybridizations according to the present invention are most preferably performed under conditions of probe excess and for sufficient time to achieve equilibrium. The time required to reach equilibrium can be shortened by inclusion of a hybridization accelerator such as dextran sulfate or another high volume polymer in the hybridization buffer.

[2323] Stringency can be controlled during the hybridization reaction or after hybridization has occurred by altering the salt and temperature conditions of the wash solutions used. The formulas shown above are equally valid when used to compute the stringency of a wash solution. Preferred wash solution stringencies lie within the ranges stated above; high stringency is 5-8° C. below Tₘ, medium or moderate stringency is 26-29° C. below Tₘ and low stringency is 45-48° C. below Tₘ.

[2324] Substantially free of: A composition containing A is “substantially free of” B when at least 85% by weight of the total A+B in the composition is A. Preferably, A comprises at least about 90% by weight of the total of A+B in the composition, more preferably at least about 95% or even 99% by weight. For example, a plant gene or DNA sequence can be considered substantially free of other plant genes or DNA sequences.

[2325] Translational start site: In the context of the current invention, a “translational start site” is usually an ATG in the cDNA transcript, more usually the first ATG. A single cDNA, however, may have multiple translational start sites.

[2326] Transcription start site: “Transcription start site” is used in the current invention to describe the point at which transcription is initiated. This point is typically located about 25 nucleotides downstream from a TFIID binding site, such as a TATA box. Transcription can initiate at one or more sites within the gene, and a single gene may have multiple transcriptional start sites, some of which may be specific for transcription in a particular cell-type or tissue.

[2327] Untranslated region (UTR): A “UTR” is any contiguous series of nucleotide bases that is transcribed, but is not translated. These untranslated regions may be associated with particular functions such as increasing mRNA message stability. Examples of UTRs include, but are not limited to polyadenylation signals, terminations sequences, sequences located between the transcriptional start site and the first exon (5′ UTR) and sequences located between the last exon and the end of the mRNA (3′ UTR).

[2328] Variant: The term “variant” is used herein to denote a polypeptide or protein or polynucleotide molecule that differs from others of its kind in some way. For example, polypeptide and protein variants can consist of changes in amino acid sequence and/or charge and/or post-translational modifications (such as glycosylation, etc).

### X. Examples

[2329] The invention is illustrated by way of the following examples. The invention is not limited by these examples as the scope of the invention is defined solely by the claims following.

### Example 1

### cDNA Preparation

[2330] A number of the nucleotide sequences disclosed in the Reference and Sequence tables or polynucleotides encoding polypeptides of the Protein Group or Protein Group Matrix tables, herein as representative of the SDFs of the invention can be obtained by sequencing genomic DNA (gDNA) and/or cDNA from corn plants grown from HYBRID SEED # 35A19, purchased from Pioneer Hi-Bred International, Inc., Supply Management, P.O. Box 256, Johnston, Iowa 50131-0256.

[2331] A number of the nucleotide sequences disclosed in the Reference and Sequence tables or polynucleotides encoding polypeptides of the Protein Group or Protein Group Matrix tables, herein as representative of the SDFs of the invention can also be obtained by sequencing genomic DNA from Arabidopsis thaliana, Wassilewskija ecotype or by sequencing cDNA obtained from mRNA from such plants as described below. This is a true breeding strain. Seeds of the plant are available from the Arabidopsis Biological Resource Center at the Ohio State University, under the accession number CS2360. Seeds of this plant were deposited under the terms and conditions of the Budapest Treaty at the American Type Culture Collection, Manassas, Va. on Aug. 31, 1999, and were assigned ATCC No. PTA-595.

[2332] Other methods for cloning full-length cDNA are described, for example, by Seki et al., Plant Journal 15:707-720 (1998) “High-efficiency cloning of Arabidopsis full-length cDNA by biotinylated Cap trapper”; Maruyama et al., Gene 138:171 (1994) “Oligo-capping a simple method to replace the cap structure of eukaryotic mRNAs with oligoribonucleotides”; and WO 96/34981.

[2333] Tissues were, or each organ was, individually pulverized and frozen in liquid nitrogen. Next, the samples were homogenized in the presence of detergents and then centrifuged. The debris and nuclei were removed from the sample and more detergents were added to the sample. The sample was centrifuged and the debris was removed. Then the sample was applied to a 2M sucrose cushion to isolate polysomes. The RNA was isolated by treatment with detergents and proteinase K followed by ethanol precipitation and centrifugation. The polysomal RNA from the different tissues was pooled according to the following mass ratios: 15/15/1 for male inflorescences, female inflorescences and root, respectively. The pooled material was then used for cDNA synthesis by the methods described below.

[2334] Starting material for cDNA synthesis for the exemplary corn cDNA clones with sequences presented in the Reference and Sequence tables or polynucleotides encoding polypeptides of the Protein Group or Protein Group Matrix tables was poly(A)-containing polysomal mRNAs from inflorescences and root tissues of corn plants grown from HYBRID SEED # 35A19. Male inflorescences and female (pre- and post-fertilization) inflorescences were isolated at various stages of development. Selection for poly(A) containing polysomal RNA was done using oligo d(T) cellulose columns, as described by Cox and Goldberg, “Plant Molecular Biology: A Practical Approach”, pp. 1-35, Shaw ed., c. 1988 by IRL, Oxford. The quality and the integrity of the polyA+ RNAs were evaluated.

[2335] Starting material for cDNA synthesis for the exemplary Arabidopsis cDNA clones with sequences presented in the Reference and Sequence tables or polynucleotides encoding polypeptides of the Protein Group or Protein Group Matrix tables was polysomal RNA isolated from the top-most inflorescence tissues of Arabidopsis thaliana Wassilewskija (Ws.) and from roots of Arabidopsis thaliana Landsberg erecta (L. er.), also obtained from the Arabidopsis Biological Resource Center. Nine parts inflorescence to every part root was used, as measured by wet mass. Tissue was pulverized and exposed to liquid nitrogen. Next, the sample was homogenized in the presence of detergents and then centrifuged. The debris and nuclei were removed from the sample and more detergents were added to the sample. The sample was centrifuged and the debris was removed and the sample was applied to a 2M sucrose cushion to isolate polysomal RNA. Cox et al., “Plant Molecular Biology: A Practical Approach”, pp. 1-35, Shaw ed., c. 1988 by IRL, Oxford. The polysomal RNA was used for cDNA synthesis by the methods described below. Polysomal mRNA was then isolated as described above for corn cDNA. The quality of the RNA was assessed electrophoretically.

[2336] Following preparation of the mRNAs from various tissues as described above, selection of mRNA with intact 5′ ends and specific attachment of an oligonucleotide tag to the 5′ end of such mRNA was performed using either a chemical or enzymatic approach. Both techniques take advantage of the presence of the “cap” structure, which characterizes the 5′ end of most intact mRNAs and which comprises a guanosine generally methylated once, at the 7 position.

[2337] The chemical modification approach involves the optional elimination of the 2′,3′-cis diol of the 3′ terminal ribose, the oxidation of the 2′,3′-cis diol of the ribose linked to the cap of the 5′ ends of the mRNAs into a dialdehyde, and the coupling of the such obtained dialdehyde to a derivatized oligonucleotide tag. Further detail regarding the chemical approaches for obtaining mRNAs having intact 5′ ends are disclosed in International Application No. WO96/34981 published Nov. 7, 1996.

[2338] The enzymatic approach for ligating the oligonucleotide tag to the intact 5′ ends of mRNAs involves the removal of the phosphate groups present on the 5′ ends of uncapped incomplete mRNAs, the subsequent decapping of mRNAs having intact 5′ ends and the ligation of the phosphate present at the 5′ end of the decapped mRNA to an oligonucleotide tag. Further detail regarding the enzymatic approaches for obtaining mRNAs having intact 5′ ends are disclosed in Dumas Milne Edwards J. B. (Doctoral Thesis of Paris VI University, Le clonage des ADNc complets: difficultes et perspectives nouvelles. Apports pour l'étude de la régulation de l'expression de la tryptophane hydroxylase de rat, 20 Dec. 1993), EPO 625572 and Kato et al., Gene 150:243-250 (1994).

[2339] In both the chemical and the enzymatic approach, the oligonucleotide tag has a restriction enzyme site (e.g. an EcoRI site) therein to facilitate later cloning procedures. Following attachment of the oligonucleotide tag to the mRNA, the integrity of the mRNA is examined by performing a Northern blot using a probe complementary to the oligonucleotide tag.

[2340] For the mRNAs joined to oligonucleotide tags using either the chemical or the enzymatic method, first strand cDNA synthesis is performed using an oligo-dT primer with reverse transcriptase. This oligo-dT primer can contain an internal tag of at least 4 nucleotides, which can be different from one mRNA preparation to another. Methylated dCTP is used for cDNA first strand synthesis to protect the internal EcoRI sites from digestion during subsequent steps. The first strand cDNA is precipitated using isopropanol after removal of RNA by alkaline hydrolysis to eliminate residual primers.

[2341] Second strand cDNA synthesis is conducted using a DNA polymerase, such as Klenow fragment and a primer corresponding to the 5′ end of the ligated oligonucleotide. The primer is typically 20-25 bases in length. Methylated dCTP is used for second strand synthesis in order to protect internal EcoRI sites in the cDNA from digestion during the cloning process.

[2342] Following second strand synthesis, the full-length cDNAs are cloned into a phagemid vector, such as pBlueScript™ (Stratagene). The ends of the full-length cDNAs are blunted with T4 DNA polymerase (Biolabs) and the cDNA is digested with EcoRI. Since methylated dCTP is used during cDNA synthesis, the EcoRI site present in the tag is the only hemi-methylated site; hence the only site susceptible to EcoRI digestion. In some instances, to facilitate subcloning, an Hind III adapter is added to the 3 end of full-length cDNAs.

[2343] The full-length cDNAs are then size fractionated using either exclusion chromatography (AcA, Biosepra) or electrophoretic separation which yields 3 to 6 different fractions. The full-length cDNAs are then directionally cloned either into pBlueScript™ using either the EcoRI and SmaI restriction sites or, when the Hind III adapter is present in the full-length cDNAs, the EcoRI and Hind III restriction sites. The ligation mixture is transformed, preferably by electroporation, into bacteria, which are then propagated under appropriate antibiotic selection.

[2344] Clones containing the oligonucleotide tag attached to full-length cDNAs are selected as follows.

[2345] The plasmid cDNA libraries made as described above are purified (e.g. by a column available from Qiagen). A positive selection of the tagged clones is performed as follows. Briefly, in this selection procedure, the plasmid DNA is converted to single stranded DNA using phage F1 gene II endonuclease in combination with an exonuclease (Chang et al., Gene 127:95 (1993)) such as exonuclease III or T7 gene 6 exonuclease. The resulting single stranded DNA is then purified using paramagnetic beads as described by Fry et al., Biotechniques 13: 124 (1992). Here the single stranded DNA is hybridized with a biotinylated oligonucleotide having a sequence corresponding to the 3′ end of the oligonucleotide tag. Preferably, the primer has a length of 20-25 bases. Clones including a sequence complementary to the biotinylated oligonucleotide are selected by incubation with streptavidin coated magnetic beads followed by magnetic capture. After capture of the positive clones, the plasmid DNA is released from the magnetic beads and converted into double stranded DNA using a DNA polymerase such as ThermoSequenase™ (obtained from Amersham Pharmacia Biotech). Alternatively, protocols such as the Gene Trapper™ kit (Gibco BRL) can be used. The double stranded DNA is then transformed, preferably by electroporation, into bacteria. The percentage of positive clones having the 5′ tag oligonucleotide is typically estimated to be between 90 and 98% from dot blot analysis.

[2346] Following transformation, the libraries are ordered in microtiter plates and sequenced. The Arabidopsis library was deposited at the American Type Culture Collection on Jan. 7, 2000 as “E-coli liba 010600” under the accession number PTA-1161.

### I. Example 2

### Southern Hybridizations

[2347] The SDFs of the invention can be used in Southern hybridizations as described above. The following describes extraction of DNA from nuclei of plant cells, digestion of the nuclear DNA and separation by length, transfer of the separated fragments to membranes, preparation of probes for hybridization, hybridization and detection of the hybridized probe.

[2348] The procedures described herein can be used to isolate related polynucleotides or for diagnostic purposes. Moderate stringency hybridization conditions, as defined above, are described in the present example. These conditions result in detection of hybridization between sequences having at least 70% sequence identity. As described above, the hybridization and wash conditions can be changed to reflect the desired percentage of sequence identity between probe and target sequences that can be detected.

[2349] In the following procedure, a probe for hybridization is produced from two PCR reactions using two primers from genomic sequence of Arabidopsis thaliana. As described above, the particular template for generating the probe can be any desired template.

[2350] The first PCR product is assessed to validate the size of the primer to assure it is of the expected size. Then the product of the first PCR is used as a template, with the same pair of primers used in the first PCR, in a second PCR that produces a labeled product used as the probe.

[2351] Fragments detected by hybridization, or other bands of interest, can be isolated from gels used to separate genomic DNA fragments by known methods for further purification and/or characterization.

### Buffers for Nuclear DNA Extraction

### 1. 10×HB

| | 1000 ml | |
|---|---|---|
| 40 mM | 10.2 g | Spermine (Sigma S-2876) and spermidine |
| spermidine | | (Sigma S-2501) |
| 10 mM spermine | 3.5 g | Stabilize chromatin and the nuclear |
| | | membrane |
| 0.1M EDTA | 37.2 g | EDTA inhibits nuclease |
| (disodium) | | |
| 0.1M Tris | 12.1 g | Buffer |
| 0.8M KCl | 59.6 g | Adjusts ionic strength for stability of nuclei |

[2353] Adjust pH to 9.5 with 10 N NaOH. It appears that there is a nuclease present in leaves. Use of pH 9.5 appears to inactivate this nuclease.
   2. 2 M sucrose (684 g per 1000 ml)
[2354] Heat about half the final volume of water to about 5° C. Add the sucrose slowly then bring the mixture to close to final volume; stir constantly until it has dissolved. Bring the solution to volume.
   3. Sarkosyl solution (lyses nuclear membranes)

| | 1000 ml |
|---|---|
| N-lauroyl sarcosine (Sarkosyl) | 20.0 g |
| 0.1M Tris | 12.1 g |
| 0.04M EDTA (Disodium) | 14.9 g |

[2355] Adjust the pH to 9.5 after all the components are dissolved and bring up to the proper volume.
   4.
[2356] 20% Triton X-100
[2357] 80 ml Triton X-100
[2358] 320 ml 1×HB (w/o β-ME and PMSF)
[2359] Prepare in advance; Triton takes some time to dissolve

### A. Procedure

[2360] 1. Prepare 1X “H” buffer (keep ice-cold during use)

| | 1000 ml |
|---|---|
| 10X HB | 100 ml |
| 2 M sucrose | 250 ml a non-ionic osmoticum |
| Water | 634 ml |
| Added just before use: | |
| 100 mM PMSF* | 10 ml a protease inhibitor; protects |
| | nuclear membrane proteins |
| β-mercaptoethanol | 1 ml inactivates nuclease by reducing |
| | disulfide bonds |

*100 mM PMSF (phenyl methyl sulfonyl fluoride, Sigma P-7626) (add 0.0875 g to 5 ml 100% ethanol)

[2361] 2. Homogenize the tissue in a blender (use 300-400 ml of 1×HB per blender). Be sure that you use 5-10 ml of HB buffer per gram of tissue. Blenders generate heat so be sure to keep the homogenate cold. It is necessary to put the blenders in ice periodically.
[2362] 3. Add the 20% Triton X-100 (25 ml per liter of homogenate) and gently stir on ice for 20 min. This lyses plastid, but not nuclear, membranes.
[2363] 4. Filter the tissue suspension through several nylon filters into an ice-cold beaker. The first filtration is through a 250-micron membrane; the second is through an 85-micron membrane; the third is through a 50-micron membrane; and the fourth is through a 20-micron membrane. Use a large funnel to hold the filters. Filtration can be sped up by gently squeezing the liquid through the filters.
[2364] 5. Centrifuge the filtrate at 1200×g for 20 min. at 4° C. to pellet the nuclei.
[2365] 6. Discard the dark green supernatant. The pellet will have several layers to it. One is starch; it is white and gritty. The nuclei are gray and soft. In the early steps, there may be a dark green and somewhat viscous layer of chloroplasts.
   [2366] Wash the pellets in about 25 ml cold H buffer (with Triton X-100) and resuspend by swirling gently and pipetting. After the pellets are resuspended.
   [2367] Pellet the nuclei again at 1200-1300×g. Discard the supernatant.
   [2368] Repeat the wash 3-4 times until the supernatant has changed from a dark green to a pale green. This usually happens after 3 or 4 resuspensions. At this point, the pellet is typically grayish white and very slippery. The Triton X-100 in these repeated steps helps to destroy the chloroplasts and mitochondria that contaminate the prep.
   [2369] Resuspend the nuclei for a final time in a total of 15 ml of H buffer and transfer the suspension to a sterile 125 ml Erlenmeyer flask.
[2370] 7. Add 15 ml, dropwise, cold 2% Sarkosyl, 0.1 M Tris, 0.04 M EDTA solution (pH 9.5) while swirling gently. This lyses the nuclei. The solution will become very viscous.
[2371] 8. Add 30 grams of CsCl and gently swirl at room temperature until the CsCl is in solution. The mixture will be gray, white and viscous.
[2372] 9. Centrifuge the solution at 11,400×g at 4° C. for at least 30 min. The longer this spin is, the firmer the protein pellicle.
[2373] 10. The result is typically a clear green supernatant over a white pellet, and (perhaps) under a protein pellicle. Carefully remove the solution under the protein pellicle and above the pellet. Determine the density of the solution by weighing 1 ml of solution and add CsCl if necessary to bring to 1.57 g/ml. The solution contains dissolved solids (sucrose etc) and the refractive index alone will not be an accurate guide to CsCl concentration.
[2374] 11. Add 20 μl of 10 mg/ml EtBr per ml of solution.
[2375] 12. Centrifuge at 184,000×g for 16 to 20 hours in a fixed-angle rotor.
[2376] 13. Remove the dark red supernatant that is at the top of the tube with a plastic transfer pipette and discard. Carefully remove the DNA band with another transfer pipette. The DNA band is usually visible in room light; otherwise, use a long wave UV light to locate the band.
[2377] 14. Extract the ethidium bromide with isopropanol saturated with water and salt. Once the solution is clear, extract at least two more times to ensure that all of the EtBr is gone. Be very gentle, as it is very easy to shear the DNA at this step. This extraction may take a while because the DNA solution tends to be very viscous. If the solution is too viscous, dilute it with TE.
[2378] 15. Dialyze the DNA for at least two days against several changes (at least three times) of TE (10 mM Tris, 1 mM EDTA, pH 8) to remove the cesium chloride.
[2379] 16. Remove the dialyzed DNA from the tubing. If the dialyzed DNA solution contains a lot of debris, centrifuge the DNA solution at least at 2500×g for 10 min. and carefully transfer the clear supernatant to a new tube. Read the A260 concentration of the DNA.
[2380] 17. Assess the quality of the DNA by agarose gel electrophoresis (1% agarose gel) of the DNA. Load 50 ng and 100 ng (based on the OD reading) and compare it with known and good quality DNA. Undigested lambda DNA and a lambda-HindIII-digested DNA are good molecular weight makers.

### Protocol for Digestion of Genomic DNA

### Protocol:

[2381] 1. The relative amounts of DNA for different crop plants that provide approximately a balanced number of genome equivalent is given in Table 3. Note that due to the size of the wheat genome, wheat DNA will be underrepresented. Lambda DNA provides a useful control for complete digestion.
[2382] 2. Precipitate the DNA by adding 3 volumes of 100% ethanol. Incubate at −20° C. for at least two hours. Yeast DNA can be purchased and made up at the necessary concentration, therefore no precipitation is necessary for yeast DNA.
[2383] 3. Centrifuge the solution at 11,400×g for 20 min. Decant the ethanol carefully (be careful not to disturb the pellet). Be sure that the residual ethanol is completely removed either by vacuum desiccation or by carefully wiping the sides of the tubes with a clean tissue.
[2384] 4. Resuspend the pellet in an appropriate volume of water. Be sure the pellet is fully resuspended before proceeding to the next step. This may take about 30 min.
[2385] 5. Add the appropriate volume of 10× reaction buffer provided by the manufacturer of the restriction enzyme to the resuspended DNA followed by the appropriate volume of enzymes. Be sure to mix it properly by slowly swirling the tubes.
[2386] 6. Set-up the lambda digestion-control for each DNA that you are digesting.
[2387] 7. Incubate both the experimental and lambda digests overnight at 37° C. Spin down condensation in a microfuge before proceeding.
[2388] 8. After digestion, add 2 μl of loading dye (typically 0.25% bromophenol blue, 0.25% xylene cyanol in 15% Ficoll or 30% glycerol) to the lambda-control digests and load in 1% TPE-agarose gel (TPE is 90 mM Tris-phosphate, 2 mM EDTA, pH 8). If the lambda DNA in the lambda control digests are completely digested, proceed with the precipitation of the genomic DNA in the digests.
[2389] 9. Precipitate the digested DNA by adding 3 volumes of 100% ethanol and incubating in −20° C. for at least 2 hours (preferably overnight).
   [2390] EXCEPTION: Arabidopsis and yeast DNA are digested in an appropriate volume; they don't have to be precipitated.
[2391] 10. Resuspend the DNA in an appropriate volume of TE (e.g., 22 μl×50 blots=1100 μl) and an appropriate volume of 10× loading dye (e.g., 2.4 μl×50 blots=120 μl). Be careful in pipetting the loading dye—it is viscous. Be sure you are pipetting the correct volume.

TABLE 3
Some guide points in digesting genomic DNA.

| | | | | Genome | |
|---|---|---|---|---|---|
| | | | Size | Equivalent | Amount |
| | | | Relative to | to 2 μg | of DNA |
| Species | Genome Size | | Arabidopsis | Arabidopsis DNA | per blot |
| Arabidopsis | 120 | Mb | 1X | 1X | 2 μg |
| Brassica | 1,100 | Mb | 9.2X | 0.54X | 10 μg |
| Corn | 2,800 | Mb | 23.3X | 0.43X | 20 μg |
| Cotton | 2,300 | Mb | 19.2X | 0.52X | 20 μg |
| Oat | 11,300 | Mb | 94X | 0.11X | 20 μg |
| Rice | 400 | Mb | 3.3X | 0.75X | 5 μg |
| Soybean | 1,100 | Mb | 9.2X | 0.54X | 10 μg |
| Sugarbeet | 758 | Mb | 6.3X | 0.8X | 10 μg |
| Sweetclover | 1,100 | Mb | 9.2X | 0.54X | 10 μg |
| Wheat | 16,000 | Mb | 133X | 0.08X | 20 μg |
| Yeast | 15 | Mb | 0.12X | 1X | 0.25 μg |

### Protocol for Southern Blot Analysis

[2392] The digested DNA samples are electrophoresed in 1% agarose gels in 1×TPE buffer. Low voltage; overnight separations are preferred. The gels are stained with EtBr and photographed.
[2393] 1. For blotting the gels, first incubate the gel in 0.25 N HCl (with gentle shaking) for about 15 min.
[2394] 2. Then briefly rinse with water. The DNA is denatured by 2 incubations. Incubate (with shaking) in 0.5 M NaOH in 1.5 M NaCl for 15 min.
[2395] 3. The gel is then briefly rinsed in water and neutralized by incubating twice (with shaking) in 1.5 M Tris pH 7.5 in 1.5 M NaCl for 15 min.
[2396] 4. A nylon membrane is prepared by soaking it in water for at least 5 min, then in 6×SSC for at least 15 min. before use. (20×SSC is 175.3 g NaCl, 88.2 g sodium citrate per liter, adjusted to pH 7.0.)
[2397] 5. The nylon membrane is placed on top of the gel and all bubbles in between are removed. The DNA is blotted from the gel to the membrane using an absorbent medium, such as paper toweling and 6×SCC buffer. After the transfer, the membrane may be lightly brushed with a gloved hand to remove any agarose sticking to the surface.
[2398] 6. The DNA is then fixed to the membrane by UV crosslinking and baking at 80° C. The membrane is stored at 4° C. until use.

### B. Protocol for PCR Amplification of Genomic Fragments in Arabidopsis

[2399] Amplification Procedures:

[2400] 1. Mix the following in a 0.20 ml PCR tube or 96-well PCR plate:

| Volume | | Stock | Final Amount or Conc. | |
|---|---|---|---|---|
| 0.5 | μl | ~10 ng/μl genomic DNA¹ | 5 | ng |
| 2.5 | μl | 10× PCR buffer | 20 mM Tris, 50 mM KCl | |
| 0.75 | μl | 50 mM MgCl₂ | 1.5 | mM |
| 1 | μl | 10 pmol/μl Primer 1 (Forward) | 10 | pmol |
| 1 | μl | 10 pmol/μl Primer 2 (Reverse) | 10 | pmol |
| 0.5 | μl | 5 mM dNTPs | 0.1 | mM |
| 0.1 | μl | 5 units/μl Platinum Taq ™ (Life | 1 | units |
| | | Technologies, Gaithersburg, MD) | | |
| | | DNA Polymerase | | |
| (to 25 | μl) | Water | | |

¹Arabidopsis DNA is used in the present experiment, but the procedure is a general one.

[2401] 2. The template DNA is amplified using a Perkin Elmer 9700 PCR machine:

[2402] 1) 94° C. for 10 min. followed by

| 2) | 3) | 4) |
|---|---|---|
| 5 cycles: | 5 cycles: | 25 cycles: |
| 94° C. - 30 sec | 94° C. - 30 sec | 94° C. - 30 sec |
| 62° C. - 30 sec | 58° C. - 30 sec | 53° C. - 30 sec |
| 72° C. - 3 min | 72° C. - 3 min | 72° C. - 3 min |

[2403] 5) 72° C. for 7 min. Then the reactions are stopped by chilling to 4° C.

[2404] The procedure can be adapted to a multi-well format if necessary.

### Quantification and Dilution of PCR Products:

[2405] 1. The product of the PCR is analyzed by electrophoresis in a 1% agarose gel. A linearized plasmid DNA can be used as a quantification standard (usually at 50, 100, 200, and 400 ng). These will be used as references to approximate the amount of PCR products. HindIII-digested Lambda DNA is useful as a molecular weight marker. The gel can be run fairly quickly; e.g., at 100 volts. The standard gel is examined to determine that the size of the PCR products is consistent with the expected size and if there are significant extra bands or smeary products in the PCR reactions.
[2406] 2. The amounts of PCR products can be estimated on the basis of the plasmid standard.
[2407] 3. For the small number of reactions that produce extraneous bands, a small amount of DNA from bands with the correct size can be isolated by dipping a sterile 10-μl tip into the band while viewing though a UV Transilluminator. The small amount of agarose gel (with the DNA fragment) is used in the labeling reaction.

### C. Protocol for PCR-DIG-Labeling of DNA

### Solutions:

[2408] Reagents in PCR reactions (diluted PCR products, 10×PCR Buffer, 50 mM MgCl₂, 5 U/μl Platinum Taq Polymerase, and the primers)
[2409] 10× dNTP+DIG-11-dUTP [1:5]: (2 mM dATP, 2 mM dCTP, 2 mM dGTP, 1.65 mM dTTP, 0.35 mM DIG-11-dUTP)
[2410] 10× dNTP+DIG-11-dUTP [1:10]: (2 mM dATP, 2 mM dCTP, 2 mM dGTP, 1.81 mM dTTP, 0.19 mM DIG-11-dUTP)
[2411] 10× dNTP+DIG-11-dUTP [1:15]: (2 mM dATP, 2 mM dCTP, 2 mM dGTP, 1.875 mM dTTP, 0.125 mM DIG-11-dUTP)
[2412] TE buffer (10 mM Tris, 1 mM EDTA, pH 8)
[2413] Maleate buffer: In 700 ml of deionized distilled water, dissolve 11.61 g maleic acid and 8.77 g NaCl. Add NaOH to adjust the pH to 7.5. Bring the volume to 1 L. Stir for 15 min. and sterilize.
[2414] 10% blocking solution: In 80 ml deionized distilled water, dissolve 1.16 g maleic acid. Next, add NaOH to adjust the pH to 7.5. Add 10 g of the blocking reagent powder (Boehringer Mannheim, Indianapolis, Ind., Cat. no. 1096176). Heat to 60° C. while stirring to dissolve the powder. Adjust the volume to 100 ml with water. Stir and sterilize.
[2415] 1% blocking solution: Dilute the 10% stock to 1% using the maleate buffer.
[2416] Buffer 3 (100 mM Tris, 100 mM NaCl, 50 mM MgCl₂, pH9.5). Prepared from autoclaved solutions of 1M Tris pH 9.5, 5 M NaCl, and 1 M MgCl₂ in autoclaved distilled water.

### Procedure:

[2417] 1. PCR reactions are performed in 25 μl volumes containing:

| | |
|---|---|
| PCR buffer | 1X |
| MgCl₂ | 1.5 mM |
| 10X dNTP + DIG-11-dUTP | 1X (please see the note below) |
| Platinum Taq ™ Polymerase | 1 unit |
| 10 pg probe DNA | |
| 10 pmol primer 1 | |

| | |
|---|---|
| Note: | |
| | Use for: |
| 10X dNTP + DIG-11-dUTP (1:5) | <1 kb |
| 10X dNTP + DIG-11-dUTP (1:10) | 1 kb to 1.8 kb |
| 10X dNTP + DIG-11-dUTP (1:15) | >1.8 kb |

[2418] 2. The PCR reaction uses the following amplification cycles:
   [2419] 1) 94° C. for 10 min.

| 2) | 3) | 4) |
|---|---|---|
| 5 cycles: | 5 cycles: | 25 cycles: |
| 95° C. - 30 sec | 95° C. - 30 sec | 95° C. - 30 sec |
| 61° C. - 1 min | 59° C. - 1 min | 51° C. - 1 min |
| 73° C. - 5 min | 75° C. - 5 min | 73° C. - 5 min |

[2420] 5) 72° C. for 8 min. The reactions are terminated by chilling to 4° C. (hold).
[2421] 3. The products are analyzed by electrophoresis—in a 1% agarose gel, comparing to an aliquot of the unlabelled probe starting material.
[2422] 4. The amount of DIG-labeled probe is determined as follows:
   [2423] Make serial dilutions of the diluted control DNA in dilution buffer (TE: 10 mM Tris and 1 mM EDTA, pH 8) as shown in the following table:

| DIG-labeled control | | Final Conc. (Dilution |
|---|---|---|
| DNA starting conc. | Stepwise Dilution | Name) |
| 5 ng/μl | 1 μl in 49 μl TE | 100 pg/μl (A) |
| 100 pg/μl (A) | 25 μl in 25 μl TE | 50 pg/μl (B) |
| 50 pg/μl (B) | 25 μl in 25 μl TE | 25 pg/μl (C) |
| 25 pg/μl (C) | 20 μl in 30 μl TE | 10 pg/μl (D) |

[2424] a. Serial deletions of a DIG-labeled standard DNA ranging from 100 pg to 10 pg are spotted onto a positively charged nylon membrane, marking the membrane lightly with a pencil to identify each dilution.
[2425] b. Serial dilutions (e.g., 1:50, 1:2500, 1:10,000) of the newly labeled DNA probe are spotted.
[2426] c. The membrane is fixed by UV crosslinking.
[2427] d. The membrane is wetted with a small amount of maleate buffer and then incubated in 1% blocking solution for 15 min at room temp.
[2428] e. The labeled DNA is then detected using alkaline phosphatase conjugated anti-DIG antibody (Boehringer Mannheim, Indianapolis, Ind., cat. no. 1093274) and an NBT substrate according to the manufacture's instruction.
[2429] f. Spot intensities of the control and experimental dilutions are then compared to estimate the concentration of the PCR-DIG-labeled probe.

### D. Prehybridization and Hybridization of Southern Blots

### Solutions:

| | |
|---|---|
| 100% Formamide | purchased from Gibco |
| 20X SSC | (1X = 0.15M NaCl, 0.015M Na₃citrate) |
| per L: | 175 g NaCl |
| | 87.5 g Na₃citrate 2H₂0 |

[2431] 20% Sarkosyl (N-lauroyl-sarcosine)
[2432] 20% SDS (sodium dodecyl sulphate)
[2433] 10% Blocking Reagent: In 80 ml deionized distilled water, dissolve 1.16 g maleic acid. Next, add NaOH to adjust the pH to 7.5. Add 10g of the blocking reagent powder. Heat to 60° C. while stirring to dissolve the powder. Adjust the volume to 100 ml with water. Stir and sterilize.

### Prehybridization Mix:

| Final | | Volume | |
|---|---|---|---|
| Concentration | Components | (per 100 ml) | Stock |
| 50% | Formamide | 50 ml | 100% |
| 5X | SSC | 25 ml | 20X |
| 0.1% | Sarkosyl | 0.5 ml | 20% |
| 0.02% | SDS | 0.1 ml | 20% |
| 2% | Blocking Reagent | 20 ml | 10% |
| | Water | 4.4 ml | |

### General Procedures:

[2435] 1. Place the blot in a heat-sealable plastic bag and add an appropriate volume of prehybridization solution (30 ml/100 cm²) at room temperature. Seal the bag with a heat sealer, avoiding bubbles as much as possible. Lay down the bags in a large plastic tray (one tray can accommodate at least 4-5 bags). Ensure that the bags are lying flat in the tray so that the prehybridization solution is evenly distributed throughout the bag. Incubate the blot for at least 2 hours with gentle agitation using a waver shaker.
[2436] 2. Denature DIG-labeled DNA probe by incubating for 10 min. at 98° C. using the PCR machine and immediately cool it to 4° C.
[2437] 3. Add probe to prehybridization solution (25 ng/ml; 30 ml=750 ng total probe) and mix well but avoid foaming. Bubbles may lead to background.
[2438] 4. Pour off the prehybridization solution from the hybridization bags and add new prehybridization and probe solution mixture to the bags containing the membrane.
[2439] 5. Incubate with gentle agitation for at least 16 hours.
[2440] 6. Proceed to medium stringency post-hybridization wash:
   [2441] Three times for 20 min. each with gentle agitation using 1×SSC, 1% SDS at 60° C.
   [2442] All wash solutions must be prewarmed to 60° C. Use about 100 ml of wash solution per membrane.
   [2443] To avoid background keep the membranes fully submerged to avoid drying in spots; agitate sufficiently to avoid having membranes stick to one another.
[2444] 7. After the wash, proceed to immunological detection and CSPD development.
   E. Procedure for Immunological Detection with CSPD

### Solutions:

| | |
|---|---|
| Buffer 1: | Maleic acid buffer (0.1M maleic acid, 0.15M NaCl; |
| | adjusted to pH 7.5 with NaoH) |
| Washing buffer: | Maleic acid buffer with 0.3% (v/v) Tween 20. |
| Blocking stock | 10% blocking reagent in buffer 1. Dissolve (10X |
| solution | concentration): blocking reagent powder (Boehringer |
| | Mannheim, Indianapolis, IN, cat. no. 1096176) by |
| | constantly stirring on a 65° C. heating block or heat in |
| | a microwave, autoclave and store at 4° C. |
| Buffer 2 | Dilute the stock solution 1:10 in Buffer 1. |
| (1X blocking | |
| solution): | |
| Detection buffer: | 0.1M Tris, 0.1M NaCl, pH 9.5 |

### Procedure:

[2446] 1. After the post-hybridization wash the blots are briefly rinsed (1-5 min.) in the maleate washing buffer with gentle shaking.
[2447] 2. Then the membranes are incubated for 30 min. in Buffer 2 with gentle shaking.
[2448] 3. Anti-DIG-AP conjugate (Boehringer Mannheim, Indianapolis, Ind., cat. no. 1093274) at 75 mU/ml (1:10,000) in Buffer 2 is used for detection. 75 ml of solution can be used for 3 blots.
[2449] 4. The membrane is incubated for 30 min. in the antibody solution with gentle shaking.
[2450] 5. The membrane are washed twice in washing buffer with gentle shaking. About 250 mls is used per wash for 3 blots.
[2451] 6. The blots are equilibrated for 2-5 min in 60 ml detection buffer.
[2452] 7. Dilute CSPD (1:200) in detection buffer. (This can be prepared ahead of time and stored in the dark at 4° C.).
   [2453] The following steps must be done individually. Bags (one for detection and one for exposure) are generally cut and ready before doing the following steps.
[2454] 8. The blot is carefully removed from the detection buffer and excess liquid removed without drying the membrane. The blot is immediately placed in a bag and 1.5 ml of CSPD solution is added. The CSPD solution can be spread over the membrane. Bubbles present at the edge and on the surface of the blot are typically removed by gentle rubbing. The membrane is incubated for 5 min. in CSPD solution.
[2455] 9. Excess liquid is removed and the membrane is blotted briefly (DNA side up) on Whatman 3MM paper. Do not let the membrane dry completely.
[2456] 10. Seal the damp membrane in a hybridization bag and incubate for 10 min at 37° C. to enhance the luminescent reaction.
[2457] 11. Expose for 2 hours at room temperature to X-ray film. Multiple exposures can be taken. Luminescence continues for at least 24 hours and signal intensity increases during the first hours.

### Example 3

### Microarray Experiments and Results

### Example 3

### Microarray Experiments and Results

### 1. Sample Tissue Preparation

### (a) Roots

[2458] Seeds of Arabidopsis thaliana (Ws) were sterilized in full strength bleach for less than 5 min., washed more than 3 times in sterile distilled deionized water and plated on MS agar plates. The plates were placed at 4° C. for 3 nights and then placed vertically into a growth chamber having 16 hr light/8 hr dark cycles, 23° C., 70% relative humidity and ˜11,000 LUX. After 2 weeks, the roots were cut from the agar, flash frozen in liquid nitrogen and stored at −80° C. (EXPT REP: 108439 and 108434)

### (b) Root Hairless Mutants

[2459] Plants mutant at the rhl gene locus lack root hairs. This mutation is maintained as a heterozygote.

[2460] Seeds of Arabidopsis thaliana (Landsberg erecta) mutated at the rhi gene locus were sterilized using 30% bleach with 1 ul/ml 20% Triton-X 100 and then vernalized at 4° C. for 3 days before being plated onto GM agar plates. Plates were placed in growth chamber with 16 hr light/8 hr. dark, 23° C., 14,500-15,900 LUX, and 70% relative humidity for germination and growth.

[2461] After 7 days, seedlings were inspected for root hairs using a dissecting microscope. Mutants were harvested and the cotyledons removed so that only root tissue remained. Tissue was then flash frozen in liquid nitrogen and stored at −80 C. (EXPT REP: 108433) Arabidopsis thaliana (Landsberg erecta) seedlings grown and prepared as above were used as controls. (EXPT REP: 108433)

[2462] Alternatively, seeds of Arabidopsis thaliana (Landsberg erecta), heterozygous for the rhl1 (root hairless) mutation, were surface-sterilized in 30% bleach containing 0.1% Triton X-100 and further rinsed in sterile water. They were then vernalized at 4° C. for 4 days before being plated onto MS agar plates. The plates were maintained in a growth chamber at 24° C. with 16 hr light/8 hr dark for germination and growth. After 10 days, seedling roots that expressed the phenotype (i.e. lacking root hairs) were cut below the hypocotyl junction, frozen in liquid nitrogen and stored at −80° C. Those seedlings with the normal root phenotype (heterozygous or wt) were collected as described for the mutant and used as controls.

### (c) Rosette Leaves, Stems, and Siliques

[2463] Arabidopsis thaliana (Ws) seed was vernalized at 4° C. for 3 days before sowing in Metro-mix soil type 350. Flats were placed in a growth chamber having 16 hr light/8 hr dark, 80% relative humidity, 23° C. and 13,000 LUX for germination and growth. After 3 weeks, rosette leaves, stems, and siliques (see EXPT REP: 108436, 108437 and 108438) were harvested, flash frozen in liquid nitrogen and stored at −80° C. until use. After 4 weeks, siliques (<5 mm, 5-10 mm and >10 mm) were harvested, flash frozen in liquid nitrogen and stored at −80° C. until use. 5 week old whole plants (used as controls) were harvested, flash frozen in liquid nitrogen and kept at −80° C. until RNA was isolated.

### (d) Trichomes

[2464] Arabidopsis thaliana (Colombia glabrous) inflorescences were used as a control and CS8143 (hairy inflorescence ecotype) inflorescences, having increased trichomes, were used as the experimental sample.

[2465] Approximately 10 μl of each type of seed was sown on a flat of 350 soil (containing 0.03% marathon) and vernalized at 4° C. for 3 days. Plants were then grown at room temperature under florescent lighting. Young inflorescences were collected at 30 days for the control plants and 37 days for the experimental plants. Each inflorescence was cut into one-half inch (½″) pieces, flash frozen in liquid nitrogen and stored at −80° C. until RNA was isolated.

### (e) Germination

[2466] Arabidopsis thaliana seeds (ecotype Ws) were sterilized in bleach and rinsed with sterile water. The seeds were placed in 100 mm petri plates containing soaked autoclaved filter paper. Plates were foil-wrapped and left at 4° C. for 3 nights to vernalize. After cold treatment, the foil was removed and plates were placed into a growth chamber having 16 hr light/8 hr dark cycles, 23° C., 70% relative humidity and ˜11,000 lux. Seeds were collected 1 d (EXPT REP: 108461), 2 d (EXPT REP: 108462), 3 d (EXPT REP: 108463) and 4 d (EXPT REP: 108464) later, flash frozen in liquid nitrogen and stored at −80° C. until RNA was isolated.

### (f) Shoot Apical Meristem

[2467] Arabidopsis thaliana (Landsberg erecta) plants mutant at the stm gene locus lack shoot meristems, produce aerial rosettes, have a reduced number of flowers per inflorescence, as well as a reduced number of petals, stamens and carpels, and is female sterile. This mutation is maintained as a heterozygote.

[2468] Seeds of Arabidopsis thaliana (Landsberg erecta) mutated at the stm locus were sterilized using 30% bleach with 1 ul/ml 20% Triton-X100. The seeds were vernalized at 4° C. for 3 days before being plated onto GM agar plates. Half were then put into a 22° C., 24 hr light growth chamber and half in a 24° C. 16 hr light/8 hr dark growth chamber having 14,500-15,900 LUX, and 70% relative humidity for germination and growth.

[2469] After 7 days, seedlings were examined for leaf primordia using a dissecting microscope. Presence of leaf primordia indicated a wild type phenotype. Mutants were selected based on lack of leaf primordia. Mutants were then harvested and hypocotyls removed leaving only tissue in the shoot region. Tissue was then flash frozen in liquid nitrogen and stored at −80° C.

[2470] Control tissue was isolated from 5 day old Landsberg erecta seedlings grown in the same manner as above. Tissue from the shoot region was harvested in the same manner as the stm tissue, but only contained material from the 24° C., 16 hr light/8 hr dark long day cycle growth chamber. (EXPT REP: 108453)

[2471] Seeds of maize hybrid 35A (Pioneer) were sown in water-moistened sand in flats (10 rows, 5-6 seed/row) and covered with clear, plastic lids before being placed in a growth chamber having 16 hr light (25° C.)/8 hr dark (20° C.), 75% relative humidity and 13,000-14,000 LUX. Covered flats were watered every three days for 8 days. Seedlings were carefully removed from the sand and the outer layers of leaf shealth removed. About 2 mm sections were cut and flash frozen in liquid nitrogen prior to storage at −80° C. The tissues above the shoot apices (˜1 cm long) were cut, treated as above and used as control tissue.

### (g) Abscissic Acid (ABA)

[2472] Seeds of Arabidopsis thaliana (ecotype Wassilewskija) were sown in trays and left at 4° C. for 4 days to vernalize. They were then transferred to a growth chamber having grown 16 hr light/8 hr dark, 13,000 LUX, 70% humidity, and 20° C. and watered twice a week with 1 L of 1× Hoagland's solution. Approximately 1,000 14 day old plants were spayed with 200-250 mls of 100 μM ABA in a 0.02% solution of the detergent Silwet L-77. Whole seedlings, including roots, were harvested within a 15 to 20 minute time period at 1 hr and 6 hr after treatment, flash-frozen in liquid nitrogen and stored at −80° C.

[2473] Seeds of maize hybrid 35A (Pioneer) were sown in water-moistened sand in flats (10 rows, 5-6 seed/row) and covered with clear, plastic lids before being placed in a growth chamber having 16 hr light (25° C.)/8 hr dark (20° C.), 75% relative humidity and 13,000-14,000 LUX. Covered flats were watered every three days for 7 days. Seedlings were carefully removed from the sand and placed in 1-liter beakers with 100 μM ABA for treatment. Control plants were treated with water. After 6 hr and 24 hr, aerial and root tissues were separated and flash frozen in liquid nitrogen prior to storage at −80° C.

### (h) Auxin Responsive

[2474] Seeds of Arabidopsis thaliana (ecotype Wassilewskija) were sown in trays and left at 4° C. for 4 days to vernalize. They were then transferred to a growth chamber having 16 hr light/8 hr dark, 13,000 LUX, 70% humidity, 20° C. and watered twice a week with 1 L of 1× Hoagland's solution (recipe recited in Feldmann et al., (1987) Mol. Gen. Genet. 208: 1-9 and described as complete nutrient solution). Approximately 1,000 14 day old plants were spayed with 200-250 mls of 100 μM NAA in a 0.02% solution of the detergent Silwet L-77. Aerial tissues (everything above the soil line) were harvested within a 15 to 20 minute time period 1 hr and 6 hrs after treatment, flash-frozen in liquid nitrogen and stored at −80° C.

[2475] Seeds of maize hybrid 35A (Pioneer) were sown in water-moistened sand in flats (10 rows, 5-6 seed/row) and covered with clear, plastic lids before being placed in a growth chamber having 16 hr light (25° C.)/8 hr dark (20° C.), 75% relative humidity and 13,000-14,000 LUX. Covered flats were watered every three days for 7 days. Seedlings were carefully removed from the sand and placed in 1-liter beakers with 100 μM NAA for treatment. Control plants were treated with water. After 6 hr and 24 hr, aerial and root tissues were separated and flash frozen in liquid nitrogen prior to storage at −80° C.

### (i) Cytokinin

[2476] Seeds of Arabidopsis thaliana (ecotype Wassilewskija) were sown in trays and left at 4° C. for 4 days to vernalize. They were then transferred to a growth chamber having 16 hr light/8 hr dark, 13,000 LUX, 70% humidity, 20° C. temperature and watered twice a week with 1 L of 1× Hoagland's solution. Approximately 1,000 14 day old plants were spayed with 200-250 mls of 100 μM BA in a 0.02% solution of the detergent Silwet L-77. Aerial tissues (everything above the soil line) were harvested within a 15 to 20 minute time period 1 hr and 6 hrs after treatment, flash-frozen in liquid nitrogen and stored at −80° C.

[2477] Seeds of maize hybrid 35A (Pioneer) were sown in water-moistened sand in flats (10 rows, 5-6 seed/row) and covered with clear, plastic lids before being placed in a growth chamber having 16 hr light (25° C.)/8 hr dark (20° C.), 75% relative humidity and 13,000-14,000 LUX. Covered flats were watered every three days for 7 days. Seedlings were carefully removed from the sand and placed in 1-liter beakers with 100 μM BA for treatment. Control plants were treated with water. After 6 hr, aerial and root tissues were separated and flash frozen in liquid nitrogen prior to storage at −80° C.

### (j) Brassinosteroid Responsive

[2478] Two separate experiments were performed, one with epi-brassinolide and one with the brassinosteroid biosynthetic inhibitor brassinazole.

[2479] In the epi-brassinolide experiments, seeds of wild-type Arabidopsis thaliana (ecotype Wassilewskija) and the brassinosteroid biosynthetic mutant dwf4-1 were sown in trays and left at 4° C. for 4 days to vernalize. They were then transferred to a growth chamber having 16 hr light/8 hr dark, 11,000 LUX, 70% humidity and 22° C. temperature. Four week old plants were spayed with a 1 μM solution of epi-brassinolide and shoot parts (unopened floral primordia and shoot apical meristems) harvested three hours later. Tissue was flash-frozen in liquid nitrogen and stored at −80° C. (EXPT REP 108480)

[2480] In the brassinazole experiments, seeds of wild-type Arabidopsis thaliana (ecotype Wassilewskija) were grown as described above. Four week old plants were spayed with a 1 μM solution of brassinazole and shoot parts (unopened floral primordia and shoot apical meristems) harvested three hours later. Tissue was flash-frozen in liquid nitrogen and stored at −80° C. (EXPT REP 108481)

[2481] In addition to the spray experiments, tissue was prepared from two different mutants; (1) a dwf4-1 knock out mutant (EXPT REP: 108478) and (2) a mutant overexpressing the dwf4-1 gene (EXPT REP: 108479).

[2482] Seeds of wild-type Arabidopsis thaliana (ecotype Wassilewskija) and of the dwf4-1 knock out and overexpressor mutants were sown in trays and left at 4° C. for 4 days to vernalize. They were then transferred to a growth chamber having 16 hr light/8 hr dark, 11,000 LUX, 70% humidity and 22° C. temperature. Tissue from shoot parts (unopened floral primordia and shoot apical meristems) was flash-frozen in liquid nitrogen and stored at −80° C.

[2483] Another experiment was completed with seeds of Arabidopsis thaliana (ecotype Wassilewskija) were sown in trays and left at 4° C. for 4 days to vernalize. They were then transferred to a growth chamber. Plants were grown under long-day (16 hr light: 8 hr. dark) conditions, 13,000 LUX light intensity, 70% humidity, 20° C. temperature and watered twice a week with 1 L 1× Hoagland's solution (recipe recited in Feldmann et al., (1987) Mol. Gen. Genet. 208: 1-9 and described as complete nutrient solution). Approximately 1,000 14 day old plants were spayed with 200-250 mls of 0.1 μM Epi-Brassinolite in 0.02% solution of the detergent Silwet L-77. At 1 hr. and 6 hrs. after treatment aerial tissues were harvested within a 15 to 20 minute time period and flash-frozen in liquid nitrogen.

[2484] Seeds of maize hybrid 35A (Pioneer) were sown in water-moistened sand in flats (10 rows, 5-6 seed/row) and covered with clear, plastic lids before being placed in a growth chamber having 16 hr light (25° C.)/8 hr dark (20° C.), 75% relative humidity and 13,000-14,000 LUX. Covered flats were watered every three days for 7 days. Seedlings were carefully removed from the sand and placed in 1-liter beakers with 0.1 μM epi-brassinolide for treatment. Control plants were treated with distilled deionized water. After 24 hr, aerial and root tissues were separated and flash frozen in liquid nitrogen prior to storage at −80° C.

### (k) Gibberillic Acid

[2485] Seeds of Arabidopsis thaliana (ecotype Wassilewskija) were sown in trays and left at 4° C. for 4 days to vernalize. They were then transferred to a growth chamber having 16 hr light/8 hr. dark, 13,000 LUX, 70% humidity, 20° C. and watered twice a week with 1 L of 1× Hoagland's solution. Approximately 1,000 14 day old plants were spayed with 200-250 mls of 100 μM gibberillic acid in a 0.02% solution of the detergent Silwet L-77. At 1 hr. and 6 hrs. after treatment, aerial tissues (everything above the soil line) were harvested within a 15 to 20 minute time period, flash-frozen in liquid nitrogen and stored at −80° C.

[2486] Alternatively, seeds of Arabidopsis thaliana (ecotype Ws) were sown in Metro-mix soil type 350 and left at 4° C. for 3 days to vernalize. They were then transferred to a growth chamber having 16 hr light/8 hr dark, 13,000 LUX, 80% humidity, 20° C. temperature and watered every four days with 1.5 L water. 14 days after germination, plants were sprayed with 100 μM gibberillic acid or with water. Aerial tissues were harvested 1 hr (EXPT REP: 108484), 6 hrs (EXPT REP: 108485), 12 hrs (EXPT REP: 108486), and 24 hrs post-treatment, flash frozen and stored at −80° C.

[2487] Seeds of maize hybrid 35A (Pioneer) were sown in water-moistened sand in flats (10 rows, 5-6 seed/row) and covered with clear, plastic lids before being placed in a growth chamber having 16 hr light (25° C.)/8 hr dark (20° C.), 75% relative humidity and 13,000-14,000 LUX. Covered flats were watered every three days for 7 days. Seedlings were carefully removed from the sand and placed in 1-liter beakers with 100 μM gibberillic acid for treatment. Control plants were treated with water. After 1 hr, 6 hr and 12 hr, aerial and root tissues were separated and flash frozen in liquid nitrogen prior to storage at −80° C.

### (l) Nitrogen: High to Low

[2488] Wild type Arabidopsis thaliana seeds (ecotpye Ws) were surface sterilized with 30% Clorox, 0.1% Triton X-100 for 5 minutes. Seeds were then rinsed with 4-5 exchanges of sterile double distilled deionized water. Seeds were vernalized at 4° C. for 2-4 days in darkness. After cold treatment, seeds were plated on modified 1×MS media (without NH₄NO₃ or KNO₃), 0.5% sucrose, 0.5 g/L MES pH5.7, 1% phytagar and supplemented with KNO₃ to a final concentration of 60 mM (high nitrate modified 1×MS media). Plates were then grown for 7 days in a Percival growth chamber at 22° C. with 16 hr. light/8 hr dark.

[2489] Germinated seedlings were then transferred to a sterile flask containing 50 mL of high nitrate modified 1×MS liquid media. Seedlings were grown with mild shaking for 3 additional days at 22° C. in 16 hr. light/8 hr dark (in a Percival growth chamber) on the high nitrate modified 1×MS liquid media.

[2490] After three days of growth on high nitrate modified 1×MS liquid media, seedlings were transferred either to a new sterile flask containing 50 mL of high nitrate modified 1×MS liquid media or to low nitrate modified 1×MS liquid media (containing 20 □M KNO₃). Seedlings were grown in these media conditions with mild shaking at 22° C. in 16 hr light/8 hr dark for the appropriate time points and whole seedlings harvested for total RNA isolation via the Trizol method (LifeTech). The time points used for the microarray experiments were 10 min. (EXPT REP: 108454) and 1 hour (EXPT REP: 108455) time points for both the high and low nitrate modified 1×MS media.

[2491] Alternatively, seeds that were surface sterilized in 30% bleach containing 0.1% Triton X-100 and further rinsed in sterile water, were planted on MS agar, (0.5% sucrose) plates containing 50 mM KNO₃ (potassium nitrate). The seedlings were grown under constant light (3500 LUX) at 22° C. After 12 days, seedlings were transferred to MS agar plates containing either 1 mM KNO₃ or 50 mM KNO₃. Seedlings transferred to agar plates containing 50 mM KNO₃ were treated as controls in the experiment. Seedlings transferred to plates with 1 mM KNO₃ were rinsed thoroughly with sterile MS solution containing 1 mM KNO₃. There were ten plates per transfer. Root tissue was collected and frozen in 15 mL Falcon tubes at various time points which included 1 hour, 2 hours, 3 hours, 4 hours, 6 hours, 9 hours, 12 hours, 16 hours, and 24 hours.

[2492] Maize 35A19 Pioneer hybrid seeds were sown on flats containing sand and grown in a Conviron growth chamber at 25° C., 16 hr light/8 hr dark, ˜13,000 LUX and 80% relative humidity. Plants were watered every three days with double distilled deionized water. Germinated seedlings are allowed to grow for 10 days and were watered with high nitrate modified 1×MS liquid media (see above). On day 11, young corn seedlings were removed from the sand (with their roots intact) and rinsed briefly in high nitrate modified 1×MS liquid media. The equivalent of half a flat of seedlings were then submerged (up to their roots) in a beaker containing either 500 mL of high or low nitrate modified 1×MS liquid media (see above for details).

[2493] At appropriate time points, seedlings were removed from their respective liquid media, the roots separated from the shoots and each tissue type flash frozen in liquid nitrogen and stored at −80° C. This was repeated for each time point. Total RNA was isolated using the Trizol method (see above) with root tissues only.

[2494] Corn root tissues isolated at the 4 hr and 16 hr time points were used for the microarray experiments. Both the high and low nitrate modified 1×MS media were used.

### (m) Nitrogen: Low to High

[2495] Arabidopsis thaliana ecotype Ws seeds were sown on flats containing 4 L of a 1:2 mixture of Grace Zonolite vermiculite and soil. Flats were watered with 3 L of water and vernalized at 4° C. for five days. Flats were placed in a Conviron growth chamber having 16 hr light/8 hr dark at 20° C., 80% humidity and 17,450 LUX. Flats were watered with approximately 1.5 L of water every four days. Mature, bolting plants (24 days after germination) were bottom treated with 2 L of either a control (100 mM mannitol pH 5.5) or an experimental (50 mM ammonium nitrate, pH 5.5) solution. Roots, leaves and siliques were harvested separately 30, 120 and 240 minutes after treatment, flash frozen in liquid nitrogen and stored at −80° C.

[2496] Hybrid maize seed (Pioneer hybrid 35A19) were aerated overnight in deionized water. Thirty seeds were plated in each flat, which contained 4 liters of Grace zonolite vermiculite. Two liters of water were bottom fed and flats were kept in a Conviron growth chamber with 16 hr light/8 hr dark at 20° C. and 80% humidity. Flats were watered with 1 L of tap water every three days. Five day old seedlings were treated as described above with 2 L of either a control (100 mM mannitol pH 6.5) solution or 1 L of an experimental (50 mM ammonium nitrate, pH 6.8) solution. Fifteen shoots per time point per treatment were harvested 10, 90 and 180 minutes after treatment, flash frozen in liquid nitrogen and stored at −80° C.

[2497] Alternatively, seeds of Arabidopsis thaliana (ecotype Wassilewskija) were left at 4° C. for 3 days to vernalize. They were then sown on vermiculite in a growth chamber having 16 hours light/8 hours dark, 12,000-14,000 LUX, 70% humidity, and 20° C. They were bottom-watered with tap water, twice weekly. Twenty-four days old plants were sprayed with either water (control) or 0.6% ammonium nitrate at 4 μL/cm² of tray surface. Total shoots and some primary roots were cleaned of vermiculite, flash-frozen in liquid nitrogen and stored at −80° C.

### (n) Methyl Jasmonate

[2498] Seeds of Arabidopsis thaliana (ecotype Wassilewskija) were sown in trays and left at 4° C. for 4 days to vernalize before being transferred to a growth chamber having 16 hr light/8 hr. dark, 13,000 LUX, 70% humidity, 20° C. temperature and watered twice a week with 1 L of a 1× Hoagland's solution. Approximately 1,000 14 day old plants were spayed with 200-250 mls of 0.001% methyl jasmonate in a 0.02% solution of the detergent Silwet L-77. At 1 hr and 6 hrs after treatment, whole, seedlings, including roots, were harvested within a 15 to 20 minute time period, flash-frozen in liquid nitrogen and stored at −80° C.

[2499] Seeds of maize hybrid 35A (Pioneer) were sown in water-moistened sand in flats (10 rows, 5-6 seed/row) and covered with clear, plastic lids before being placed in a growth chamber having 16 hr light (25° C.)/8 hr dark (20° C.), 75% relative humidity and 13,000-14,000 LUX. Covered flats were watered every three days for 7 days. Seedlings were carefully removed from the sand and placed in 1-liter beakers with 0.001% methyl jasmonate for treatment. Control plants were treated with water. After 24 hr, aerial and root tissues were separated and flash frozen in liquid nitrogen prior to storage at −80° C.

### (o) Salicylic Acid

[2500] Seeds of Arabidopsis thaliana (ecotype Wassilewskija) were sown in trays and left at 4° C. for 4 days to vernalize before being transferred to a growth chamber having 16 hr light/8 hr. dark, 13,000 LUX, 70% humidity, 20° C. temperature and watered twice a week with 1 L of a 1× Hoagland's solution. Approximately 1,000 14 day old plants were spayed with 200-250 mls of 5 mM salicylic acid (solubilized in 70% ethanol) in a 0.02% solution of the detergent Silwet L-77. At 1 hr and 6 hrs after treatment, whole seedlings, including roots, were harvested within a 15 to 20 minute time period flash-frozen in liquid nitrogen and stored at −80° C.

[2501] Alternatively, seeds of wild-type Arabidopsis thaliana (ecotype Columbia) and mutant CS3726 were sown in soil type 200 mixed with osmocote fertilizer and Marathon insecticide and left at 4° C. for 3 days to vernalize. Flats were incubated at room temperature with continuous light. Sixteen days post germination plants were sprayed with 2 mM SA, 0.02% SilwettL-77 or control solution (0.02% SilwettL-77. Aerial parts or flowers were harvested 1 hr (EXPT REP: 108471 and 108472), 4 hr (EXPT REP: 108469 and 108470), 6 hr (EXPT REP: 108440), 24 hr (EXPT REP: 108443, 107953 and 107960) and 3 weeks (EXPT REP: 108475, 108476) post-treatment flash frozen and stored at −80° C.

[2502] Seeds of maize hybrid 35A (Pioneer) were sown in water-moistened sand in flats (10 rows, 5-6 seed/row) and covered with clear, plastic lids before being placed in a growth chamber having 16 hr light (25° C.)/8 hr dark (20° C.), 75% relative humidity and 13,000-14,000 LUX. Covered flats were watered every three days for 7 days. Seedlings were carefully removed from the sand and placed in 1-liter beakers with 2 mM SA for treatment. Control plants were treated with water. After 12 hr and 24 hr, aerial and root tissues were separated and flash frozen in liquid nitrogen prior to storage at −80° C.

### (p) Wounding

[2503] Seeds of Arabidopsis thaliana (Wassilewskija) were sown in trays and left at 4° C. for three days to vernalize before being transferred to a growth chamber having 16 hr light/8 hr dark, 12,000-14,000 LUX, 70% humidity and 20° C. After 14 days, the leaves were wounded with forceps. Aerial tissues were harvested 1 hour and 6 hours after wounding. Aerial tissues from unwounded plants served as controls. Tissues were flash-frozen in liquid nitrogen and stored at −80° C.

[2504] Seeds of maize hybrid 35A (Pioneer) were sown in water-moistened sand in flats (10 rows, 5-6 seed/row) and covered with clear, plastic lids before being placed in a growth chamber having 16 hr light (25° C.)/8 hr dark (20° C.), 75% relative humidity and 13,000-14,000 LUX. Covered flats were watered every three days for 7 days. Seedlings were wounded (one leaf nicked by scissors) and placed in 1-liter beakers of water for treatment. Control plants were treated not wounded. After 1 hr and 6 hr aerial and root tissues were separated and flash frozen in liquid nitrogen prior to storage at −80° C.

### (q) Drought Stress

[2505] Seeds of Arabidopsis thaliana (Wassilewskija) were sown in pots and left at 4° C. for three days to vernalize before being transferred to a growth chamber having 16 hr light/8 hr dark, 150,000-160,000 LUX, 20° C. and 70% humidity. After 14 days, aerial tissues were cut and left to dry on 3MM Whatman paper in a petri-plate for 1 hour and 6 hours. Aerial tissues exposed for 1 hour and 6 hours to 3 MM Whatman paper wetted with 1× Hoagland's solution served as controls. Tissues were harvested, flash-frozen in liquid nitrogen and stored at −80° C.

[2506] Alternatively, Arabidopsis thaliana (Ws) seed was vernalized at 4° C. for 3 days before sowing in Metromix soil type 350. Flats were placed in a growth chamber with 23° C., 16 hr light/8 hr. dark, 80% relative humidity, ˜13,000 LUX for germination and growth. Plants were watered with 1-1.5 L of water every four days. Watering was stopped 16 days after germination for the treated samples, but continued for the control samples. Rosette leaves and stems (EXPT REP 108477, 108482 and 108483), flowers (see EXPT REP: 108473, 108474) and siliques were harvested 2 d, 3 d, 4 d, 5 d, 6 d and 7 d (EXPT REP: 108473) after watering was stopped. Tissue was flash frozen in liquid nitrogen and kept at −80° C. until RNA was isolated. Flowers and siliques were also harvested on day 8 from plants that had undergone a 7 d drought treatment followed by 1 day of watering (EXPT REP: 108474). Control plants (whole plants) were harvested after 5 weeks, flash frozen in liquid nitrogen and stored as above.

[2507] Seeds of maize hybrid 35A (Pioneer) were sown in water-moistened sand in flats (10 rows, 5-6 seed/row) and covered with clear, plastic lids before being placed in a growth chamber having 16 hr light (25° C.)/8 hr dark (20° C.), 75% relative humidity and 13,000-14,000 LUX. Covered flats were watered every three days for 7 days. Seedlings were carefully removed from the sand and placed in empty 1-liter beakers at room temperature for treatment. Control plants were placed in water. After 1 hr, 6 hr, 12 hr and 24 hr aerial and root tissues were separated and flash frozen in liquid nitrogen prior to storage at −80° C.

### (r) Osmotic Stress

[2508] Seeds of Arabidopsis thaliana (Wassilewskija) were sown in trays and left at 4° C. for three days to vernalize before being transferred to a growth chamber having 16 hr light/8 hr dark, 12,000-14,000 LUX, 20° C., and 70% humidity. After 14 days, the aerial tissues were cut and placed on 3 MM Whatman paper in a petri-plate wetted with 20% PEG (polyethylene glycol-Mᵣ 8,000) in 1× Hoagland's solution. Aerial tissues on 3 MM Whatman paper containing 1× Hoagland's solution alone served as the control. Aerial tissues were harvested at 1 hour and 6 hours after treatment, flash-frozen in liquid nitrogen and stored at −80° C.

[2509] Seeds of maize hybrid 35A (Pioneer) were sown in water-moistened sand in flats (10 rows, 5-6 seed/row) and covered with clear, plastic lids before being placed in a growth chamber having 16 hr light (25° C.)/8 hr dark (20° C.), 75% relative humidity and 13,000-14,000 LUX. Covered flats were watered every three days for 7 days. Seedlings were carefully removed from the sand and placed in 1-liter beakers with 20% PEG (polyethylene glycol-Mᵣ 8,000) for treatment. Control plants were treated with water. After 1 hr and 6 hr aerial and root tissues were separated and flash frozen in liquid nitrogen prior to storage at −80° C.

[2510] Seeds of maize hybrid 35A (Pioneer) were sown in water-moistened sand in flats (10 rows, 5-6 seed/row) and covered with clear, plastic lids before being placed in a growth chamber having 16 hr light (25° C.)/8 hr dark (20° C.), 75% relative humidity and 13,000-14,000 LUX. Covered flats were watered every three days for 7 days. Seedlings were carefully removed from the sand and placed in 1-liter beakers with 150 mM NaCl for treatment. Control plants were treated with water. After 1 hr, 6 hr, and 24 hr aerial and root tissues were separated and flash frozen in liquid nitrogen prior to storage at −80° C.

### (s) Heat Shock Treatment

[2511] Seeds of Arabidopsis thaliana (Wassilewskija) were sown in trays and left at 4° C. for three days to vernalize before being transferred to a growth chamber with 16 hr light/8 hr dark, 12,000-14,000 LUX, 70% humidity and 20° C., fourteen day old plants were transferred to a 42° C. growth chamber and aerial tissues were harvested 1 hr and 6 hr after transfer. Control plants were left at 20° C. and aerial tissues were harvested. Tissues were flashfrozen in liquid nitrogen and stored at −80° C.

[2512] Seeds of maize hybrid 35A (Pioneer) were sown in water-moistened sand in flats (10 rows, 5-6 seed/row) and covered with clear, plastic lids before being placed in a growth chamber having 16 hr light (25° C.)/8 hr dark (20° C.), 75% relative humidity and 13,000-14,000 LUX. Covered flats were watered every three days for 7 days. Seedlings were carefully removed from the sand and placed in 1-liter beakers containing 42° C. water for treatment. Control plants were treated with water at 25° C. After 1 hr and 6 hr aerial and root tissues were separated and flash frozen in liquid nitrogen prior to storage at −80° C.

### (t) Cold Shock Treatment

[2513] Seeds of Arabidopsis thaliana (Wassilewskija) were sown in trays and left at 4° C. for three days to vernalize before being transferred to a growth chamber having 16 hr light/8 hr dark, 12,000-14,000 LUX, 20° C. and 70% humidity. Fourteen day old plants were transferred to a 4° C. dark growth chamber and aerial tissues were harvested 1 hour and 6 hours later. Control plants were maintained at 20° C. and covered with foil to avoid exposure to light. Tissues were flash-frozen in liquid nitrogen and stored at −80° C.

[2514] Seeds of maize hybrid 35A (Pioneer) were sown in water-moistened sand in flats (10 rows, 5-6 seed/row) and covered with clear, plastic lids before being placed in a growth chamber having 16 hr light (25° C.)/8 hr dark (20° C.), 75% relative humidity and 13,000-14,000 LUX. Covered flats were watered every three days for 7 days. Seedlings were carefully removed from the sand and placed in 1-liter beakers containing 4° C. water for treatment. Control plants were treated with water at 25° C. After 1 hr and 6 hr aerial and root tissues were separated and flash frozen in liquid nitrogen prior to storage at −80° C.

### (u) Oxidative Stress—Hydrogen Peroxide Treatment

[2515] Seeds of Arabidopsis thaliana (Wassilewskija) were sown in trays and left at 4° C. for three days to vernalize. Before being transferred to a growth chamber having 16 hr light/8 hr dark, 12,000-14,000 LUX, 20° C. and 70% humidity. Fourteen day old plants were sprayed with 5 mM H₂O₂ (hydrogen peroxide) in a 0.02% Silwett L-77 solution. Control plants were sprayed with a 0.02% Silwett L-77 solution. Aerial tissues were harvested 1 hour and 6 hours after spraying, flash-frozen in liquid nitrogen and stored at −80° C.

[2516] Seeds of maize hybrid 35A (Pioneer) were sown in water-moistened sand in flats (10 rows, 5-6 seed/row) and covered with clear, plastic lids before being placed in a growth chamber having 16 hr light (25° C.)/8 hr dark (20° C.), 75% relative humidity and 13,000-14,000 LUX. Covered flats were watered every three days for 7 days. Seedlings were carefully removed from the sand and placed in 1-liter beakers with 5 mM H₂O₂ for treatment. Control plants were treated with water. After 1 hr, 6 hr and 24 hr, aerial and root tissues were separated and flash frozen in liquid nitrogen prior to storage at −80° C.

### (v) Nitric Oxide Treatment

[2517] Seeds of Arabidopsis thaliana (Wassilewskija) were sown in trays and left at 4° C. for three days to vernalize before being transferred to a growth chamber having 16 hr light/8 hr dark, 12,000-14,000 LUX, 20° C. and 70% humidity. Fourteen day old plants were sprayed with 5 mM sodium nitroprusside in a 0.02% Silwett L-77 solution. Control plants were sprayed with a 0.02% Silwett L-77 solution. Aerial tissues were harvested 1 hour and 6 hours after spraying, flash-frozen in liquid nitrogen and stored at −80° C.

[2518] Seeds of maize hybrid 35A (Pioneer) were sown in water-moistened sand in flats (10 rows, 5-6 seed/row) and covered with clear, plastic lids before being placed in a growth chamber having 16 hr light (25° C.)/8 hr dark (20° C.), 75% relative humidity and 13,000-14,000 LUX. Covered flats were watered every three days for 7 days. Seedlings were carefully removed from the sand and placed in 1-liter beakers with 5 mM nitroprusside for treatment. Control plants were treated with water. After 1 hr, 6 hr and 12 hr, aerial and root tissues were separated and flash frozen in liquid nitrogen prior to storage at −80° C.

[2519] (w) S4 Immature Buds, Inflorescence Meristem

[2520] Seeds of Arabidopsis thaliana (ecotype Wassilewskija) were sown in pots and left at 4° C. for two to three days to vernalize. They were then transferred to a growth chamber. Plants were grown under long-day (16 hr light: 8 hr dark) conditions, 7000-8000 LUX light intensity, 70% humidity, and 22° C. temperature. Inflorescences containing immature floral buds [stages 1-12; Smyth et al., 1990] as well as the inflorescence meristem were harvested and flash frozen in liquid nitrogen.

### (x) S5 Flowers (Opened)

[2521] Seeds of Arabidopsis thaliana (ecotype Wassilewskija) were sown in pots and left at 4° C. for two to three days to vernalize. They were then transferred to a growth chamber. Plants were grown under long-day (16 hr light: 8 hr dark) conditions, 7000-8000 LUX light intensity, 70% humidity, and 22° C. temperature. Mature, unpollinated flowers [stages 12-14; Smyth et al. 1990] were harvested and flash frozen in liquid nitrogen.

### (y) S6 Siliques (All Stages)

[2522] Seeds of Arabidopsis thaliana (ecotype Wassilewskija) were sown in pots and left at 4° C. for two to three days to vernalize. They were then transferred to a growth chamber. Plants were grown under long-day (16 hr light: 8 hr dark) conditions, 7000-8000 LUX light intensity, 70% humidity, and 22° C. temperature. Siliques bearing developing seeds containing post fertilization through pre-heart stage [0-72 hours after fertilization (HAF)], heart-through early curled cotyledon stage [72-120 HAF] and late-curled cotyledon stage [>120 HAF] embryos were harvested separately and pooled prior to RNA isolation in a mass ratio of 1:1:1. The tissues were then flash frozen in liquid nitrogen. Description of the stages of Arabidopsis embryogenesis used were reviewed by Bowman (1994).

### (z) Arabidopsis Endosperm

[2523] mea/mea Fruits 0-10 mm

[2524] Seeds of Arabidopsis thaliana heterozygous for the fertilization-independent endosperm1 (fie1) [Ohad et al., 1996; ecotype Landsberg erecta (Ler)] were sown in pots and left at 4° C. for two to three days to vernalize. Kiyosue et al. (1999) subsequently determined that fie1 was allelic to the gametophytic maternal effect mutant medea (Grossniklaus et al., 1998). Imbibed seeds were then transferred to a growth chamber. Plants were grown under long-day (16 hr light: 8 hr dark) conditions, 7000-8000 LUX light intensity, 70% humidity, and 22° C. temperature. 1-2 siliques (fruits) bearing developing seeds just prior to dessication [9 days after flowering (DAF)] were selected from each plant and were hand-dissected to identify wild-type, mea/+ heterozygotes, and mea/mea homozygous mutant plants. At this stage, homozygous mea/mea plants produce short siliques that contain >70% aborted seed and can be distinguished from those produced by wild-type (100% viable seed) and mea/+ heterozygous (50% viable seed) plants (Ohad et al., 1996; Grossniklaus et al., 1998; Kiyosue et al., 1999). Siliques 0-10 mm in length containing developing seeds 0-9 DAF produced by homozygous mea/mea plants were harvested and flash frozen in liquid nitrogen.

### Pods 0-10 mm (Control Tissue for Sample 70)

[2525] Seeds of Arabidopsis thaliana heterozygous for the fertilization-independent endosperm1 (fie1) [Ohad et al., 1996; ecotype Landsberg erecta (Ler)] were sown in pots and left at 4° C. for two to three days to vernalize. Kiyosue et al. (1999) subsequently determined that fie1 was allelic to the gametophytic maternal effect mutant medea (Grossniklaus et al., 1998). Imbibed seeds were then transferred to a growth chamber. Plants were grown under long-day (16 hr light: 8 hr dark) conditions, 7000-8000 LUX light intensity, 70% humidity, and 22° C. temperature. 1-2 siliques (fruits) bearing developing seeds just prior to dessication [9 days after flowering (DAF)] were selected from each plant and were hand-dissected to identify wild-type, mea/+ heterozygotes, and mea/mea homozygous mutant plants. At this stage, homozygous mea/mea plants produce short siliques that contain >70% aborted seed and can be distinguished from those produced by wild-type (100% viable seed) and mea/+ heterozygous (50% viable seed) plants (Ohad et al., 1996; Grossniklaus et al., 1998; Kiyosue et al., 1999). Siliques 0-10 mm in length containing developing seeds 0-9 DAF produced by segregating wild-type plants were opened and the seeds removed. The remaining tissues (pods minus seed) were harvested and flash frozen in liquid nitrogen.

### (aa) Arabidopsis Seeds

[2526] Fruits (Pod+Seed) 0-5 mm

[2527] Seeds of Arabidopsis thaliana (ecotype Wassilewskija) were sown in pots and left at 4° C. for two to three days to vernalize. They were then transferred to a growth chamber. Plants were grown under long-day (16 hr light: 8 hr dark) conditions, 7000-8000 LUX light intensity, 70% humidity, and 22° C. temperature. 3-4 siliques (fruits) bearing developing seeds were selected from at least 3 plants and were hand-dissected to determine what developmental stage(s) were represented by the enclosed embryos. Description of the stages of Arabidopsis embryogenesis used in this determination were summarized by Bowman (1994). Silique lengths were then determined and used as an approximate determinant for embryonic stage. Siliques 0-5 mm in length containing post fertilization through pre-heart stage [0-72 hours after fertilization (HAF)] embryos were harvested and flash frozen in liquid nitrogen.

[2528] Fruits (Pod+Seed) 5-10 mm

[2529] Seeds of Arabidopsis thaliana (ecotype Wassilewskija) were sown in pots and left at 4° C. for two to three days to vernalize. They were then transferred to a growth chamber. Plants were grown under long-day (16 hr light: 8 hr dark) conditions, 7000-8000 LUX light intensity, 70% humidity, and 22° C. temperature. 3-4 siliques (fruits) bearing developing seeds were selected from at least 3 plants and were hand-dissected to determine what developmental stage(s) were represented by the enclosed embryos. Description of the stages of Arabidopsis embryogenesis used in this determination were summarized by Bowman (1994). Silique lengths were then determined and used as an approximate determinant for embryonic stage. Siliques 5-10 mm in length containing heart-through early upturned-U-stage [72-120 hours after fertilization (HAF)] embryos were harvested and flash frozen in liquid nitrogen.

[2530] Fruits (Pod+Seed)>10 mm

[2531] Seeds of Arabidopsis thaliana (ecotype Wassilewskija) were sown in pots and left at 4° C. for two to three days to vernalize. They were then transferred to a growth chamber. Plants were grown under long-day (16 hr light: 8 hr dark) conditions, 7000-8000 LUX light intensity, 70% humidity, and 22° C. temperature. 3-4 siliques (fruits) bearing developing seeds were selected from at least 3 plants and were hand-dissected to determine what developmental stage(s) were represented by the enclosed embryos. Description of the stages of Arabidopsis embryogenesis used in this determination were summarized by Bowman (1994). Silique lengths were then determined and used as an approximate determinant for embryonic stage. Siliques >10 mm in length containing green, late upturned-U-stage [>120 hours after fertilization (HAF)-9 days after flowering (DAF)] embryos were harvested and flash frozen in liquid nitrogen.

[2532] Green Pods 5-10 mm (Control Tissue for Samples 72-74)

[2533] Seeds of Arabidopsis thaliana (ecotype Wassilewskija) were sown in pots and left at 4° C. for two to three days to vernalize. They were then transferred to a growth chamber. Plants were grown under long-day (16 hr light: 8 hr dark) conditions, 7000-8000 LUX light intensity, 70% humidity, and 22° C. temperature. 3-4 siliques (fruits) bearing developing seeds were selected from at least 3 plants and were hand-dissected to determine what developmental stage(s) were represented by the enclosed embryos. Description of the stages of Arabidopsis embryogenesis used in this determination were summarized by Bowman (1994). Silique lengths were then determined and used as an approximate determinant for embryonic stage. Green siliques 5-10 mm in length containing developing seeds 72-120 hours after fertilization (HAF)] were opened and the seeds removed. The remaining tissues (green pods minus seed) were harvested and flash frozen in liquid nitrogen.

[2534] Green Seeds from Fruits >10 mm

[2535] Seeds of Arabidopsis thaliana (ecotype Wassilewskija) were sown in pots and left at 4° C. for two to three days to vernalize. They were then transferred to a growth chamber. Plants were grown under long-day (16 hr light: 8 hr dark) conditions, 7000-8000 LUX light intensity, 70% humidity, and 22° C. temperature. 3-4 siliques (fruits) bearing developing seeds were selected from at least 3 plants and were hand-dissected to determine what developmental stage(s) were represented by the enclosed embryos. Description of the stages of Arabidopsis embryogenesis used in this determination were summarized by Bowman (1994). Silique lengths were then determined and used as an approximate determinant for embryonic stage. Green siliques >10 mm in length containing developing seeds up to 9 days after flowering (DAF)] were opened and the seeds removed and harvested and flash frozen in liquid nitrogen.

[2536] Brown Seeds from Fruits >10 mm

[2537] Seeds of Arabidopsis thaliana (ecotype Wassilewskija) were sown in pots and left at 4° C. for two to three days to vernalize. They were then transferred to a growth chamber. Plants were grown under long-day (16 hr light: 8 hr dark) conditions, 7000-8000 LUX light intensity, 70% humidity, and 22° C. temperature. 3-4 siliques (fruits) bearing developing seeds were selected from at least 3 plants and were hand-dissected to determine what developmental stage(s) were represented by the enclosed embryos. Description of the stages of Arabidopsis embryogenesis used in this determination were summarized by Bowman (1994). Silique lengths were then determined and used as an approximate determinant for embryonic stage. Yellowing siliques >10 mm in length containing brown, dessicating seeds >11 days after flowering (DAF)] were opened and the seeds removed and harvested and flash frozen in liquid nitrogen.

[2538] Green/Brown Seeds from Fruits >10 mm

[2539] Seeds of Arabidopsis thaliana (ecotype Wassilewskija) were sown in pots and left at 4° C. for two to three days to vernalize. They were then transferred to a growth chamber. Plants were grown under long-day (16 hr light: 8 hr dark) conditions, 7000-8000 LUX light intensity, 70% humidity, and 22° C. temperature. 3-4 siliques (fruits) bearing developing seeds were selected from at least 3 plants and were hand-dissected to determine what developmental stage(s) were represented by the enclosed embryos. Description of the stages of Arabidopsis embryogenesis used in this determination were summarized by Bowman (1994). Silique lengths were then determined and used as an approximate determinant for embryonic stage. Green siliques >10 mm in length containing both green and brown seeds >9 days after flowering (DAF)] were opened and the seeds removed and harvested and flash frozen in liquid nitrogen.

[2540] Mature Seeds (24 Hours After Imbibition)

[2541] Mature dry seeds of Arabidopsis thaliana (ecotype Wassilewskija) were sown onto moistened filter paper and left at 4° C. for two to three days to vernalize. Imbibed seeds were then transferred to a growth chamber [16 hr light: 8 hr dark conditions, 7000-8000 LUX light intensity, 70% humidity, and 22° C. temperature], the emerging seedlings harvested after 48 hours and flash frozen in liquid nitrogen.

### Mature Seeds (Dry)

[2542] Seeds of Arabidopsis thaliana (ecotype Wassilewskija) were sown in pots and left at 4° C. for two to three days to vernalize. They were then transferred to a growth chamber. Plants were grown under long-day (16 hr light: 8 hr dark) conditions, 7000-8000 LUX light intensity, 70% humidity, and 22° C. temperature and taken to maturity. Mature dry seeds are collected, dried for one week at 28° C., and vernalized for one week at 4° C. before used as a source of RNA.

### Ovules

[2543] Seeds of Arabidopsis thaliana heterozygous for pistillata (pi) [ecotype Landsberg erecta (Ler)] were sown in pots and left at 4° C. for two to three days to vernalize. They were then transferred to a growth chamber. Plants were grown under long-day (16 hr light: 8 hr dark) conditions, 7000-8000 LUX light intensity, 76% humidity, and 24° C. temperature. Inflorescences were harvested from seedlings about 40 days old. The inflorescences were cut into small pieces and incubated in the following enzyme solution (pH 5) at room temperature for 0.5-1 hr.: 0.2% pectolyase Y-23, 0.04% pectinase, 5 mM MES, 3% Sucrose and MS salts (1900 mg/l KNO₃, 1650 mg/l NH₄NO₃, 370 mg/l MgSO₄.7H₂O, 170 mg/l KH₂PO₄, 440 mg/l CaCl₂.2H₂O, 6.2 mg/l H₂BO₃, 15.6 mg/l MnSO₄.4H₂O, 8.6 mg/l ZnSO₄.7H₂O, 0.25 mg/l NaMoO₄.2H₂O, 0.025 mg/l CuCO₄.5H₂O, 0.025 mg/l CoCl₂.6H₂O, 0.83 mg/l KI, 27.8 mg/l FeSO₄.7H₂O, 37.3 mg/l Disodium EDTA, pH 5.8). At the end of the incubation the mixture of inflorescence material and enzyme solution was passed through a size 60 sieve and then through a sieve with a pore size of 125 μm. Ovules greater than 125 μm in diameter were collected, rinsed twice in B5 liquid medium (2500 mg/l KNO₃, 250 mg/l MgSO₄.7H₂O, 150 mg/l NaH2PO₄.H₂O, 150 mg/l CaCl₂.2H₂O, 134 mg/l (NH₄)₂ CaCl₂.SO₄, 3 mg/l H₂BO₃, 10 mg/l MnSO₄.4H₂O, 2 ZnSO₄.7H₂O, 0.25 mg/l NaMoO₄.2H₂O, 0.025 mg/l CuCO₄.5H₂O, 0.025 mg/l CoCl₂.6H₂O, 0.75 mg/l KI, 40 mg/l EDTA sodium ferric salt, 20 g/l sucrose, 10 mg/l Thiamine hydrochloride, 1 mg/l Pyridoxine hydrochloride, 1 mg/l Nicotinic acid, 100 mg/l myo-inositol, pH 5.5)), rinsed once in deionized water and flash frozen in liquid nitrogen. The supernatant from the 125 μm sieving was passed through subsequent sieves of 50 μm and 32 μm. The tissue retained in the 32 μm sieve was collected and mRNA prepared for use as a control.

### (bb) Herbicide Treatment

[2544] Arabidopsis thaliana (Ws) seeds were sterilized for 5 min. with 30% bleach, 50 μl Triton in a total volume of 50 ml. Seeds were vernalized at 4° C. for 3 days before being plated onto GM agar plates at a density of about 144 seeds per plate. Plates were incubated in a Percival growth chamber having 16 hr light/8 hr dark, 80% relative humidity, 22° C. and 11,000 LUX for 14 days.

[2545] Plates were sprayed (˜0.5 mls/plate) with water, Finale (1.128 g/L), Glean (1.88 g/L), RoundUp (0.01 g/L) or Trimec (0.08 g/L). Tissue was collected and flash frozen in liquid nitrogen at the following time points: 0, 1, 2, 4 (EXPT REP: 107871 (Finale), 107881 (Glean), 107896 (Round-up) and 107886 (Trimec)), 8, 12 (EXPT REP: 108467 (Finale), 108468 (Glean), 108465 (Round-up) and 108466, 107891 (Trimec)), and 24 hours. Frozen tissue was stored at −80° C. prior to RNA isolation.

### (cc) Ap2

[2546] Seeds of Arabidopsis thaliana (ecotype Landesberg erecta) and floral mutant apetala2 (Jofuku et al., 1994, Plant Cell 6:1211-1225) were sown in pots and left at 4° C. for two to three days to vernalize. They were then transferred to a growth chamber. Plants were grown under long-day (16 hr light, 8 hr dark) conditions 7000-8000 LUX light intensity, 70% humidity and 22° C. temperature. Inflorescences containing immature floral buds (stages 1-7; Bowman, 1994) as wel as the inflorescence meristem were harvested and flashfrozen. Polysomal polyA+ RNA was isolated from tissue according to Cox and Goldberg, 1988).

### (dd) Protein Degradation

[2547] Arabidopsis thaliana (ecotype Ws) wild-type and 13B12-1 (homozygous) mutant seed were sown in pots containing Metro-mix 350 soil and incubated at 4° C. for four days. Vernalized seeds were germinated in the greenhouse (16 hr light/8 hr dark) over a 7 day period. Mutant seedlings were sprayed with 0.02% (active ingredient) Finale to confirm their transgenic standing. Plants were grown until the mutant phenotype (either multiple pistils in a single flower and/or multiple branching per node) was apparent. Young inflorescences immediately forming from the multiple-branched stems were cut and flash frozen in liquid nitrogen. Young inflorescences from wild-type plants grown in parallel and under identical conditions were collected as controls. All collected tissue was stored at −80° C. until RNA isolation. (EXPT REP 108451)

### (ee) Root Tips

[2548] Seeds of Arabidopsis thaliana (ecotye Ws) were placed on MS plates and vernalized at 4° C. for 3 days before being placed in a 25° C. growth chamber having 16 hr light/8 hr dark, 70% relative humidity and about 3 W/m². After 6 days, young seedlings were transferred to flasks containing B5 liquid medium, 1% sucrose and 0.05 mg/l indole-3-butyric acid. Flasks were incubated at room temperature with 100 rpm agitation. Media was replaced weekly. After three weeks, roots were harvested and incubated for 1 hr with 2% pectinase, 0.2% cellulase, pH 7 before straining through a #80 (Sigma) sieve. The root body material remaining on the sieve (used as the control) was flash frozen and stored at −80° C. until use. The material that passed through the #80 sieve was strained through a #200 (Sigma) sieve and the material remaining on the sieve (root tips) was flash frozen and stored at −80° C. until use. Approximately 10 mg of root tips were collected from one flask of root culture.

[2549] Seeds of maize hybrid 35A (Pioneer) were sown in water-moistened sand in flats (10 rows, 5-6 seed/row) and covered with clear, plastic lids before being placed in a growth chamber having 16 hr light (25° C.)/8 hr dark (20° C.), 75% relative humidity and 13,000-14,000 LUX. Covered flats were watered every three days for 8 days. Seedlings were carefully removed from the sand and the root tips (˜2 mm long) were removed and flash frozen in liquid nitrogen prior to storage at −80° C. The tissues above the root tips (˜1 cm long) were cut, treated as above and used as control tissue.

(ff) rt1

[2550] The rt1 allele is a variation of rt1 rootless1 and is recessive. Plants displaying the rt1 phenotype have few or no secondary roots.

[2551] Seed from plants segregating for rt1 were sown on sand and placed in a growth chamber having 16 hr light/8 hr dark, 13,000 LUX, 70% humidity and 20° C. temperature. Plants were watered every three days with tap water. Eleven (11) day old seedlings were carefully removed from the sand, keeping the roots intact. rt1-type seedlings were separated from their wild-type counterparts and the root tissue isolated. Root tissue from normal seedlings (control) and rtl mutants were flash frozen in liquid nitrogen and stored at −80° C. until use.

### (gg) Imbibed Seed

[2552] Seeds of maize hybrid 35A (Pioneer) were sown in water-moistened sand in covered flats (10 rows, 5-6 seed/row) and covered with clear, plastic lids before being placed in a growth chamber having 16 hr light (25° C.)/8 hr dark (20° C.), 75% relative humidity and 13,000-14,000 LUX. One day after sowing, whole seeds were flash frozen in liquid nitrogen prior to storage at −80° C. Two days after sowing, embryos and endosperm were isolated and flash frozen in liquid nitrogen prior to storage at −80° C. On days 3-6, aerial tissues, roots and endosperm were isolated and flash frozen in liquid nitrogen prior to storage at −80° C.

(hh) Rough Sheath2-R (rs2-R) Mutants (1400-6/S-17)

[2553] This experiment was conducted to identify abnormally expressed genes in the shoot apex of rough sheath2-R (rs2-R) mutant plants. rs2 encodes a myb domain DNA binding protein that functions in repression of several shoot apical meristem expressed homeobox genes. Two homeobox gene targets are known for rs2 repression, rough sheath1, liguleless 3. The recessive loss of function phenotype of rs2-R homozygous plants is described in Schneeberger et al. 1998 Development 125: 2857-2865.

[2554] The seed stock genetically segregates 1:1 for rs2-R/rs2-R:rs2-R/+

[2555] Preparation of tissue samples: 160 seedlings pooled from 2 and 3 week old plants grown in sand. Growth conditions; Conviron #107 @ 12 hr days/12 hr night, 25° C., 75% humidity. Shoot apex was dissected to include leaf three and older. (Pictures available upon request).

1) rough sheath2-R homozygous (mutant) shoot apex
2) rough sheath2-R heterozygous (wt, control) shoot apex

### (ii) Leaf Mutant 3642:

[2556] Mutant 3642 is a recessive mutation that causes abnormal leaf development. The leaves of mutant 3642 plants are characterized by leaf twisting and irregular leaf shape. Mutant 3642 plants also exhibit abnormally shaped floral organs which results in reduced fertility.

[2557] Seed segregating for the mutant phenotype was sown in Metro-mix 350 soil and grown in a Conviron growth chamber with watering by sub-irrigation twice a week. Environmental conditions were set at 20 degrees Celsius, 70% humidity with an 8 hour day, 16 hour night light regime. Plants were harvested after 4 weeks of growth and the entire aerial portion of the plant was harvested and immediately frozen in liquid nitrogen and stored at −80 C. Mutant phenotype plants were harvested separately from normal phenotype plants, which serve as the control tissue.

### (jj) Flowers (Green, White or Buds)

[2558] Approximately 10 μl of Arabidopsis thaliana seeds (ecotype Ws) were sown on 350 soil (containing 0.03% marathon) and vernalized at 4 C for 3 days. Plants were then grown at room temperature under fluorescent lighting until flowering. Flowers were harvested after 28 days in three different categories. Buds that had not opened at all and were completely green were categorized as “flower buds” (also referred to as green buds by the investigator). Buds that had started to open, with white petals emerging slightly were categorized as “green flowers” (also referred to as white buds by the investigator). Flowers that had opened mostly (with no silique elongation) with white petals completely visible were categorized as “white flowers” (also referred to as open flowers by the investigator). Buds and flowers were harvested with forceps, flash frozen in liquid nitrogen and stored at −80 C until RNA was isolated.

### 2. Microarray Hybridization Procedures

[2559] Microarray technology provides the ability to monitor mRNA transcript levels of thousands of genes in a single experiment. These experiments simultaneously hybridize two differentially labeled fluorescent cDNA pools to glass slides that have been previously spotted with cDNA clones of the same species. Each arrayed cDNA spot will have a corresponding ratio of fluorescence that represents the level of disparity between the respective mRNA species in the two sample pools. Thousands of polynucleotides can be spotted on one slide, and each experiment generates a global expression pattern.

### Coating Slides

[2560] The microarray consists of a chemically coated microscope slide, referred herein as a “chip” with numerous polynucleotide samples arrayed at a high density. The poly-L-lysine coating allows for this spotting at high density by providing a hydrophobic surface, reducing the spreading of spots of DNA solution arrayed on the slides. Glass microscope slides (Gold Seal #3010 manufactured by Gold Seal Products, Portsmouth, N.H., USA) were coated with a 0.1% W/V solution of Poly-L-lysine (Sigma, St. Louis, Mo.) using the following protocol:

1. Slides were placed in slide racks (Shandon Lipshaw #121). The racks were then put in chambers (Shandon Lipshaw #121).
2. Cleaning solution was prepared:

[2561] 70 g NaOH was dissolved in 280 mL ddH₂O.

[2562] 420 mL 95% ethanol was added. The total volume was 700 mL (=2×350 mL); it was stirred until completely mixed.

[2563] If the solution remained cloudy, ddH₂O was added until clear.

3. The solution was poured into chambers with slides; the chambers were covered with glass lids. The solution was mixed on an orbital shaker for 2 hr.
4. The racks were quickly transferred to fresh chambers filled with ddH₂O. They were rinsed vigorously by plunging racks up and down.

[2564] Rinses were repeated 4× with fresh ddH₂O each time, to remove all traces of NaOH-ethanol.

5. Polylysine solution was prepared:

[2565] 0 mL poly-L-lysine+70 mL tissue culture PBS in 560 mL water, using plastic graduated cylinder and beaker.

6. Slides were transferred to polylysine solution and shaken for 1 hr.
7. The rack was transferred to a fresh chambers filled with ddH₂O. It was plunged up and down 5× to rinse.
8. The slides were centrifuged on microtiter plate carriers (paper towels were placed below the rack to absorb liquid) for 5 min. @ 500 rpm. The slide racks were transferred to empty chambers with covers.
9. Slide racks were dried in a 45 C oven for 10 min.
10. The slides were stored in a closed plastic slide box.
11. Normally, the surface of lysine coated slides was not very hydrophobic immediately after this process, but became increasingly hydrophobic with storage. A hydrophobic surface helped ensure that spots didn't run together while printing at high densities. After they aged for 10 days to a month the slides were ready to use. However, coated slides that have been sitting around for long periods of time were usually too old to be used. This was because they developed opaque patches, visible when held to the light, and these resulted in high background hybridization from the fluorescent probe.

[2566] Alternatively, precoated glass slides were purchased from TeleChem Internation, Inc. (Sunnyvale, Calif., 94089; catalog number SMM-25, Superamine substrates).

PCR Amplification of cDNA Clone Inserts

[2567] Polynucleotides were amplified from Arabidopsis cDNA clones using insert specific probes. The resulting 100 uL PCR reactions were purified with Qiaquick 96 PCR purification columns (Qiagen, Valencia, Calif., USA) and eluted in 30 uL of 5 mM Tris. 8.5 uL of the elution were mixed with 1.5 uL of 20×SSC to give a final spotting solution of DNA in 3×SSC. The concentrations of DNA generated from each clone varied between 10-100 ng/ul, but were usually about 50 ng/ul.

### Arraying of PCR Products on Glass Slides

[2568] PCR products from cDNA clones were spotted onto the poly-L-Lysine coated glass slides using an arrangement of quill-tip pins (ChipMaker 3 spotting pins; Telechem, International, Inc., Sunnyvale, Calif., USA) and a robotic arrayer (PixSys 3500, Cartesian Technologies, Irvine, Calif., USA). Around 0.5 nl of a prepared PCR product was spotted at each location to produce spots with approximately 100 um diameters. Spot center-to-center spacing was from 180 um to 210 um depending on the array. Printing was conducted in a chamber with relative humidity set at 50%.

[2569] Slides containing maize sequences were purchased from Agilent Technology (Palo Alto, Calif. 94304).

### Post-Processing of Slides

[2570] After arraying, slides were processed through a series of steps—rehydration, UV cross-linking, blocking and denaturation—required prior to hybridization. Slides were rehydrated by placing them over a beaker of warm water (DNA face down), for 2-3 sec, to distribute the DNA more evenly within the spots, and then snap dried on a hot plate (DNA side, face up). The DNA was then cross-linked to the slides by UV irradiation (60-65 mJ; 2400 Stratalinker, Stratagene, La Jolla, Calif., USA).

[2571] Following this a blocking step was performed to modify remaining free lysine groups, and hence minimize their ability to bind labeled probe DNA. To achieve this the arrays were placed in a slide rack. An empty slide chamber was left ready on an orbital shaker. The rack was bent slightly inwards in the middle, to ensure the slides would not run into each other while shaking. The blocking solution was prepared as follows:

3×350-ml glass chambers (with metal tops) were set to one side, and a large round Pyrex dish with dH₂O was placed ready in the microwave. At this time, 15 ml sodium borate was prepared in a 50 ml conical tube.
6-g succinic anhydride was dissolved in approx. 325-350 mL 1-methyl-2-pyrrolidinone. Rapid addition of reagent was crucial.
a. Immediately after the last flake of the succinic anhydride dissolved, the 15-mL sodium borate was added.
b. Immediately after the sodium borate solution mixed in, the solution was poured into an empty slide chamber.
c. The slide rack was plunged rapidly and evenly in the solution. It was vigorously shaken up and down for a few seconds, making sure slides never left the solution.
d. It was mixed on an orbital shaker for 15-20 min. Meanwhile, the water in the Pyrex dish (enough to cover slide rack) was heated to boiling.

[2572] Following this, the slide rack was gently plunge in the 95 C water (just stopped boiling) for 2 min. Then the slide rack was plunged 5× in 95% ethanol. The slides and rack were centrifuged for 5 min. @ 500 rpm. The slides were loaded quickly and evenly onto the carriers to avoid streaking. The arrays were used immediately or store in slide box.

[2573] The Hybridization process began with the isolation of mRNA from the two tissues (see “Isolation of total RNA” and “Isolation of mRNA”, below) in question followed by their conversion to single stranded cDNA (see “Generation of probes for hybridization”, below). The cDNA from each tissue was independently labeled with a different fluorescent dye and then both samples were pooled together. This final differentially labeled cDNA pool was then placed on a processed microarray and allowed to hybridize (see “Hybridization and wash conditions”, below).

### Isolation of Total RNA

[2574] Approximately 1 g of plant tissue was ground in liquid nitrogen to a fine powder and transferred into a 50-ml centrifuge tube containing 10 ml of Trizol reagent. The tube was vigorously vortexed for 1 min and then incubated at room temperature for 10-20 min. on an orbital shaker at 220 rpm. Two ml of chloroform was added to the tube and the solution vortexed vigorously for at least 30-sec before again incubating at room temperature with shaking. The sample was then centrifuged at 12,000×g (10,000 rpm) for 15-20 min at 4° C. The aqueous layer was removed and mixed by inversion with 2.5 ml of 1.2 M NaCl/0.8 M Sodium Citrate and 2.5 ml of isopropyl alcohol added. After a 10 min. incubation at room temperature, the sample was centrifuged at 12,000×g (10,000 rpm) for 15 min at 4° C. The pellet was washed with 70% ethanol, re-centrifuged at 8,000 rpm for 5 min and then air dried at room temperature for 10 min. The resulting total RNA was dissolved in either TE (10 mM Tris-HCl, 1 mM EDTA, pH 8.0) or DEPC (diethylpyrocarbonate) treated deionized water (RNAse-free water). For subsequent isolation of mRNA using the Qiagen kit, the total RNA pellet was dissolved in RNAse-free water.

Isolation of mRNA

[2575] mRNA was isolated using the Qiagen Oligotex mRNA Spin-Column protocol (Qiagen, Valencia, Calif.). Briefly, 500 μl OBB buffer (20 mM Tris-Ci, pH 7.5, 1 M NaCl, 2 mM EDTA, 0.2% SDS) was added to 500 μl of total RNA (0.5-0.75 mg) and mixed thoroughly. The sample was first incubated at 70° C. for 3 min, then at room temperature for 10 minutes and finally centrifuged for 2 min at 14,000-18,000×g. The pellet was resuspended in 400 μl OW2 buffer (10 mM Tris-Cl, pH 7.5, 150 mM NaCl, 1 mM EDTA) by vortexing, the resulting solution placed on a small spin column in a 1.5 ml RNase-free microcentrifuge tube and centrifuged for 1 min at 14,000-18,000×g. The spin column was transferred to a new 1.5 ml RNase-free microcentrifuge tube and washed with 400 μl of OW2 buffer. To release the isolated mRNA from the resin, the spin column was again transferred to a new RNase-free 1.5 ml microcentrifuge tube, 20-100 μl 70° C. OEB buffer (5 mM Tris-Cl, pH 7.5) added and the resin resuspended in the resulting solution via pipeting. The mRNA solution was collected after centrifuging for 1 min at 14,000-18,000×g.

[2576] Alternatively, mRNA was isolated using the Stratagene Poly(A) Quik mRNA Isolation Kit (Startagene, La Jolla, Calif.). Here, up to 0.5 mg of total RNA (maximum volume of 1 ml) was incubated at 65° C. for 5 minutes, snap cooled on ice and 0.1× volumes of 10× sample buffer (10 mM Tris-HCl (pH 7.5), 1 mM EDTA (pH 8.0) 5 M NaCl) added. The RNA sample was applied to a prepared push column and passed through the column at a rate of ˜1 drop every 2 sec. The solution collected was reapplied to the column and collected as above. 200 μl of high salt buffer (10 mM Tris-HCl (pH 7.5), 1 mM EDTA, 0.5 NaCl) was applied to the column and passed through the column at a rate of ˜1 drop every 2 sec. This step was repeated and followed by three low salt buffer (10 mM Tris-HCl (pH 7.5), 1 mM EDTA, 0.1 M NaCl) washes preformed in a similar manner. mRNA was eluted by applying to the column four separate 200 μl aliquots of elution buffer (10 mM Tris-HCl (pH 7.5), 1 mM EDTA) preheated to 65° C. Here, the elution buffer was passed through the column at a rate of 1 drop/sec. The resulting mRNA solution was precipitated by adding 0.1× volumes of 10× sample buffer, 2.5 volumes of ice-cold 100% ethanol, incubating overnight at −20° C. and centrifuging at 14,000-18,000×g for 20-30 min at 4° C. The pellet was washed with 70% ethanol and air dried for 10 min. at room temperature before resuspension in RNase-free deionized water.

### Preparation of Yeast Controls

[2577] Plasmid DNA was isolated from the following yeast clones using Qiagen filtered maxiprep kits (Qiagen, Valencia, Calif.): YAL022c(Fun26), YAL031c(Fun21), YBR032w, YDL131w, YDL182w, YDL194w, YDL196w, YDR050c and YDR116c. Plasmid DNA was linearized with either BsrBI (YAL022c(Fun26), YAL031c(Fun21), YDL131w, YDL182w, YDL194w, YDL196w, YDR050c) or AflIII (YBR032w, YDR116c) and isolated.

### In Vitro Transcription of Yeast Clones

[2578] The following solution was incubated at 37° C. for 2 hours: 17 μl of isolated yeast insert DNA (1 μg), 20 μl 5× buffer, 10 μl 100 mM DTT, 2.5 μl (100 U) RNasin, 20 μl 2.5 mM (ea.) rNTPs, 2.7 μl (40 U) SP6 polymerase and 27.8 μl RNase-free deionized water. 2 μl (2 U) Ampli DNase I was added and the incubation continued for another 15 min. 10 μl 5M NH₄OAC and 100 μl phenol:chloroform:isoamyl alcohol (25:24:1) were added, the solution vortexed and then centrifuged to separate the phases. To precipitate the RNA, 250 μl ethanol was added and the solution incubated at −20° C. for at least one hour. The sample was then centrifuged for 20 min at 4° C. at 14,000-18,000×g, the pellet washed with 500 μl of 70% ethanol, air dried at room temperature for 10 min and resuspended in 100 μl of RNase-free deionized water. The precipitation procedure was then repeated.

[2579] Alternatively, after the two-hour incubation, the solution was extracted with phenol/chloroform once before adding 0.1 volume 3M sodium acetate and 2.5 volumes of 100% ethanol. The solution was centrifuged at 15,000 rpm, 4° C. for 20 minutes and the pellet resuspended in RNase-free deionized water. The DNase I treatment was carried out at 37° C. for 30 minutes using 2 U of Ampli DNase I in the following reaction condition: 50 mM Tris-HCl (pH 7.5), 10 mM MgCl₂. The DNase I reaction was then stopped with the addition of NH₄OAC and phenol:chloroform:isoamyl alcohol (25:24:1), and RNA isolated as described above.

[2580] 0.15-2.5 ng of the in vitro transcript RNA from each yeast clone were added to each plant mRNA sample prior to labeling to serve as positive (internal) probe controls.

### Generation of Probes for Hybridization

[2581] Generation of Labeled Probes for Hybridization from First-Strand cDNA

[2582] Hybridization probes were generated from isolated mRNA using an Atlas™ Glass Fluorescent Labeling Kit (Clontech Laboratories, Inc., Palo Alto, Calif., USA). This entails a two step labeling procedure that first incorporates primary aliphatic amino groups during cDNA synthesis and then couples fluorescent dye to the cDNA by reaction with the amino functional groups. Briefly, 5 μg of oligo(dT)₁₈ primer d(TTTTTTTTTTTTTTTTTTV) was mixed with Poly A+mRNA (1.5-2 μg mRNA isolated using the Qiagen-Oligotex mRNA Spin-Column protocol or the Stratagene Poly(A) Quik mRNA Isolation protocol (Stratagene, La Jolla, Calif., USA)) in a total volume of 25 μl. The sample was incubated in a thermocycler at 70° C. for 5 min, cooled to 48° C. and 10 μl of 5× cDNA Synthesis Buffer (kit supplied), 5 μl 10× dNTP mix (dATP, dCTP, dGTP, dTTP and aminoallyl-dUTP; kit supplied), 7.5 μl deionized water and 2.5 μl MMLV Reverse Transcriptase (500 U) added. The reaction was then incubated at 48° C. for 30 minutes, followed by 1 hr incubation at 42° C. At the end of the incubation the reaction was heated to 70° C. for 10 min, cooled to 37° C. and 0.5 μl (5 U) RNase H added, before incubating for 15 min at 37° C. The solution was vortexed for 1 min after the addition of 0.5 μl 0.5 M EDTA and 5 μl of QuickClean Resin (kit supplied) then centrifuged at 14,000-18,000×g for 1 min. After removing the supernatant to a 0.45 μm spin filter (kit supplied), the sample was again centrifuged at 14,000-18,000×g for 1 min, and 5.5 μl 3 M sodium acetate and 137.5 μl of 100% ethanol added to the sample before incubating at −20° C. for at least 1 hr. The sample was then centrifuged at 14,000-18,000×g at 4° C. for 20 min, the resulting pellet washed with 500 μl 70% ethanol, air-dried at room temperature for 10 min and resuspended in 10 μl of 2× fluorescent labeling buffer (kit provided). 10 μl each of the fluorescent dyes Cy3 and Cy5 (Amersham Pharmacia (Piscataway, N.J., USA); prepared according to Atlas™ kit directions of Clontech) were added and the sample incubated in the dark at room temperature for 30 min.

[2583] The fluorescently labeled first strand cDNA was precipitated by adding 2 μl 3M sodium acetate and 50 μl 100% ethanol, incubated at −20° C. for at least 2 hrs, centrifuged at 14,000-18,000×g for 20 min, washed with 70% ethanol, air-dried for 10 min and dissolved in 100 μl of water.

[2584] Alternatively, 3-4 μg mRNA, 2.5 (˜8.9 ng of in vitro translated mRNA) μl yeast control and 3 μg oligo dTV (TTTTTTTTTTTTTTTTTT(A/C/G); Sequence ID No.: X) were mixed in a total volume of 24.7 μl. The sample was incubated in a thermocycler at 70° C. for 10 min. before chilling on ice. To this, 8 μl of 5× first strand buffer (SuperScript II RNase H-Reverse Transcriptase kit from Invitrogen (Carlsbad, Calif. 92008); cat no. 18064022), 0.8° C. of aa-dUTP/dNTP mix (50×; 25 mM dATP, 25 mM dGTP, 25 mM dCTP, 15 mM dTTP, 10 mM aminoallyl-dUTP), 4 μl of 0.1 M DTT and 2.5 μl (500 units) of Superscript R.T.II enzyme (Stratagene) were added. The sample was incubated at 42° C. for 2 hours before a mixture of 10° C. of 1M NaOH and 10° C. of 0.5 M EDTA were added. After a 15 minute incubation at 65° C., 25 μl of 1 M Tris pH 7.4 was added. This was mixed with 450 μl of water in a Microcon 30 column before centrifugation at 11,000×g for 12 min. The column was washed twice with 450 μl (centrifugation at 11,000 g, 12 min.) before eluting the sample by inverting the Microcon column and centrifuging at 11,000×g for 20 seconds. Sample was dehydrated by centrifugation under vacuum and stored at −20° C.

[2585] Each reaction pellet was dissolved in 9 μl of 0.1 M carbonate buffer (0.1M sodium carbonate and sodium bicarbonate, pH=8.5-9) and 4.5 μl of this placed in two microfuge tubes. 4.5 μl of each dye (in DMSO) were added and the mixture incubated in the dark for 1 hour. 4.5 μl of 4 M hydroxylamine was added and again incubated in the dark for 15 minutes.

[2586] Regardless of the method used for probe generation, the probe was purified using a Qiagen PCR cleanup kit (Qiagen, Valencia, Calif., USA), and eluted with 100 ul EB (kit provided). The sample was loaded on a Microcon YM-30 (Millipore, Bedford, Mass., USA) spin column and concentrated to 4-5 ul in volume. Probes for the maize microarrays were generated using the Fluorescent Linear Amplification Kit (cat. No. G2556A) from Agilent Technologies (Palo Alto, Calif.).

### Hybridization and Wash Conditions

[2587] The following Hybridization and Washing Condition were developed:

### Hybridization Conditions:

[2588] Labeled probe was heated at 95° C. for 3 min and chilled on ice. Then 25 □L of the hybridization buffer which was warmed at 42 C was added to the probe, mixing by pipetting, to give a final concentration of:

50% formamide

[2589] 4×SSC

[2590] 0.03% SDS

5×Denhardt's solution
0.1 μg/ml single-stranded salmon sperm DNA

[2591] The probe was kept at 42 C. Prior to the hybridization, the probe was heated for 1 more min., added to the array, and then covered with a glass cover slip. Slides were placed in hybridization chambers (Telechem, Sunnyvale, Calif.) and incubated at 42° C. overnight.

### Washing Conditions:

[2592] A. Slides were washed in 1×SSC+0.03% SDS solution at room temperature for 5 minutes,
B. Slides were washed in 0.2×SSC at room temperature for 5 minutes,
C. Slides were washed in 0.05×SSC at room temperature for 5 minutes.

[2593] After A, B, and C, slides were spun at 800×g for 2 min. to dry. They were then scanned.

[2594] Maize microarrays were hybridized according to the instructions included Fluorescent Linear Amplification Kit (cat. No. G2556A) from Agilent Technologies (Palo Alto, Calif.).

### Scanning of Slides

[2595] The chips were scanned using a ScanArray 3000 or 5000 (General Scanning, Watertown, Mass., USA). The chips were scanned at 543 and 633 nm, at 10 um resolution to measure the intensity of the two fluorescent dyes incorporated into the samples hybridized to the chips.

### Data Extraction and Analysis

[2596] The images generated by scanning slides consisted of two 16-bit TIFF images representing the fluorescent emissions of the two samples at each arrayed spot. These images were then quantified and processed for expression analysis using the data extraction software Imagene™ (Biodiscovery, Los Angeles, Calif., USA). Imagene output was subsequently analyzed using the analysis program Genespring™ (Silicon Genetics, San Carlos, Calif., USA). In Genespring, the data was imported using median pixel intensity measurements derived from Imagene output. Background subtraction, ratio calculation and normalization were all conducted in Genespring. Normalization was achieved by breaking the data in to 32 groups, each of which represented one of the 32 pin printing regions on the microarray. Groups consist of 360 to 550 spots. Each group was independently normalized by setting the median of ratios to one and multiplying ratios by the appropriate factor.

[2597] The results of the microarray experiments are reported in the MA_DIFF Table as described above in the section entitled “Brief Description of the Individual Tables”.

### Example 4

### AFLP Experiments and Results

### Production of Samples

[2598] mRNA was prepared from 27 plant tissues. Based on preliminary cDNA-AFLP analysis with a few primer combinations, 11 plant tissues and/or pooled samples were selected. Samples were selected to give the greatest representation of unique band upon electrophoresis. The final 11 samples or pooled samples used in the cDNA-AFLP analysis were:

| | |
|---|---|
| S1 | Dark adapted seedlings |
| S2 | Roots/Etiolated Seedlings |
| S3 | Mature leaves, soil grown |
| S4 | Immature buds, inflorescence meristem |
| S5 | Flowers opened |
| S6 | Siliques, all stages |
| S7 | Senescing leaves (just beginning to yellow) |
| S8 | Callus Inducing medium |
| | Callus shoot induction |
| | Callus root induction |
| S9 | Wounding |
| | Methyl-jasmonate-treated |
| S10 | Oxidative stress |
| | Drought stress |
| | Oxygen Stress-flooding |
| S11 | Heat treated light grown seedling |
| | Cold treated light grown seedlings |

[2599] cDNA from each of the 11 samples was digested with two restriction endonucleases, namely TaqI and MseI. TaqI and MseI adapters were then ligated to the restriction enzyme fragments. Using primers to these adapters that were specific in sequence (i.e. without extensions), the restriction fragments were subjected to cycles of non-radioactive pre-amplification.

### Selective PCR

[2600] In order to limit the number of fragments or bands on each lane of the AFLP gel, fragments were subjected to another round of selective radioactive polymerase chain amplification. The TaqI primers used in this amplification were 5′-labelled with P³³. For these amplifications, the TaqI primers had two extra nucleotides at their 3′ end and the MseI primers had three extra nucleotides at their 3′ end. This resulted in 16 primer designs for the TaqI primer and 64 primer designs for the MseI primer. Altogether, this gave rise to a total of 1024 primer designs. Fragments generated in this selective amplification protocol were run with labeled molecular weight markers on polyacrylamide gels to separate fragments in the size range of 100-600 nucleotides.

[2601] Following gel electrophoresis, profiles were analyzed with a phosphoimager. From these images, electronic files, giving the mobilities of all bands on the gels and their intensities in each of the samples, were compiled.

[2602] All unique bands were cut out of the gels. The gel pieces were placed in 96 well plates for elution and their plate designation was linked to their electrophoretic mobilities recorded in the electronic files. The eluted fragments were then subjected to another round of amplification, this time using reamplification primers (see below). After amplification, DNA fragments were sequenced.

[2603] A computer database was established linking the mobilities of all the bands observed on the cDNA-AFLP gels with the sequence of the correspondingly isolated fragment. The sequence allowed for identification of the gene from which the cDNA-AFLP fragment was derived, allowing for a linkage of band mobility with the transcript of a specific gene. Also linked to the band mobilities were their intensities recorded for each of the eleven samples used in constructing the database.

[2604] This cDNA-AFLP analysis with TaqI/MseI and 1024 primer combinations was repeated using the enzymes NlaIII in place of TaqI, and Csp6I in place of MseI.

### Using the Database for the Transcript Profiling of Experimental Samples

[2605] Experimental Samples were subjected to cDNA-AFLP as described above, resulting in electronic files recording band mobilities and intensities. Through use of the database established above, band mobilities could be linked to specific cDNAs, and therefore genes. Furthermore, the linkage with the intensities in the respective samples allowed for the quantification of specific cDNAs in these samples, and thus the relative concentration of specific transcripts in the samples, indicating the level to which specific genes were expressed.

### Reamplification Primers

Reamplification primers
99G24
CGCCAGGGTTTTCCCAGTCACGAC|ACGACTCACT|gatgagtcctgagtaa|
M13 forward +10 MseI+0
99G20
AGCGGATAACAATTTCACACAGGA|CACACTGGTA|tagactgcgtaccga|
M13 reverse +10 TaqI+0

### Purification of the Reamplifiction Reaction Before Sequencing

[2607] 5 μl reamplification reaction
0.25 μl 10×PCR buffer

### 0.33 μl Shrimp Alkaline Phosphatase (Amersham Life Science)

### 0.033 μl Exonuclease I (USB)

[2608] 0.297 μl SAP dilution buffer

### 1.59 μl MQ

[2609] 7.5 μl total

### 30′ 37° C.

### 10′ 80° C.

### 4° C.

### Sample Preparation

[2610] S1: Dark adapted seedlings: Seeds of Arabidopsis thaliana (wassilewskija) were sown in pots and left at 4° C. for two to three days to vernalize. They were transferred to a growth chamber after three days. The intensity of light in the growth chamber was 7000-8000 LUX, temperature was 22° C., with 16 h light and 8 h dark. After 8 days, the seedlings were foil-wrapped and harvested after two days.
S2: Roots/Etiolated seedlings: Seeds of Arabidopsis thaliana (wassilewskija) were germinated on solid germination media (1×MS salts, 1×MS vitamins, 20 g/L sucrose, 50 mg/L MES pH 5.8) in the dark. Tissues were harvested 14 days later.
S3: Mature leaves, soil grown: Seeds of Arabidopsis thaliana (wassilewskija) were sown in pots and left at 4° C. for two to three days to vernalize. They were transferred to a growth chamber after three days. The intensity of light in the growth chamber was 7000-8000 LUX, temperature was 22° C., with 16 h light and 8 h dark. Leaves were harvested 17 days later from plants that had not yet bolted.
S4: Immature buds, inflorescence meristem: Seeds of Arabidopsis thaliana (wassilewskija) were sown in pots and left at 4° C. for two to three days to vernalize. They were transferred to a growth chamber after three days. The intensity of light in the growth chamber was 7000-8000 LUX, temperature was 22° C., with 16 h light and 8 h dark.
S5: Flowers, opened: Seeds of Arabidopsis thaliana (wassilewskija) were sown in pots and left at 4° C. for two to three days to vernalize. They were transferred to a growth chamber after three days. The intensity of light in the growth chamber was 7000-8000 LUX, temperature was 22° C., with 16 h light and 8 h dark.
S6: Siliques, all stages: Seeds of Arabidopsis thaliana (wassilewskija) were sown in pots and left at 4° C. for two to three days to vernalize. They were transferred to a growth chamber after three days. The intensity of light in the growth chamber was 7000-8000 LUX, temperature was 22° C., with 16 h light and 8 h dark.
S7: Senescing leaves (just beginning to yellow): Seeds of Arabidopsis thaliana (wassilewskija) were sown in pots and left at 4° C. for two to three days to vernalize. They were transferred to a growth chamber after three days. The intensity of light in the growth chamber was 7000-8000 LUX, temperature was 22° C., with 16 h light and 8 h dark. When the plant had leaves that were less than 50% yellow, the leaves that were just beginning to yellow were harvested.

### S8:

[2611] Callus Inducing Medium: Seeds of Arabidopsis thaliana (wassilewskija) were surface sterilized (1 min-75% Ethanol, 6 min-bleach 100%+Tween 20, rinse) and incubated on MS medium containing 2,4-Dichlorophenoxyacetic acid (2,4-D) 1 mg/l and Kinetin 1 mg/l in the dark for 3 weeks to generate primary callus.

[2612] Hypocotyls and roots of the seedling were swollen after a week after incubation in this callus induction medium and subsequently callus was initiated from these swollen areas.

[2613] Callus shoot induction: Primary calluses were transferred to the fresh callus induction medium for another 2 weeks growth to generate secondary callus. Secondary callus were transferred to shoot induction medium containing MS basal medium and Benzyladenine (BA) 2 mg/l and Naphthaleneacetic acid (NAA)). 1 mg/l for 2 weeks growth in the light before it was harvested and frozen and sent to Keygene. Many shoot meristems were observed under the microscope.

[2614] Callus root induction: Secondary calluses were transferred to root induction medium containing MS basal medium, sucrose 1% and Indolebutyric acid (IBA) 0.05 mg/l in the dark. Many root primordia were observed under microscope after 10 days in the root induction medium. Those callus tissue were harvested and frozen and sent to Keygene.

### S9:

[2615] Wounding: Seeds of Arabidopsis thaliana (wassilewskija) were sown in pots and left at 4° C. for two to three days to vernalize. They were transferred to a growth chamber after three days. The intensity of light in the growth chamber was 7000-8000 LUX, temperature was 22° C., with 16 h light and 8 h dark. After 20 days, leaves of plants were wounded with pliers. Wounded leaves were harvested 1 hour and 4 hours after wounding.

[2616] Methyl jasmonate treatment: Seeds of Arabidopsis thaliana (wassilewskija) were sown in pots and left at 4° C. for two to three days to vernalize. They were transferred to a growth chamber after three days. The intensity of light in the growth chamber was 7000-8000 LUX, temperature was 22° C., with 16 h light and 8 h dark. After 13 days, plants were sprayed with 0.001% methyl jasmonate. Leaves were harvested 1.5 hours and 6 hours after spraying

### S10:

[2617] Oxidative stress: Seeds of Arabidopsis thaliana (wassilewskija) were sown in pots and left at 4° C. for two to three days to vernalize. They were transferred to a growth chamber after three days. The intensity of light in the growth chamber was 7000-8000 LUX, temperature was 22° C., with 16 h light and 8 h dark. After 24 days, a few leaves were inoculated with a mixture of 2.5 mM D-glucose, 2.5 U/mL glucose oxidase in 20 mM sodium phosphate buffer pH 6.5. After an hour, 3 hours, or 5 hours after inoculation, whole plant, except for the inoculated leaves, was harvested. This sample was mixed with sample from plants that were sitting in full sun (152,000 LUX) for 2 hours or four hours.

[2618] Drought stress: Seeds of Arabidopsis thaliana (wassilewskija) were sown in pots and left at 4° C. for two to three days to vernalize. They were transferred to a growth chamber after three days. The intensity of light in the growth chamber was 7000-8000 LUX, temperature was 22° C., with 16 h light and 8 h dark. After 20 days, aerial tissues were harvested and left to dry in 3MM Whatman paper for 1 hour or 4 hours.

[2619] Oxygen stress: Seeds of Arabidopsis thaliana (wassilewskija) were sown in pots and left at 4° C. for two to three days to vernalize. They were transferred to a growth chamber after three days. The intensity of light in the growth chamber was 7000-8000 LUX, temperature was 22° C., with 16 h light and 8 h dark. After 21 days, the plant was flooded by immersing its pot in a beaker of tap water. After 6 days, the upper tissues were harvested.

S11: Heat-treated light grown seedlings: Seeds of Arabidopsis thaliana (wassilewskija) were sown in pots and left at 4° C. for two to three days to vernalize. They were transferred to a growth chamber after three days. The intensity of light in the growth chamber was 7000-8000 LUX, temperature was 22° C., with 16 h light and 8 h dark. Over a 5 hour period, the temperature was raised to 42° C. at the rate of approximately 4° C. per hour. After 1 hour at 42° C., the aerial tissues were collected. This sample was mixed with an equal volume of sample that went through a heat-recovery treatment namely bringing down the temperature to 22° C. from 42° C. over a 5 hour period at the rate of 4° C. per hour.

[2620] Cold-treated light grown seedlings: Seeds of Arabidopsis thaliana (wassilewskija) were sown in pots and left at 4° C. for two to three days to vernalize. They were transferred to a growth chamber after three days. The intensity of light in the growth chamber was 7000-8000 LUX, temperature was 22° C., with 16 h light and 8 h dark. After 18 days, the plant was transferred to 4° C. for an hour before the aerial tissues were harvested. This sample was mixed with aerial tissues from another plant that was transferred to 4° C. for 27 hours before being harvested.

### Analysis of Data:

[2621] Intensity: The intensity of the band corresponds to the value in each lane marked S1, S2 etc.
P-values: The data shows P-values of each of the samples 1-11. P-values are calculated using the following formula 2*(1-NORMDIST(ABS(Sx-AVERAGE(of S1 to S11, not including Sx))/STDEV(of S1 to S11 not including Sx),0,1,TRUE)) using Excel functions.

[2622] The equivalent mathematical formula of P-value is as follows:

$$\int ϕ ( x ) d x , integrated from a to ∞ , \\ where ϕ ( x ) is a normal distribution : \\ where a = \underline{\vert Sx - μ \vert}$$

$$σ ( S 1 … S 11 , not including Sx ) ;$$

$$where$$

$$μ = is the average of the intensities of all samples except Sx , \\ = \frac{( Σ S 1 … Sn ) - Sx}{n - 1}$$

$$where σ ( S 1 … S 11 , not including Sx ) = the standard deviation of all sample intensities except Sx .$$

### Results:

[2623] The results are shown in the MA_diff tables.

### Example 5

### Transformation of Carrot Cells

[2624] Transformation of plant cells can be accomplished by a number of methods, as described above. Similarly, a number of plant genera can be regenerated from tissue culture following transformation. Transformation and regeneration of carrot cells as described herein is illustrative.

[2625] Single cell suspension cultures of carrot (Daucus carota) cells are established from hypocotyls of cultivar Early Nantes in B₅ growth medium (O. L. Gamborg et al., Plant Physiol. 45:372 (1970)) plus 2,4-D and 15 mM CaCl₂ (B₅-44 medium) by methods known in the art. The suspension cultures are subcultured by adding 10 ml of the suspension culture to 40 ml of B₅-44 medium in 250 ml flasks every 7 days and are maintained in a shaker at 150 rpm at 27° C. in the dark.

[2626] The suspension culture cells are transformed with exogenous DNA as described by Z. Chen et al. Plant Mol. Bio. 36:163 (1998). Briefly, 4-days post-subculture cells are incubated with cell wall digestion solution containing 0.4 M sorbitol, 2% driselase, 5 mM MES (2-[N-Morpholino]ethanesulfonic acid) pH 5.0 for 5 hours. The digested cells are pelleted gently at 60×g for 5 min. and washed twice in W5 solution containing 154 mM NaCl, 5 mM KCl, 125 mM CaCl₂ and 5 mM glucose, pH 6.0. The protoplasts are suspended in MC solution containing 5 mM MES, 20 mM CaCl₂, 0.5 M mannitol, pH 5.7 and the protoplast density is adjusted to about 4×10⁶ protoplasts per ml.

[2627] 15-60 μg of plasmid DNA is mixed with 0.9 ml of protoplasts. The resulting suspension is mixed with 40% polyethylene glycol (MW 8000, PEG 8000), by gentle inversion a few times at room temperature for 5 to 25 min. Protoplast culture medium known in the art is added into the PEG-DNA-protoplast mixture. Protoplasts are incubated in the culture medium for 24 hour to 5 days and cell extracts can be used for assay of transient expression of the introduced gene. Alternatively, transformed cells can be used to produce transgenic callus, which in turn can be used to produce transgenic plants, by methods known in the art. See, for example, Nomura and Komamine, Plt. Phys. 79:988-991 (1985), Identification and Isolation of Single Cells that Produce Somatic Embryos in Carrot Suspension Cultures.

### Example 6

### Phenotype Screens and Results

### A: Triparental Mating and Vacuum Infiltration Transformation of Plants

[2628] Standard laboratory techniques are as described in Sambrook et al. (1989) unless otherwise stated. Single colonies of Agrobacterium C58C1Rif, E. coli helper strain HB101 and the E. coli strain containing the transformation construct to be mobilized into Agrobacterium were separately inoculated into appropriate growth media and stationary cultures produced. 100 μl of each of the three cultures were mixed gently, plated on YEB (5 g Gibco beef extract, Ig Bacto yeast extract, Ig Bacto peptone, 5 g sucrose, pH 7.4) solid growth media and incubated overnight at 28° C. The bacteria from the triparental mating were collected in 2 ml of lambda buffer (20 mM Tris (pH 7.5), 100 mM NaCl, 10 mM MgCl₂) and serial dilutions made. An aliquot of the each dilution was then plated and incubated for 2 days at 28° C. on YEB plates supplemented with 100 μg/ml rifampicin and 100 μg/ml carbenicillin for calculation of the number of acceptor cells and on YEB plates supplemented with 100 μg/ml rifampicin, 100 μg/ml carbenicillin and 100 μg/ml spectinomycin for selection of transconjugant cells. The cointegrate structure of purified transconjugants was verified via Southern blot hybridization.

[2629] A transconjugant culture was prepared for vacuum infiltration by inoculating 1 ml of a stationary culture arising from a single colony into liquid YEB media and incubating at 28° C. for approximately 20 hours with shaking (220 rpm) until the OD taken at 600 nm was 0.8-1.0. The culture was then pelleted (8000 rpm, 10 min, 4° C. in a Sorvall SLA 3000 rotor) and the bacteria resuspended in infiltration medium (0.5×MS salts, 5% w/v sucrose, 10 μg/l BAP, 200 μl/l Silwet L-77, pH 5.8) to a final OD₆₀₀ of 1.0. This prepared transconjugant culture was used within 20 minutes of preparation.

[2630] Wild-type plants for vacuum infiltration were grown in 4-inch pots containing Metromix 200 and Osmocote. Briefly, seeds of Arabidopsis thaliana (ecotype Wassilewskija) were sown in pots and left at 4° C. for two to four days to vernalize. They were then transferred to 22-25° C. and grown under long-day (16 hr light: 8 hr dark) conditions, sub-irrigated with water. After bolting, the primary inflorescence was removed and, after four to eight days, the pots containing the plants were inverted in the vacuum chamber to submerge all of the plants in the prepared transconjugant culture. Vacuum was drawn for two minutes before pots were removed, covered with plastic wrap and incubated in a cool room under darkness or very low light for one to two days. The plastic wrap was then removed, the plants returned to their previous growing conditions and subsequently produced (TI) seed collected.

### B: Selection of T-DNA Insertion Lines

[2631] Approximately 10,750 seeds from the initial vacuum infiltrated plants were sown per flat of Metromix 350 soil. Flats were vernalized for four to five days at 4° C. before being transferred to 22-25° C. and grown under long-day (16 hr light: 8 hr dark) conditions, sub-irrigated with water. Approximately seven to ten days after germination, the (T1) seedlings were sprayed with 0.02% Finale herbicide (AgrEvo). After another five to seven days, herbicide treatment was repeated. Herbicide resistant T1 plants were allowed to self-pollinate and T2 seed were collected from each individual. In the few cases where the T1 plant produced few seed, the T2 seed was planted in bulk, the T2 plants allowed to self-pollinate and T3 seed collected.

### C: Phenotype Screening

[2632] Approximately 40 seed from each T2 (or T3) line were planted in a 4-inch pot containing either Sunshine mix or Metromix 350 soil. Pots were vernalized for four to five days at 4° C. before being transferred to 22-25° C. and grown under long-day (16 hr light: 8 hr dark) conditions, sub-irrigated with water. A first phenotype screen was conducted by visually inspecting the seedlings five to seven days after germination and aberrant phenotypes noted. Plants were then sprayed with Finale herbicide within four days (i.e. about seven to nine days after germination). The second visual screen was conducted on surviving T2 (or T3) plants about sixteen to seventeen days after germination and the final screen was conducted after the plants had bolted and formed siliques. Here, the third and fourth green siliques were collected and aberrant phenotypes noted. The Knock-in and Knock-out Tables contain descriptions of identified phenotypes.

[2633] Alternative, seed were surface sterilized and transferred to agar solidified medium containing Murashige and Skoog salts (1×), 1% sucrose (wt/v) pH 5.7 before autoclaving. Seed were cold treated for 48 hours and transferred to long days [16 hours light and 8 hours dark], 25° C. Plants were screened at 5 and 10 days.

[2634] In another screen, seed were surface sterilized and transferred to agar solidified medium containing Murashige and Skoog salts (1×), and combinations of various nitrogen and sucrose amounts as specified below:

[2635] Medium 1: no sucrose, 20.6 mM NH₄NO₃, 18.8 mM KNO₃;

[2636] Medium 2: 0.5% sucrose, 20.6 mM NH₄NO₃, 18.8 mM KNO₃;

[2637] Medium 3: 3% sucrose, 20.6 mM NH₄NO₃, 18.8 mM KNO₃;

[2638] Medium 4: no sucrose, 20.6 μM NH₄NO₃, 18.8 μM KNO₃;

[2639] Medium 5: 0.5% sucrose, 20.6 μM NH₄NO₃, 18.8 μM KNO₃; and

[2640] Medium 6: 3% sucrose, 20.6 μM NH₄NO₃, 18.8 μM KNO₃.

The 0.5% sucrose was the control concentration for the sucrose. The low nitrogene, 20.6 μM NH₄NO₃, 18.8 μM KNO₃, is the control for the nitrogen. Seed were cold treated for 48 hours and transferred to long days [16 hours light and 8 hours dark], 25° C. Plants were screened at 2, 5, and 10 days.

### D: TAIL-PCR and Fragment Sequencing

[2641] Rosette leaves were collected from each putative mutant and crushed between parafilm and FTA paper (Life Technologies). Two 2 mm² hole punches were isolated from each FTA sample and washed according to the manufacturer's instructions by vortexing with 200 ul of the provided FTA purification reagent. The FTA reagent was removed and the washing procedure repeated two more times. The sample was then washed twice with 200 ul of FTA TE (10 mM Tris, 0.1 mM EDTA, pH 8.0) and vortexing prior to PCR.

Primers used for TAIL-PCR are as follows:

| | |
|---|---|
| AD2: | 5′ NGTCGASWGANAWGAA 3' (128-fold degeneracy) |
| | S = G or C, W = A or T, and N = A, G, |
| | C, or T |
| LB1: | 5′ GTTTAACTGCGGCTCAACTGTCT 3′ |
| LB2: | 5′ CCCATAGACCCTTACCGCTTTAGTT 3′ |
| LB3: | 5′ GAAAGAAAAAGAGGTATAACTGGTA 3′ |

[2642] The extent to which the left and right borders of the T-DNA insert were intact was measured for each line by PCR. The following components were mixed for PCR: 1 2 mm² FTA sample, 38.75 μl distilled water, 5 μl 10× Platinum PCR buffer (Life Technologies), 2 μl 50 mM MgCl₂, 1 μl 10 mM dNTPs, 1 μl 10 μM primer LB1 (or RB1 for analysis of the right border), 1 μl 10 μM primer LB3R (or RB3R for analysis of the right border) and 1.25 U Platinum Taq (Life Technologies). Cycling conditions were: 94° C., 10 sec.; thirty cycles of 94° C., 1 sec.—54° C., 1 sec.—72° C., 1 sec.; 72° C., 4 sec. The expected band size for an intact left border is bp, while an intact right border generates a bp band.

[2643] Fragments containing left or right border T-DNA sequence and adjacent genomic DNA sequence were obtained via PCR. First product PCR reactions use the following reaction mixture: 1 2 mm² FTA sample, 12.44 μl distilled water, 2 μl 10× Platinum PCR buffer (Life Technologies), 0.6 μl 50 mM MgCl₂, 0.4 μl 10 mM dNTPs, 0.4 μl 10 μM primer LB1 (or RB1 for analysis of the right border), 3 μl 20 μM primer AD2 and 0.8 U Platinum Taq (Life Technologies). Cycling conditions for these reactions were: 93° C., 1 min.; 95° C., 1 min.; three cycles of 94° C., 45 sec.—62° C., 1 min.—72° C., 2.5 min.; 94° C., 45 sec.; 25° C., 3 min.; ramp to 72° C. in 3 min.; 72° C., 2.5 min.; fourteen cycles of 94° C., 20 sec.—68° C., 1 min.—72° C., 2.5 min.—94° C., 20 sec.—68° C., 1 min.—72° C., 2.5 min.—94° C., 20 sec.—44° C., 1 min.—72° C., 2.5 min.; 72° C., 5 min.; end; ˜4.5 hrs. For second product PCR reactions 1 μl of a 1:50 dilution of the first PCR product reaction was mixed with 13.44 μl distilled water, 2 μl 10× Platinum PCR buffer (Life Technologies), 0.6 μl 50 mM MgCl₂, 0.4 μl 10 mM dNTPs, 0.4 μl 10 μM primer LB2 (or RB2 for analysis of the right border), 2 μl 20 μM primer AD2 and 0.8 U Platinum Taq (Life Technologies). Second product cycling conditions were: eleven cycles of 94° C., 20 sec.—64° C., 1 min.—72° C., 2.5 min.—94° C., 20 sec.—64° C., 1 min.—72° C., 2.5 min.—94° C., 20 sec.—44° C., 1 min.; 72° C., 5 min.; end; ˜3 hrs. Third product PCR reactions were prepared by first diluting 2 μl of the second PCR product with 98 μl of distilled water and then adding 1 μl of the dilution to 13.44 μl distilled water, 2 μl 10× Platinum PCR buffer (Life Technologies), 0.6 μl 50 mM MgCl₂, 0.4 μl 10 mM dNTPs, 0.4 μl 10 μM primer LB3 (or RB3 for analysis of the right border), 2 μl 20 μM primer AD2 and 0.8 U Platinum Taq (Life Technologies). Third product cycling conditions were: twenty cycles of 94° C., 38 sec.—44° C., 1 min.—72° C., 2.5 min.; 72° C., 5 min.; end; ˜2 hrs. Aliquots of the first, second and third PCR products were electrophoresed on 1% TAE (40 mM Tris-acetate, 1 mM EDTA) to determine their size.

[2644] Reactions were purified prior to sequencing by conducting a final PCR reaction. Here, 0.25 μl Platinum PCR Buffer (Life Technologies), 0.1 μl 50 mM MgCl₂, 3.3 U SAP shrimp alkaline phosphatase, 0.33 U Exonuclease and 1.781 μl distilled water were added to a 5 μl third product and the reaction cycled at 37° C., 30 min.; 80° C., 10 min.; 4° C. indefinitely.

[2645] Di-deoxy “Big Dye” sequencing was conducted on Perkin-Elmer 3700 or 377 machines.

### Knock-In Experiments

[2646] For the following examples, a two-component system was constructed in a plant to ectopically express the desired cDNA.

[2647] First, a plant was generated by inserting a sequence encoding a transcriptional activator downstream of a desired promoter, thereby creating a first component where the desired promoter facilitates expression of the activator generated a plant. The first component also is referred to as the activator line.

[2648] Next, the second component is constructed by linking a desired cDNA to a sequence that the transcriptional activator can bind to and facilitate expression of the desired cDNA. The second component can be inserted into the activator line by transformation. Alternatively, the second component can be inserted into a separate plant, also referred to as the target line. Then, the target and activator lines can be crossed to generate progeny that have both components.

[2649] Two component lines were generated by both means.

### Part I—From Crosses

[2650] Target lines containing cDNA constructs are generated using the Agrobacterium-mediated transformation. Selected target lines are genetically crossed to activation lines (or promoter lines). Generally, the promoter lines used are as described above. Evaluation of phenotypes is done on the resulting F1 progenies.

### Part II—From Type I Supertransformation

[2651] Promoter activation lines (generally Vascular/Ovule/Young Seed/Embryo line, Seed/Epidermis/Ovary/Fruit line, Roots/Shoots/Ovule line, and Vasculature/Meristem are transformed with cDNA constructs using the Agrobacterium mediated transformation. Selected transformants (and their progenies) are evaluated for changes in phenotypes. The table for the knock-in of the Type I supertransformation comprises the following information
[2652] Clone ID,
[2653] Pfam,
[2654] Gemini ID
[2655] Trans. Unique ID (which indicates what promoter activation line was transformed
[2656] S Ratio: segregation ratio after the transformed plants are selected for the marker.
[2657] Assay
[2658] Stage: phenotype was observed
[2659] Feature: Where the phenotype was observed
[2660] Phenotype
[2661] P Ratio: phenotype ratio
[2662] Comments

### Part III—From Type II Supertransformation

[2663] Target lines generated using the procedure mentioned in Part I are transformed with T-DNA construct containing constitutive promoter. Selected transformants (and their progenies) are evaluated for changes in phenotypes.

[2664] An additional deposit of an E. coli Library, E. coliLibAO21800, was made at the American Type Culture Collection in Manassas, Va., USA on Feb. 22, 2000 to meet the requirements of Budapest Treaty for the international recognition of the deposit of microorganisms. This deposit was assigned ATCC accession no. PTA-1411. Additionally, ATCC Library deposits; PTA-1161, PTA-1411 and PTA-2007 were made at the American Type Culture Collection in Manassas, Va., USA on; Jan. 7, 2000, Feb. 23, 2000 and Jun. 8, 2000 respectively, to meet the requirements of Budapest Treaty for the international recognition of the deposit of microorganisms.

[2665] The invention being thus described, it will be apparent to one of ordinary skill in the art that various modifications of the materials and methods for practicing the invention can be made. Such modifications are to be considered within the scope of the invention as defined by the following claims.

[2666] Each of the references from the patent and periodical literature cited herein is hereby expressly incorporated in its entirety by such citation.

What is claimed is:

1. An isolated nucleic acid molecule comprising:
a) a nucleic acid having a nucleotide sequence which encodes an amino acid sequence exhibiting at least 40% sequence identity to an amino acid sequence encoded by
(1) a nucleotide sequence described in the tables or a fragment thereof; or
(2) a complement of a nucleotide sequence shown in the tables or a fragment thereof;
b) a nucleic acid which is the reverse of the nucleotide sequence according to subparagraph (a), such that the reverse nucleotide sequence has a sequence order which is the reverse of the sequence order of the nucleotide sequence according to subparagraph (a);
c) a nucleic acid capable of hybridizing to a nucleic acid having a sequence selected from the group consisting of:
(1) a nucleotide sequence which is shown in Tables 1 and/or 2; and a nucleotide sequence which is complementary to a nucleotide sequence shown in Tables 1 and/or 2, under conditions that permit formation of a nucleic acid duplex at a temperature from about 40° C. and 48° C. below the melting temperature of the nucleic acid duplex, with the proviso that said nucleotide sequence is not any of the sequences described in the Tables of any of Patent Publication Nos. WO 200040695, CA 2300692 A1, EP 1033405 A2, CA 2302828 A1 and EP 1059354 A2 and any proteins listed in the application that are identified by gi number or otherwise as being from the non-redundant GenBank CDS translations or Protein Database (PDB available on the internet) or PIR-International) Database (PIR; available on the internet).

2. An isolated nucleic acid molecule comprising a nucleic acid having a nucleotide sequence which exhibits at least 65% sequence identity to
a) a nucleotide sequence shown in the tables or a fragment thereof; or
b) a complement of a nucleotide sequence described in the tables or a fragment thereof, with the proviso that said nucleotide sequence is not any of the sequences described in the Tables of any of Patent Publication Nos. WO 200040695, CA 2300692 A1, EP 1033405 A2, CA 2302828 Al and EP 1059354 A2 and any proteins listed in the application that are identified by gi number or otherwise as being from the non-redundant GenBank CDS translations or Protein Database (PDB; available on the internet) or (PIR-International) Database (PIR) also available on the internet.

3. The nucleic acid molecule according to claim 1, wherein said nucleic acid comprises an open reading frame.

4. The isolated nucleic acid molecule of claim 1, wherein said nucleic acid is capable of functioning as a promoter, a 3′ end termination sequence, an untranslated region (UTR), or as a regulatory sequence.

5. The isolated nucleic acid molecule of claim 4, wherein (a) when said nucleic acid is a promoter it comprises a sequence selected from the group consisting of a TATA box sequence, a CAAT box sequence, a motif of GCAATCG or any transcription-factor binding sequence, and any combination thereof; and (b) when said nucleic acid sequence is a regulatory sequence it is capable of promoting seed-specific expression, embryo-specific expression, ovule-specific expression, tapetum-specific expression or root-specific expression of a sequence or any combination thereof.

6. A vector construct comprising:
a) a first nucleic acid having a regulatory sequence capable of causing transcription and/or translation; and
b) a second nucleic acid having the sequence of the isolated nucleic acid molecule according to claim 1;
wherein said first and second nucleic acids are operably linked and
wherein said second nucleic acid is heterologous to any element in said vector construct.

7. The vector construct according to claim 6, wherein said first nucleic acid is native to said second nucleic acid.

8. The vector construct according to claim 6, wherein said first nucleic acid is heterologous to said second nucleic acid.

9. A host cell comprising an isolated nucleic acid molecule according to claim 1, wherein said nucleic acid molecule is flanked by exogenous sequence.

10. A host cell comprising a vector construct of claim 6.

11. An isolated polypeptide comprising an amino acid sequence
a) exhibiting at least 40%, or 75%, or 85%, or 90% sequence identity of an amino acid sequence encoded by a sequence shown in the tables or a fragment thereof; and
b) capable of exhibiting at least one of the biological activities of the polypeptide encoded by said nucleotide sequence shown in the tables or a fragment thereof, with the proviso that said nucleotide sequence is not any of the sequences described in the Tables of any of Patent Publication Nos. WO 200040695, CA 2300692 A1, EP 1033405 A2, CA 2302828 A1 and EP 1059354 A2 and any proteins listed in the application that are identified by gi number or otherwise as being from the non-redundant GenBank CDS translations or Protein Database (PDB; available on the internet) or (PIR-International) Database (PIR) also available on the internet.

12. An antibody capable of binding the isolated polypeptide of claim 11.

13. A method of introducing an isolated nucleic acid into a host cell comprising:
a) providing an isolated nucleic acid molecule according to claim 1; and
b) contacting said isolated nucleic with said host cell under conditions that permit insertion of said nucleic acid into said host cell.

14. A method of transforming a host cell which comprises contacting a host cell with a vector construct according to claim 6.

15. A method of modulating transcription and/or translation of a nucleic acid in a host cell comprising:
a) providing the host cell of claim 9; and
b) culturing said host cell under conditions that permit transcription or translation.

16. A method for detecting a nucleic acid in a sample which comprises:
a) providing an isolated nucleic acid molecule according to claim 1;
b) contacting said isolated nucleic acid molecule with a sample under conditions which permit a comparison of the sequence of said isolated nucleic acid molecule with the sequence of DNA in said sample; and
c) analyzing the result of said comparison.

17. A plant or cell of a plant which comprises a nucleic: acid molecule according to claim 1 which is exogenous or heterologous to said plant or plant cell.

18. A plant or cell of a plant which comprises a vector construct according to claim 6.

19. A plant which has been regenerated from a plant cell according to claim 17.

20. A plant which has been regenerated from a plant cell according to claim 18.

The application's sequence listing, which the Patent Office published only in electronic form, follows.

SEQUENCE LISTING (200512 sequences)

SEQ ID NO: 1 - DNA, 960 bp, Unknown
  misc_feature (1)..( 960): cDNA_ID_1691857_gDNA_ID_52_Annot_ID_144096 3000 nt of promoter + ATG
aactacttccataaatcagctccttgtaatttacaaatgtatcctgctaaattccaagatcttacccactaggtaagggtaataaagtaaaattggcttcacacgtgagtaagtaagttccagttggaagatctaaaaacatgtggaagaatgtgagagataggacagatggaggactttgcttgaaagcaaggaacccacaatcttacagttacagccttttcacattttcttactgtcagttacatttgtctgtactttataatcgttctatttctttctatatttatctctttccaaaacaatttttacattgttttcttaacgcagcttttagcttattttgggtaatggattaataaaatgcagtttcatttgttgtcacacacgcaaaagaagtcaaacgcagtttttttttttggcagcttgtcaaacgcagtttctacaattagaattctcttatgtgtcttttaaacgtcaaaatcaaaactaattaaaaacaaaaattgatatcgttcggttaaaatttatgtttggtgaatattactaaattaacacaaacacaaaattctgatttttccttagtttgttttcttttgttaaagttttccttaaattgtttgtttaatctttatgtcaagtttggtaacaatcatctttcaaatattggtactgtaccatataagctggtaccaatgttataacaaacaaccgttgtttatgaatatttttgagtatgaaatttaatttcactatagatttacagcagattaacacgtttatttgattacggagtttgtatgtacttcagactattgtggggtaataacataaaaataaaaaaataagggggcatatttgtgattctacaaactacccatcactaaaccacattaaactctctctctccctctctcttctctaaagagattcgaagaaatttacagagagacaaaaatg

SEQ ID NO: 2 - DNA, 850 bp, Unknown
  misc_feature (1)..( 850): cDNA_ID_3048054_gDNA_ID_104_Annot_ID_143898 3000 nt of promoter + ATG
ttttcccttttttttttttttggttaatatctaaaaacttgttgcaaaatgcgttaaaaacaggacgatgtagatgaaactgacctgaggaaaatggaagaagcaagattagcttatgtagcagcagtgaataccgcaaaggaacgagaagatgaagaatctctggtcatggctgctcaagctcgagcttacctgcaatcactagcctttacatattaatcatcttcaggtacttacttctttataggatatttctctccttgggttgttttaggagtatgtagatttgtaccatgaagaaattggagaagaaaagcttatgtgagaaacataacgttatggttttcccctaaaccaatgaacgcaactctgagtttttgtttcttcatttgagcatgtatgtatctatatgatcttctacattattgggaacataaaatcagattgtataatgcatctgttcaatagtttactttagatatactcttaacaaggaaatctatcaactttggaatctaaagcagccatacttgttcaacttgaaatcgtggaatgatgaatttgggcttaattagctaacaaaatatagtttgggctcacattgaattccttttaataaggtaaggtctttttagtgataatcttaatctaataatagttcacacgggtgggaaaaaatacaaaataataataatatttcacacgtgcagaattcggctgtgtcaaaaattccgcgccattagcccatcgatacgaagtcgagttcaaagcccaacaaagttttaaaactatatatacattaaaaagttctttctttgttaatggaaggaaaaagtaaaatccggtaatg

SEQ ID NO: 3 - DNA, 2024 bp, Unknown
  misc_feature (1)..( 2024): cDNA_ID_1596316_gDNA_ID_141_Annot_ID_143938 3000 nt of promoter + ATG
  misc_feature (20)..(20): n is a, c, g, or t
  misc_feature (391)..(391): n is a, c, g, or t
  misc_feature (587)..(587): n is a, c, g, or t
  misc_feature (709)..(709): n is a, c, g, or t
  misc_feature (1094)..(1094): n is a, c, g, or t
  misc_feature (1306)..(1307): n is a, c, g, or t
  misc_feature (1309)..(1309): n is a, c, g, or t
  misc_feature (1336)..(1336): n is a, c, g, or t
  misc_feature (1727)..(1727): n is a, c, g, or t
  misc_feature (1864)..(1864): n is a, c, g, or t
  misc_feature (1967)..(1967): n is a, c, g, or t
ttctatctctgttatgctgnaatacgtagttgtgagcttctcggggatcagaatggtattggcgttagatatatagaattctcagtcaaatactagattctggggagttatcttcactttgatgttcctttggatagtggctagagtatatgagtgaatgttgttttacttttgacatcttctgagcagttacatcttgaatctgataagctactctattatatgatatcatatggtactgctttttgcatcatgagaacatacattttaccagtgttatttgtaggtccaacatttaggtgtaactgattctaacttctgcagtatgatcattcggaatgctgtaaatactgaaagctcttgatataatttttcagttaagctagaattncgaattgatggggtattcgacgtggtgatgcatggaagcgtttcaggatatcttctagtaaatgctgaggttgattccatgggaggagttatcgatagtggaggtggtattggtgttaaaacatctccgcgccgaacagctattgagaaggctcaagcggagctaaggtatttcagattgagacatcttgatcttnctgcagtgtgtttaaatgctctataatttctacagctttctattatttccaatgtgtaacaaagatgcttatttcaacaggcaagagtatgatgttcgtgaggaaaggaggagagaattggnagtttctagagaaagtatgaatacctatttccctgttctataattgttttgtgtgtgtgtgtgtaagaacttatgatgacaagcctttactcttctatctgcttcagggcggtaatcccttggatttcaagtttggtattgcaacttcacatagcgtccaatctacatcactcacagatcagcaagcagagcattttgtaaacaggtacattcgtgtttggtgtagttcccacattaatttcatggaataactcatcattatttgcccataacccccacagtgaagtcaaagatagttttgccctgactgcctcaccacatggtgactcggtggagagtagcggtagacctggagttcctacaatttctgaacccaatacagcangataatcttttactgtttgattctgaaaacaagtcagttgaaggggaaagaaatttgagacatcctaataggcaaaacagaacttctgagtcagaacgatcttccaaagcacacaccaaccagaataccaaagaaacagaagattctgccatctttcgcccgtatgctcggaggaacagatcgaagataagtcgggatccagcacggtcaanncntctacggatttagttcagaatcgtggntggtcttgcaacgtctatatctattcgcagaggatcagtggaaggaaagggttgcattcccgaagcagccaatcaaaaggatatgcatacaacttctgtatcttgtccagtatttgcaaattcaaatggtaatatcgttccgaaaaatagagtttccagcaattcgctgaatactaaggtggatggtgaacctgttgtacgagagagtactgctggatccaagactagtctattgaaagatgaagccgacatttcatatagtaaaagctctgcatatttgccagttggagagtctggccttgctggggagaaggcacaactagtttcgactggtggttctcccaaagctgcaacaatagctggccagaaaaatagttctacccaactgaantggcctaagagattccacggtagaggaagaaagcttaacaaatagaggagctacagggactaatgggttagagtcagagtcttctcatgcgaacaacgtagaagtaaatgtagataatgaaagagatctttataaangtggacaaacttgactctgatgaaatctctatgcagaagactttgagagtagaggggttactagatcaaacagttggtgaaatgaccaaaactaagattgaangatgagacaggtcaatctaccaccattatcagtgagtgcattcctgaatgtgaaatg

SEQ ID NO: 4 - DNA, 9 bp, Unknown
  misc_feature (1)..( 9): cDNA_ID_3046512_gDNA_ID_147_Annot_ID_143949 3000 nt of promoter + ATG
agtttcatg

SEQ ID NO: 5 - DNA, 129 bp, Unknown
  misc_feature (1)..( 129): cDNA_ID_1010524_gDNA_ID_209_Annot_ID_144003 3000 nt of promoter + ATG
tcttctccgttcgaaatcgcatccatcgccgtcgtcgtcggtgacgaaaaccaccgcgtaaaaccgtttcctaaatcagatgttcaatcttagaagtatctcttagaagctctcttgtatgaaaaaatg

SEQ ID NO: 6 - DNA, 1032 bp, Unknown
  misc_feature (1)..( 1032): cDNA_ID_1597245_gDNA_ID_226_Annot_ID_144017 3000 nt of promoter + ATG
  misc_feature (69)..(69): n is a, c, g, or t
  misc_feature (369)..(369): n is a, c, g, or t
  misc_feature (450)..(450): n is a, c, g, or t
  misc_feature (604)..(604): n is a, c, g, or t
  misc_feature (606)..(607): n is a, c, g, or t
  misc_feature (609)..(609): n is a, c, g, or t
  misc_feature (802)..(802): n is a, c, g, or t
  misc_feature (805)..(805): n is a, c, g, or t
aatatcaggtcgagtaacaagaaagaattgcagaaacctaagcaacagatgacaagatgcagtaaccancagtagagtaaccaataaattcaataagataaagaattcccgaggatggggtaattgagtagtttcgtttcctcagtttacaggtgattgacatgctcaataaattatccctagacaacaagttctttaaccaaatctaagttccaccgcaacagagaccctcaagttaacctagtcccagactcaatcaccattgacgagagctaacctaacaaatattacgaatcaacaagttaaagccaaaacgctccctgcaaccaataccttggtacaaggccacaaatctctggaattagtggnttcatacatttcatcaaacaccttttgggcgcggaaatgtctgggctcaaattccagttgatcagaaagcaataggcattnaagaacaactaatccagaagggatctatcaatcaaactcaactacccagcatactgagaattctaaactactctaacccatcctcagatacctatgcactactcagacatcattggagaaaacataaacgttgaatggaatgaaaacatgatancnncnagagtaatagcaagatggtaacaagatgaaaaacagtaaacgaaatcaagaacaaatactcaatactgaatagataaagggaaattcggattacaaaaggtcaagcacacagtgtctgcgaaataaaacttagataaaaacttgttcacaaaaatgtaaagtacatgctagttatagcaaaatattctgaaanccntaatactcaaaacgacgcaatattgagacgaattaagaactgtactccacccaggttgtcgagtgagaggtcgagtgataagctggagtcttcttttcttccttgtgctcgagtgtctggttgagtgcgaaatgaagaagactctaaagctggcagtcgagtatgtagtcgagtgatagagatgttggtactcggcttggtggtaaagtgatcgagtgaaggtgatg

SEQ ID NO: 7 - DNA, 115 bp, Unknown
  misc_feature (1)..( 115): cDNA_ID_3046422_gDNA_ID_268_Annot_ID_144055 3000 nt of promoter + ATG
aatattcaaatctcgatattgacaggtttgccctcgtcctttgcctataaatttgacatgatctacgttcattcaaacaaaaaccaagccacaaagaaattaaatacacacaatg

SEQ ID NO: 8 - DNA, 1189 bp, Unknown
  misc_feature (1)..( 1189): cDNA_ID_2991145_gDNA_ID_371_Annot_ID_144333 3000 nt of promoter + ATG
attgatgatacatacactgtttttcatacgcaagacttttctagctagtactctaatccatgatttgcactttatttaaagatatatgaaaatatttattagctttggaaatgagttcactgatattctttgatgcatgattgggttcacgggtctatagttgatatggcagcccacacacgtatatgtttgcaaatggtactatagaaaactgaatccaaaaagtgtgaaactactttggttgtatttcattcccgttttaaatctgtcgaagctatattcattcagaagtaataaagcttaacattaatccaaaaagcagtcgcattagacattcccatcctcacggtagcgttagaaagactggaatggagcacaacaagcagatgagatgacctacacgaaggagtacgttgacccaaaacctgtaatgaatttacgttaatttttgtgttatagacgaggttttatgacgttgtaagattttgaatacaaagaggtagtggagttttgacccattaagcacaagatttttcttagaaaacaaaaaggttaccgcaagtaagtcaatacctgaagaataaaatacttgaaagaaaaacctaagaagagtgagtattcattttaagacgaaaatagaagctgattcaatgtatgtgtcatgttgtggtggaccctaaaacaatattaaccgcgcaaaatttccgaatggtagtatagctaaccgttgaaccgtatgctactatgctttcattcactaaagaattatggtttacgtcccatgcggttcaaacacggtatatacatatctggtcatattttgtgaaaccgggtttgaacaactcaccaatacaatagtactacaattcaaattaaatttttctttttgtaattaaacttcattttggtataattaaagaaaaaaaatgtttccttttgttgaccgatacaatgactgtatattcaaaaaattacttttagacatccaaattatattttcatctatcaattacaatattatgaaaattatatatttacagatgctaaatcaaaaacggtacgtttcaccttaaaccctaaccctccgaatcagctagagagacaccagcccttctattaaaagttaaaacccttccctctttacttctccgatagctttttattttcctcgtttttgcgccgaccaatg

SEQ ID NO: 9 - DNA, 201 bp, Unknown
  misc_feature (1)..( 201): cDNA_ID_3014692_gDNA_ID_524_Annot_ID_144467 3000 nt of promoter + ATG
aagtcgtttgattgtaatgacgaaggatttactttcctaaaataaacgatcatgctcacctctactatacatattcttcagatactcataatcttcttttctttcaacaatcttttattagtttattatgttttcataagttacgcttgtaatcttcgtcctcttccttgaactccaagattcaaacatattttctttatg

SEQ ID NO: 10 - DNA, 196 bp, Unknown
  misc_feature (1)..( 196): cDNA_ID_1686587_gDNA_ID_546_Annot_ID_144103 3000 nt of promoter + ATG
gttatccgagtagtagttaccatcaaacaaactataactgatttaatgagccattcgcagtttcacagtctgaattcgttcatacttacacatgcatggcttaatctttgagacaagcatatgactactggcaggatcaaccaggtagcattcatcgatcacggcaattccccgccacatcctctcaaacgcaatg

SEQ ID NO: 11 - DNA, 781 bp, Unknown
  misc_feature (1)..( 781): cDNA_ID_2141597_gDNA_ID_604_Annot_ID_144143 3000 nt of promoter + ATG
taaaaaaaaaaaaaaatatcaaagcttatatcaaacgaacgtttcgcttgatgtacaaacgataatgtttttttaatttaatttaatattagattcagaaaagaaaaaaaaaagaacgttccaatactcaaaaagaattgcattggaattatctctctgtttatcccaatactcaagctctaggttgtattctaatttaagtgttaaaggtccaccggtgtcttcagtgacgtatacgaccgtggtacatgtttgtttacttcacatgagccaatataccgcaatctcccaaaaataaacgcaagatgataaaccacaaaattttacatgaatagtaaatcaaattaaagagtactttttatttcaaggtaaacagtacttgttattcagactttagtaatatgtaaagcaatattttcataggatcaaatatataaactagtaagtcatagtaattgcctaattggtacttttaagtctttcaaacaataaattaatatagtacattccgaactataaacatattatgaaaaagtttaattaaaattaattaattaattgagggtttgcaaaaaaaaaggttcaacctccacccaatttcatcactttagacagcaaattattttaaatgaaacaataaattcatatatctgtcttctactataaattaccctctctctctctcttatcatcatcatcaatttatataaccctctcaaaacacacaattttaagattcaaataaaattccttcttcaacattcaccaccacaacatcatg

SEQ ID NO: 12 - DNA, 689 bp, Unknown
  misc_feature (1)..( 689): cDNA_ID_3014674_gDNA_ID_649_Annot_ID_144481 3000 nt of promoter + ATG
aaacacacgctaacaattctttttttttcctctcacattttatttttttaataattaaaaaaataaatgttacggcatggttatatcatatattttaatttcatggaggatattagattgttcccattttctattgatcatattagattaaataattagaaaatactatttttctgtctctattgtagtggtatgtatgattggagagttgatgaaaatgtaagcaagtaaaatcatcgtgcagatcgcgatgctatgtttattatcatatatgcttaaaggatcatttgagattaataccgcaatcagcgggtgagtaagaaacttaaaacacataactactctctttgtcaatggaagaccctcttaagcatctaacacatgattcgtctacacaaccatttaactctaattatatcccctaattgatattaattaaatcaagaggacaaaaaaaattaaatcacttataaatattaattttatagatgtatattttaaaaaagagaaaaaagaaaagaaatgggaggaagacactgggacgaaagacgacgtcatctattgttagtaagtttagcccaatcgtgttctctctgcgcttgtctcccaaattctcagatctaatcagatcgacgattcctgatttcatcagcttcgagagagatccttcttttgttcttcgttgaatg

SEQ ID NO: 13 - DNA, 50 bp, Unknown
  misc_feature (1)..( 50): cDNA_ID_3014688_gDNA_ID_654_Annot_ID_144488 3000 nt of promoter + ATG
tacactcttcttcttcttcttcttctcactgtaaaaaagaaaaaaaaatg

SEQ ID NO: 14 - DNA, 378 bp, Unknown
  misc_feature (1)..( 378): cDNA_ID_3014701_gDNA_ID_655_Annot_ID_144493 3000 nt of promoter + ATG
  misc_feature (356)..(356): n is a, c, g, or t
accaccgaaaacaaactcagcttcttcttagctaagcaggcttaaggggcggctggacttatctaataataaaaatttgagtatctaaacgaataaattggagatattcttttagtgttatcctaattatagttataaaacaattataaccttagaaagtttcttggaaatttaatggtaatttcattaccgtaaatagtttttctttcttcttcacgttttttttttttgtttttgtcaaaactttcttttctcttttctctataaaaactaaaaaggcaaactttcctcccttttttgggtacacttgcccaaatgctcctctcagggctcaaattaaaggggggaaaaacagncaataaaatattaaaaatcatg

SEQ ID NO: 15 - DNA, 989 bp, Unknown
  misc_feature (1)..( 989): cDNA_ID_1665243_gDNA_ID_703_Annot_ID_144503 3000 nt of promoter + ATG
gtttcttgatcttgatattgttgttggacacatcatttttgtaaaatctgtgcttgttcagtctcaaaatatgttcgaacatttgggttttgaaagaaattcaaatcacaaaataatttttttttcttcttttatttgatcatatgtgggaaaaatactctaatggtgttgtttaaaatataatttgtaatgttttattattgttatatgatgtaatgttttttatatataattagtgtttaatttaaataatatcatattgtatgagaattttgcaaaactataatatatatgatcaaattgtaaattatataattaaaaagtactagtatataaaatataaatataatattgttaaaaatattcttttttatagtagaaaatagaaaaatacattagaattaccctattttatagtaaaatatagagctacaagatggtctaacccaacaaaattagtgttactttagtagttctttatttatttcacatggctaattattttcttatagttcattaaagagtactttattttgttaaactttaattaaagagtactttatttttgtaattaatatatatgaactggaaaataattagccataaagatcaatctatgccattaaaatgctctgacaggttccgacttgtttctcttgtcaacgcccaaattcgactttttttttgtttcccttaacaaaccaaatttcactgtttcattcttttacgcgtcgagagtcttctccatgagaagcaaattctcagcttcttccgatgatctagcttcacttagatctcatgtaagtttgtttatctcccgatctgattttctgtctctctaacgttgttgttgattgatcatgagattttgcatttacccaattcgtttcaggaactgatttggcgagtttgatgataaagtttgtatttttctttgtgggttgatttcaaattgtgagaaagattcaagattttttgtcgtctcaatg

SEQ ID NO: 16 - DNA, 129 bp, Unknown; identical to SEQ ID NO: 5
  misc_feature (1)..( 129): cDNA_ID_1010524_gDNA_ID_727_Annot_ID_144201 3000 nt of promoter + ATG

SEQ ID NO: 17 - DNA, 3 bp, Unknown
  misc_feature (1)..( 3): cDNA_ID_1585658_gDNA_ID_782_Annot_ID_144518 3000 nt of promoter + ATG
tgg

SEQ ID NO: 18 - DNA, 12 bp, Unknown
  misc_feature (1)..( 12): cDNA_ID_1027574_gDNA_ID_798_Annot_ID_144524 3000 nt of promoter + ATG
gcttttgaaatg

SEQ ID NO: 19 - DNA, 3 bp, Unknown
  misc_feature (1)..( 3): cDNA_ID_4254807_gDNA_ID_811_Annot_ID_144527 3000 nt of promoter + ATG
aag

SEQ ID NO: 20 - DNA, 742 bp, Unknown
  misc_feature (1)..( 742): cDNA_ID_1685621_gDNA_ID_813_Annot_ID_144531 3000 nt of promoter + ATG
caggttatgtataagttataacagttgcccttcttttctctctcacattcttaaaccagaccaaacattctcatgcagtttcagagcgggctatcatcacctttggtaataaacggtgttcaagaaaaccatttaatctcatggcttcctattaacaataaccagcaaatgatcatacctgctgactcaagttttcatcctcatccgtgagtgaaaactgttaatgcacttaataattaatatgctttggacttatatgctatattcaattgaaagttttatgatcagcagaaagatgaaaccggtttttgagttctggttaaacattagttttgagtaactgtagcaatgtgcacgctagttttcttgtatatacagtgtacctgtctacgtatgtgtgaacctacatgatattcagcagatttgtatatatctttgtgtcagtgtgtgtattgtataatacaacactagtgaataaaaaagaagagttttaattgtgatgagcatcatctgatgtctccaactcaaaaggcttatttccacaatcaacggtagagatctaaagataatgagaaaatttgcacaatcttctttaatatcgatatcttcttccacgataatcttacagatccagaagaagatcacacatggtttttgtataaattagacaaagctttacttgcagaacagagcagaaacagaacatatattctctgtcttttttttgtggcaaaagtaaatg

SEQ ID NO: 21 - DNA, 646 bp, Unknown
  misc_feature (1)..( 646): cDNA_ID_1573308_gDNA_ID_818_Annot_ID_144538 3000 nt of promoter + ATG
  misc_feature (199)..(199): n is a, c, g, or t
tgttctttgagtattaatatatatgattatatgtggtatgtttagaaaaaaacaaaaaaccaaatatcaaacctaaacttattaaaagtaaagacacatttgattaaattctaaaccaaaaacgtacaaaactattcgcttatgatgatattatttatcataaccaaaactttcctaaactggtcgtcttctcacgtcnggtttactactacttcggattgaagaattttgatcgtctcgttgctaactccacgatgtctttctgacgcttaatcttctgacagaagacaaagacatagcataaaaaagtaagcacagaacataaacggatgtttattcttttctagacggtatatttatataataacgaatcacttatcaaaaagctggagtagctcagttggttagagcgtgtggctgttaaccacaaggtcagaggttcgacccctctctctagcgtttcttttccttttgtatttttaagatttaaaaacatttttccacggctacaaaagaacattctcgacacacataaaaaaattcgaaatttccagaactctcttgtgccttcttcttcatcttcctctgtttttaaaaatgcaatcaagcagattctcacgatacctaaaccaaatccaattcaatg

SEQ ID NO: 22 - DNA, 823 bp, Unknown
  misc_feature (1)..( 823): cDNA_ID_3046082_gDNA_ID_884_Annot_ID_144617 3000 nt of promoter + ATG
ttccatcttccacagttagtaaacaaaactgttactgtattttataagatcatctttaccattaatagtgtgaaacaaattaaaagacaaagtcacaactagataacaaccatattatatgcatttgggaaaaccttatcttatcttatcaaaaacagcaaaatatccccaattgaatcagtatagtgaatccagatcttcccaatttcatagttaaagacaaatgaaatgtcattttgtgtgattgtgatattaatcattcacatattaacatcattctcatcccatcgttaatccattacattttattgtatagatttgacacacaaaacaaaacaaaatgcatgcaaagacaattagtaaaacaacaactttttttgatctaacatcatgaataacatttggcatgacaacagaaattttatagtttcgataataatacagtaatactcatagttttatgattctgactgaatcgccaattgtttttcattaaagagaaaaatactatggtaaggaactaaggatccatgtggtaatcgaagagtcgtcgatcacgtgcaacacacgtgttaagtcagctcgtagttgattcttcccccttgacggtcatctcatcggacggttgagatcagccaactttaagtgtatcacacggaaaagggaaatgtagcgcgagaaagtcaaaagatccaacggtcgatatgaaacaaaagtcagataatcgtacggtagaaacgaagctatatatagcaacaattggattattcttatcatcatcactctctgagatcgaagagaaagcaaaatcaaagttgtgatg

SEQ ID NO: 23 - DNA, 391 bp, Unknown
  misc_feature (1)..( 391): cDNA_ID_3013768_gDNA_ID_898_Annot_ID_144628 3000 nt of promoter + ATG
caaattccatggtttgccaatagaggatccactcgaccactttgatgaattcgataggctttgcaacctaacaaagatcaatggtgtcagtgaagacggattcaagctccgtttgtttccattctccttgggagacaaagcacacatctgggagaagaatctgccccatgactcaatcaccacctgggatgattgtaagcaggcttttttgtcaaagttcttctccaatgccagaactgcaagactcagaaatgagatttctggtttctcacagaagactggtgaaagcttctttgaagcatgggagcgtttcaagggttacaccaaccaatgaactaaagcctctctgctcagcactctttacagaggagtcttaccacgcatcagaatg

SEQ ID NO: 24 - DNA, 117 bp, Unknown
  misc_feature (1)..( 117): cDNA_ID_3015042_gDNA_ID_911_Annot_ID_144641 3000 nt of promoter + ATG
  misc_feature (66)..(66): n is a, c, g, or t
tcatacttacacatgcatggcttaatctttgagacaagcatatgactactggcaggatcaaccagntagcattcatcgatcacggcaattccccgccacatcctctcaaacgcaatg

SEQ ID NO: 25 - DNA, 276 bp, Unknown
  misc_feature (1)..( 276): cDNA_ID_3014074_gDNA_ID_989_Annot_ID_144724 3000 nt of promoter + ATG
aagaaaccaaacatcaaccactacggattttttgatgcattggatatgcaaaggtagagaaaccactcctaaaaaatttagatgacatattgcgtatgttggttcacttaggaacggaaccgggatcaaaggcataccgattacttaatccacaagtaaggaagatagtcgtacgtagggacgttgtatttgatgaaacaaaacggtggaattggcaccatattaattcggaacaagaacaagatgaaggtttcagctttgcgttcggagaatatg

SEQ ID NO: 26 - DNA, 3000 bp, Unknown
  misc_feature (1)..( 3000): cDNA_ID_1585796_gDNA_ID_1007_Annot_ID_144573 3000 nt of promoter + ATG
  misc_feature (2208)..(2208): n is a, c, g, or t
catggtcctaaaagcccatttgacatccttacatgttcttcatctgttggaacccaatcatattcgagtcacccgtcatctgtcacctcttcctctagttttccctcgaggaaaatatctggtatcgtttcaacgagttgaggcagatcatcaaatggatcgtcaagaatatatgtgtgctgtattattatgtttttaaagggatcaacagaaactttggctatcctagttagagtgtcaaacccctcggcagtctccccatacacctgaaaaagggcctagtaatttgatatatacacaaaacaaagaataggtagatcattaataactagcacttacattgcgttttcgatcgacatggtctagaccatcactaagtgtaatatagaattaaaaatgaattaaacaaatgacataagactcggcttttacagattttttgagatggtcgttggtctggtttgcttcattatttttctcagttcttaggatcgattgcctacaattctagtttttgtttgatctttcattttttttaaagttccacaattcttagttgttatggtctttttgtgccatgtattgtatcaagtgcttcttgtgtatagtgatttagttttcgagaattttttgtttccgcagatattagtatttcaaaaacgtattgatatccattatttcacccctaatttatataatcaaaaattcaattaaaaaaaatatggtgtgtatcgccaacgtagaatttcaatatatataatattacagtctttttttccgcacataatattacagtttctacttaagttaatgatatgaattatttaggtatttatataaaatatttaattatatttttacacactaaaaacaaataatgttaattattaattattattatattaatctttaaatgatacatgaataaacgagacaatgagtaaataatatattttggaaaattgagacaaaaagggacaggacaaaaggaagctgtgcaccgccaactggaccgtggctgtagtcttctaccttccactgtcatagaaacagaataatactctttgttctttgcttcttccatggaaactctccacttactagaaataaataaacctacttttcgttaataacttaggccaaaacaaagattaattatatcaaaattttactagttaattaactttaaaatatactttttaattaggttaaaacgttctttagttgaaatttgcaagtgattagttatattagcttcaactaatggaaacatctcacaatttgtcaaaaactcgtttagaaaacaaattgaagtctagtagccttattttacgtggaatagactttatatatggtaataaaaattataaatattcttgcaatgaattttattttttctgttgactttctcaaatttgagtactgatttgatttgttgcacaaaaaaaaaagagtacttatttctgaattttgaaatcatcttagaatgtataattgtattattaaagtttttgagttttttttgtgaaaataaagtttttgagttaattgtgatcatacatgtatctatgtgtaatcttaaaactatctaatcatattcactactttctttttttatatttatcaaccagaaattaaattaagtaaataaccattaaattaagtacaatagaaagttatgttttcagattttcttgtgatgtttgtcggtgcttcaaattttttctcttctttgaaaaattgataattatatagttttctgactttttcttgtttgtcggtagaataagagaattcggatgagtaataatggatgactataaggttaattcgttcattttacattagcaaatgcattagtactcatgatagtagtttaagtatcatatgaaagttacacaacaactaagctgtttttataacttgaaaatatcataacactattcaatgtttaacaaacggagccggactccatttgcaatcttttaaagtaaaactagaggatcatattctcaatattaaaattaattttaatattccaacaatgactctttgtgatttgccatctcaacaatgaccgacaatttataatttattttagttaatgtcgtttatcaaaataaaatatcattctttcttgttaacattaattagcagtttcgaagtaatatagaaagacgaaattgtgaacttcacatttttgtaacnggtaccaaagtagataagacttcttttacacatctacttaagttccatatatctcttcttctaattactacactaaaatataaaaagaaaaacttaactatcaagcaactaaaagaatgaaaagtatttgtacattgtacatgaggctagatggattagagatccatgttgcaattcaataatggcattcctcaaattagctttccaaactttcatttatgttatttggaaagaacataatcgcaggttttattctcgaataactagatttctatcggcttgattatatatatcaaaaacaccattcgttactagctaaagccttaatagttacctattagatcaattgacttagaaaatcttagaatatgttataaatttggtttatttttatgttttacgggcgaattttttttgttttttataattgcttgatttttaaaaaatgttgtatttttttaatgaaaaaaacaaattactaaccgatttcttgtccaatttttcagaaaataatttttaagttgagaaatttactaaaaatataaaaactactaaatatattaatttaagactaattttaaagacaataataattataaaattgattaatgacgtacgcgtttgtgtaaatttaccaaaccatacccttcaaaaacccaaccacaaaatttgacaaactcatcgtttaacaaacatttcactttcctcttctcccaccattttcagagctcagagaaaaagaaagaaagaaaaaaagcttcgtgctccttcaccttcccaaatcggaaaaca

SEQ ID NO: 27 - DNA, 45 bp, Unknown
  misc_feature (1)..( 45): cDNA_ID_1663391_gDNA_ID_1067_Annot_ID_144765 3000 nt of promoter + ATG
catgtatatatatctgtgtatttgttccagagcttagctaagatg

SEQ ID NO: 28 - DNA, 209 bp, Unknown
  misc_feature (1)..( 209): cDNA_ID_3013115_gDNA_ID_1087_Annot_ID_144787 3000 nt of promoter + ATG
tttcaagtccggacataggaaatagtcgtggttcgtcacctgattctcatttgatgggaaacaaattgcagaacgagagaaacagttcacattactttctttctgagatcaagaggaaactaaaacatgcaatcaaaaaggagcaaccggccgggggatttggggaagggtttccgaaaactaaagatcatttctttctcgagcggatg

SEQ ID NO: 29 - DNA, 389 bp, Unknown
  misc_feature (1)..( 389): cDNA_ID_1596343_gDNA_ID_1174_Annot_ID_144854 3000 nt of promoter + ATG
gcttactgttattttgcatgataatttaaacaggctctgaatatatatcagatggaatatatctctctctaccctcttactttgtcatacggtaaatagtgataaaattgtttttgtctagatgcctctaatctgcacatactttttctgtatatgataagaactgtattggagattagtaaacgggaaaggtctaggataaaagttacggcgtcaatgattttcattttcaatgtcaatgttttagactaaaactatgaaagagagaataagaggtacctcctttaggtttgttttcctatttatccaggttttgttgtcctgaaaattggttttcccgtctctttcatgttccttagggtctctttcatgttccttaggaagcaatg

SEQ ID NO: 30 - DNA, 50 bp, Unknown
  misc_feature (1)..( 50): cDNA_ID_3077584_gDNA_ID_1200_Annot_ID_144876 3000 nt of promoter + ATG
  misc_feature (24)..(24): n is a, c, g, or t
ggagactgtgaaagcggattcatnatgcttttggagaaacgaatttgatg

SEQ ID NO: 31 - DNA, 133 bp, Unknown
  misc_feature (1)..( 133): cDNA_ID_1387605_gDNA_ID_1201_Annot_ID_144877 3000 nt of promoter + ATG
  misc_feature (16)..(16): n is a, c, g, or t
  misc_feature (26)..(26): n is a, c, g, or t
  misc_feature (41)..(41): n is a, c, g, or t
  misc_feature (60)..(60): n is a, c, g, or t
  misc_feature (67)..(67): n is a, c, g, or t
  misc_feature (74)..(74): n is a, c, g, or t
  misc_feature (86)..(86): n is a, c, g, or t
  misc_feature (111)..(111): n is a, c, g, or t
aacacatcactttggncctacttagnacttacctgcccctntcgacaaaatttcttctgnactttcncatttcnctgtaataaacncggtaggtttgcgaaaacctcgccnccgggaaaaaaaaaaatcaatg

SEQ ID NO: 32 - DNA, 209 bp, Unknown
  misc_feature (1)..( 209): cDNA_ID_2994649_gDNA_ID_1291_Annot_ID_144955 3000 nt of promoter + ATG
ctgaagttaaaggcatccctgtttgccaagctttggacatagaaattccgcctcctcgtcctaaacgaaaacccaatactccttatcctcgaaaacctgggaacaacggtacatcttcctctcaagtatcatcagcaaaagatgcaaaacttgtttcatcggcctcttcttcacagttgaatcaggcgttcttggatttggaaaaaatg

SEQ ID NO: 33 - DNA, 3 bp, Unknown
  misc_feature (1)..( 3): cDNA_ID_2994649_gDNA_ID_1292_Annot_ID_144956 3000 nt of promoter + ATG
gct

SEQ ID NO: 34 - DNA, 868 bp, Unknown
  misc_feature (1)..( 868): cDNA_ID_1586207_gDNA_ID_1303_Annot_ID_144969 3000 nt of promoter + ATG
acaattactctgacacatcaaatcagctaaaacctaactaaatataccaaactagcaacacatatttttgttattaaaagcatttataatgataaatcatgatcagaatcatagtaagcagattcgaacactagtctctcaaatttcggtagtaaagttttcaaccattagaagacaaatacgattttaacatcattagtattgttttttcttttttaatttaagcgttggctttccaaaatgaaatagtaacaagcattaacgagttaagttgtcaatgggggaagttaaaactctttacaaccaaaaaattgaccacacaacacatatagtgcccactagttctctcaaacgaatatggaatactttaaaacccacctctattctcaagaattaaagcccagaatttcaacgttctaaaaatagttttgaaagatttgtttttcacgggtttttcgtaaaataattatgaacaaaacaaataaattcaaactaatttttacacgtacaaatctgactcctagcctcctagatgaaattcaaaattttgtaccagcagctcaaagctactaggtaaaaaatgtcacgagagaaaaccggagaatattggtggttcatcaatacgaatcaaaccgaaccaagtcataaaccggttcatagaaagataagaagacagacaatcaatagtcatcactttggtctcgttgagcctttcgtccatatctcacctgaaggaaagacgttcagctttctctttccaaaatcaaaagctctccgatcagtttctccggcttaggaaattagttgaaggaaggtgatgagaggtactactgagaatacggatctgttcgatcccaaaacccaaatg

SEQ ID NO: 35 - DNA, 58 bp, Unknown
  misc_feature (1)..( 58): cDNA_ID_1596332_gDNA_ID_1330_Annot_ID_144987 3000 nt of promoter + ATG
cagtgttgttatatagaggagaatctggaatcacaagtagttttattcgatctgaatg

SEQ ID NO: 36 - DNA, 5 bp, Unknown
  misc_feature (1)..( 5): cDNA_ID_1586187_gDNA_ID_1336_Annot_ID_144994 3000 nt of promoter + ATG
ttatg

SEQ ID NO: 37 - DNA, 7 bp, Unknown
  misc_feature (1)..( 7): cDNA_ID_1016386_gDNA_ID_1421_Annot_ID_145056 3000 nt of promoter + ATG
tggcatg

SEQ ID NO: 38 - DNA, 214 bp, Unknown
  misc_feature (1)..( 214): cDNA_ID_3013870_gDNA_ID_1466_Annot_ID_145090 3000 nt of promoter + ATG
aaacacttatctttaattttggcttcaacttttcaaaggcacataatgatcacactgtactgtatcatcttatctcataaatgagaaactcgaccataagaactgtctatagtgtcagaaaagttatcaatagttcaatactaagaaaccggcctatatatatatttgtggtcactaatttctccaaaaaccagttgccttccgtaaaaagatg

SEQ ID NO: 39 - DNA, 344 bp, Unknown
  misc_feature (1)..( 344): cDNA_ID_1033925_gDNA_ID_1507_Annot_ID_145123 3000 nt of promoter + ATG
  misc_feature (154)..(154): n is a, c, g, or t
  misc_feature (223)..(223): n is a, c, g, or t
aatatatcatgctattttaaacaaatacatataaactttataactaaagctaatgctattttctgacacaagatcattctctcaattcttttccatttcatagttagtttgtaatattaccctaaaaggaaaaagaaaaagaaaagggcaaaanccctaaaaattcaataaaacggtaatagcaatcaactccttaatctcttaatgatttataaaacgtacngaaacaaaacttaattattataactagcccctatagttattttaaataaatatctgtctaataaatttgaccaaacccttaagatctaattttctctgtttgatttgtcctctcaacaatg

SEQ ID NO: 40 - DNA, 276 bp, Unknown
  misc_feature (1)..( 276): cDNA_ID_4254289_gDNA_ID_1522_Annot_ID_145137 3000 nt of promoter + ATG
  misc_feature (149)..(149): n is a, c, g, or t
catcaatatatgctaaaccgaaccgagactgccccacataaaattgaattgaaccaaaggtttttaatttttacttcaacatagcgaataagaaaaagagggtatatattcattattcaattattcaatgttaatgagaaggcgtctgngtttggttcgacacctcaaaacttgttttgcctttagcatctccgagtaaggaatccaggtccaaagcctcttctcttcctcctcctcgcttccttctcacgcaaccttggatccaccgcagctatg

SEQ ID NO: 41 - DNA, 292 bp, Unknown
  misc_feature (1)..( 292): cDNA_ID_4371048_gDNA_ID_1526_Annot_ID_145143 3000 nt of promoter + ATG
aaaaaaaaaaaaacttagtgcatgacttaattggcataaccattaatattagtcccaaaaaaaaaaattattagtccaccgtcgaaggaaaaaacaaaaagcagtagacaattcttgaagtaaaattaaagggatagacagataacgtttacgagaggaatcatgacacgtgaacatggagtatcggtcaaacctggcaactgggacatttctttaaatacccacaaaatatcacttttgaagaagtaggaaaaaacaaaaccaaagaagatctaaagagataaagagaatg

SEQ ID NO: 42 - DNA, 11 bp, Unknown
  misc_feature (1)..( 11): cDNA_ID_3019355_gDNA_ID_1532_Annot_ID_145153 3000 nt of promoter + ATG
catataatatg

SEQ ID NO: 43 - DNA, 187 bp, Unknown
  misc_feature (1)..( 187): cDNA_ID_3013591_gDNA_ID_1535_Annot_ID_145155 3000 nt of promoter + ATG
aaagaatgttttctaatccttcgccggccggaaaaaaatctacaaactccggcgataccctctactccgattctcacttccccgagaaaccaaatcaaacttgatctgagaatcttcaacaacactttcagatccatgaaaacggatttgaaaatccccaatcagtgaaatcgaagatctagttatg

SEQ ID NO: 44 - DNA, 67 bp, Unknown
  misc_feature (1)..( 67): cDNA_ID_1596062_gDNA_ID_1579_Annot_ID_145191 3000 nt of promoter + ATG
cactgacaaagtccttagctctaagcgatggaatttatatcgacagctaaccctagccagaaaaatg

SEQ ID NO: 45 - DNA, 62 bp, Unknown
  misc_feature (1)..( 62): cDNA_ID_1691191_gDNA_ID_1665_Annot_ID_145267 3000 nt of promoter + ATG
tggttcttgaacatcattgcatgttgattaatcacacagcacaaataagagttagaaaaatg

SEQ ID NO: 46 - DNA, 31 bp, Unknown
  misc_feature (1)..( 31): cDNA_ID_3013609_gDNA_ID_1706_Annot_ID_145304 3000 nt of promoter + ATG
gaaagcaatggcgtacggtggtccgtccatg

SEQ ID NO: 47 - DNA, 2984 bp, Unknown
  misc_feature (1)..( 2984): cDNA_ID_1587391_gDNA_ID_1731_Annot_ID_145324 3000 nt of promoter + ATG
cgatcatgaagaatgataaaagctcaagctgaaaaaccaaaccttatgatcatgttttgattctttatatatcacataagacagaagattatcatcaaagttacacaaacctttttgtcagattgtgcagctttgagaaaccgtctcatgaacacatatggagttggcagacagaaattgaattgcaaggtattcgccattaacttctcctgcaagacacaataatgatcatccacatataaagcagagcatccatggttataatcaggacaagatttagtgaaggattttaccatatcaagaatctctgtcctagtataagccttgtcagagatcaggattagatcatcaacaactggaactgaaacttcttcatatttgcaagcaagtaacatagctgttacacccacaagctgaagctttttcctcgcgatatgttgatgaaccgcaagaaatctgtcaatgagattgattgtcaggtaaagcgtctcctccatcagctcaaacttgtaatgtacctgcaacaaagattcacagtaagctttacagtgagacaactaccaacaacagagcaattttatgttcatgtttttgtgtgtgtatatatatatacctcaatcaaccaatcaataaggattcctctcatcctctcgttaatgtcatgttgattctccatgtagttaggcgggacacagctacgacactgcaaaataattgaaaaagtttcaatcttgaagctagaatgatcataatgatacagaaacagaacactaaaagttacctcatttttcttgtagaagcaatatatgtcattaatgtattcaactacagataaaggattgttcttgtcacagctgtctatatccatcacagactcttctacttcagcatcaatatcatttgaatcttgcatttcaatcccttcctgcagaattaagacaacaggtttcttcatccgagtaaccaacaaaaaatagtggcttaaataaaacatgttattattattaccattttgtcaatctcttcaagcattgcttcagtatgttgaacaaacattggttcattaaagtctccttcttccacatctgttatgattctatctaatgcttcgtttgaaatcaagtctggtttcttggtttcctaaccacaaaaaaaccacttggaattagacaacctaaaccatgtcatgttttcaaatactaaattcagatagaattaatataaaggtacctccttgtggatttggagattgttctcagctaattgagcagcaaatttcctgaaattaaataaagaattaaacaaactcatactacaattttgaaatcgaagcagaaatcaaatgaaatcactcacctagtaactggtcgatgcactggaacaggtggaatcttcttgttacaaatcccatttttcctgagaaaacaattggttactaagataagtctatgcaacgtttttattaaaggatcattgaaagaagaaagtaataaaaatataattactcagtgaatggtctcttgacagcacaaggatagaccggagctccgatgatgttcttgtttatattactcagtgcccttcttgtctgtccattcgtcggaattacctttcctccacgtaaaccccctaacattggcaaaatcatctttttagttaatcaaacaaaagattgatttttgattaaatgggtcttcttgtttttaattctgatctaccttgttgtcgattcatcggtccaatgactccgtgtctgttctcatccgatccacccattattatcttccgtatctgagaatcgcagaaacactcgcatattaacaatccgaattaaaaattgggtcttgaatccgatttgagaatctaaaagactcgacgatcaagaacaagatgtactctcttaaacccatatgaaatctacactaaagtatttaccttgacgctttcaacgaaactattaacctctctctatctctatctctctgtcagaactcagaagcaaaatcccataacagcaaacacaaatcaacctctggctctcttcaaagatcttcaagagtctctctctttatcttctttctctcacaacgaaaacaaaattgaagaaaaagtggtaaaagagactgtagagagagtaatcaaagatttcgaagacgtgaagagcggatatatgtctgcaacacaccaaaaaaaaatatgttgttttacgaatcgttatctttttttcccctttttagaatcaacggctagttaatcttaaccgttggatacaacctcagaaaaaaaacctaatggaaaaagagaataggagcccaacggctatatttgtaaccatgtgcgtttttcaaatttggcttattttcttcgttattacttattactaccacgctcaagtctcaaaggtccaatggtccatgttttatttcaatgtcaccgaccaccaaccgcttcctcattattaagccaatctaaatattaataccagtcgatttgaccccaaaacaaaaaacaaaacttagaccacattattattaacccaatctgataaattttaattttacccgattctgatttttaatactcaagctagtagatgatttaaatctttaaaccttagactaacggctcttcgcctttttgctttttcctctttacatctttttctccagtagctttgttagtcaacacattttccaaaaaggttgaaaataagtcaaagtacaaactgaattacccaatacggcccaatatcctgattagagagttaggcccaatatatcatcagatttgcaatcgcaagtctctttcaacttctcgtcgaatgttatactctcctcagagtttctccggatctttcaaaaacaattccggtgaagatgaatcagttctgtgattcgtgatttatgttactcaatagatttctcatgttatagtcaccgatctgtatcgaaattttggtgtggattcatcaagcttctcaaatg

SEQ ID NO: 48 - DNA, 1166 bp, Unknown
  misc_feature (1)..( 1166): cDNA_ID_1595874_gDNA_ID_1738_Annot_ID_145335 3000 nt of promoter + ATG
  misc_feature (33)..(33): n is a, c, g, or t
atataacggatgaataacgaaaaaatgaaaaantatcattaatgatataatatgcatatgggacaaagcaatcttatccgttacggactatataacatatcatttcttaatcatatattatatacgtatatatataatcgtatatcatcagtaatatatttgttgtaagaaaaacacatactgtatatacatgaccaaaaacatttcgctttatgcattgatgtaaaaaaattaaaactatacataaacacatcaaaaattacagacacttaacagatgtaccatgtttttttaagaatcaatagttacaaaatttgagaaaaaggtgatattttgtcatttcgttggatatgaaggaaccaatgataaaacatcgttagttactaattcaaacaacaaaaaaaagaaccccgaatttaaatgctcaccatcgacaaaccttggctatttattttataaatataagacaagtactaaatcctatcaacactaaacaataaaatcgaacatgttcacccaattataatctgacagctgaagaagataaggaaatactaaatatagagaggttcgatgacagagagaaaaaggtagactgaatcaccatcaaaaccacgcccaagaaccctaattggggaaagtggccaaatgaattctcgccacgtgtggatctgatggtgtcagagtcggtaaagtttaaaaaaggtaatgtgtgatgtctcgataagggcttttaaactggtcgttttgtctgggacacttgtacagttttggaaaggaggacccatgactagggcattctttagttaattttaaacttgataaatcagtatttcgtttctatatatttgtttatgaaattctgtatcattagagaaatcagatgatgtggcaatcattatctgttctctttaatcgaccaaaggttcgaacaaaatatcattgttggttatctgatatagagaaaactaatttagaaacctcgttttgaaaaattccaactacaatatgagatttgattctacaggagtttggaatatgggaaagggaatttacaaaagtgattgttgaaacattaccgattgttaaatggtaatagacagctgaagctgcacaatgacatatggtaaggagctgggagcaaaagactaaggaccgaaacgatg

SEQ ID NO: 49 - DNA, 3 bp, Unknown
  misc_feature (1)..( 3): cDNA_ID_3013497_gDNA_ID_1759_Annot_ID_145348 3000 nt of promoter + ATG
cta

SEQ ID NO: 50 - DNA, 229 bp, Unknown
  misc_feature (1)..( 229): cDNA_ID_1596387_gDNA_ID_1773_Annot_ID_145352 3000 nt of promoter + ATG
tttttttttttttggacaaaatcatactgtgaaagctaagtccaatttatctttctctaaaatgtgaactgggtcgttctatttaattaccaatgacccgaccaatatcaccttttaaaagccacgtggtgtgagccgggtcggatcttggataaaagtcttaagtgtagttatatgggtcgacggttccgggttgatctccggcaacgactgcgtcacttcatcaatg

SEQ ID NO: 51 - DNA, 1100 bp, Unknown
  misc_feature (1)..( 1100): cDNA_ID_1587274_gDNA_ID_1775_Annot_ID_145354 3000 nt of promoter + ATG
  misc_feature (624)..(624): n is a, c, g, or t
  misc_feature (647)..(647): n is a, c, g, or t
tcactcattgaatcattgttctaatcgagatgagtaactttgaggtggagggtccctttcacgtggcacataaatatggtaaaactttgtaccaatttcaagccatgatacgattcatcgcacccgtagattttcttcatcgaatcatcatgagaacaaaataaccaaagtcccttttcttaaaagatgagagactgatagaaatcaaagaaaatgccagcactgaactttttctctaatttttttaatcctcctaagcttagacttgagagtaatgcaccattaagtgggatctttaaaagcaaagatgcaaatttgattatatataaaaactgaaaagttgatttttaaaatttcccacttttttaatttagggaattgggattgtctaaatagggacactttaactctttgtgggtgggtgggttggtgtgggctagacactcttttattttctcaaaggttatatgaaaaatggtaggtatatcacatatctcaatgataaatcataaatgtcacaaattggtcttcgaagagtccaattacttggagtgtctaaaatagtgagattttgatggattggtttattattattttgcgtgtacccttgtttttttttggaanactcaaacgtaaacggaatgaancaatcgtgggttatatgacagagactatagaaaacaaaaaatatcgaagagaaatagatggactatggagatgaactattagtgatctcacttctcacgttggatattgcttcaaattgtgagagtatatatattggtaacatttttatgcttatacatttcttggattggacagttttacacgtatcgaaactttgatcaacttctctacttttaaatgatcacagtgcggaaaatttaaagttcctttacatgaatatcccacataaaataaacagggaaaaaaagaagagcccaacaagtgacattaatttaagatcttaaagaaaattacataaactttattattatagcaaaaaaataaaactcaaaacacccttaaaagctccaagttgtccacatttttagggaactgagattgtctcactacacttgcaaaaaagacacacaatg

SEQ ID NO: 52 - DNA, 666 bp, Unknown
  misc_feature (1)..( 666): cDNA_ID_1587153_gDNA_ID_1787_Annot_ID_145367 3000 nt of promoter + ATG
  misc_feature (45)..(45): n is a, c, g, or t
  misc_feature (650)..(650): n is a, c, g, or t
gtttcattctcgctctatcttttgctttcctccttctctcattgngtcttttattctgtttatatattaatatataatattagctcaaatatatatacatatatattataaataaatatacgataacacgtaatcttttataaaaggctaacccatttaaccccaaattttctcctaaataagtttaaataagtcaatttctcctatacatacctatttattaaataggggttctatgtccacattaacatcactcatacataatttatgaatattataattaacctgaggaacgtggattggaatccagactcaagctttaaaggtattcgttcacttccactcctagtaaaagaaataacacagaaaatcaacgagtgctttatcaaataggtcccaagtcccatatcgaaataagagaataatttttaatttttaattttggacaacttgttttcattcattcaaatcaaaacaattacatagagtgatttagagatcacaaagtttaaaacataggtaaaggaggcattccccaatgcccaaacatgatagataaggtgagacaacaaatattccatgagagctttcagacaaaagcaattcagcgttttggtacatgtgaggtcacggtttgtcgaatgatcttncacgagcgagtcgatg

SEQ ID NO: 53 - DNA, 64 bp, Unknown
  misc_feature (1)..( 64): cDNA_ID_1691224_gDNA_ID_1822_Annot_ID_145379 3000 nt of promoter + ATG
ataacccccacgaattgtttctacccaaaacgtttaacattcgaaaaagaaaagaaacggaatg

SEQ ID NO: 54 - DNA, 2273 bp, Unknown
  misc_feature (1)..( 2273): cDNA_ID_1396304_gDNA_ID_1848_Annot_ID_145387 3000 nt of promoter + ATG
ccagtcaattaatcttctgaagtttaaaagttaacaaaagttggagtttcattttaacagaactgcatagatataaaaactatttgtatatgacattcatggtacggaagatagttaccatttccaagttctttgtaagtccaacgcctgtatggaacatcttggcgagttgataaaaagcctttggttgaccagcattggcagcaacaaagaaatatttggttgcatgcctcacatccttcttgactccaatgcctttaagatacaacactccaaggttataatgcccgctaggatcttcattattagcagccatctcaaagtattctctcgcctgcacttgaagggaaatatcaacgggatatctttaggtcataagatatattgaaggaaaagtcaaaacaaaaactgcatctacgatggtttcagagtgccactaagcgactctttatatgtcctgatcaccactaaagatgagatgtgcttcagtttggtactttaattgttaagactaatttagaatgttttacatacagtcaaaaatctatcccatgtctcaattccatcatcattgtttctaagtaaaactaaattcttcaagtcagataaagaagcaagcctagtaagtatgaagcaaaagttaccttagtgtagtttctcttatctactccatagcctttgacatacaagtaaccaaggccattaaacgccgaatagagaccttgttttaccgcaagtgtaagacattcacgtgccttatcataatctctctcaacaccagctcctctagcataaatctcccctaaaagttccattgacataggctctcctttctctcccgccttcgaaaaccaatacaacgccttagcgtgatcacgccttaaccctctcaaaccaaagtaataaaacagtccaattttgtgcattgctacagaattccctttctctgcctggtattccaatatctgaaaatcctcatcttcctcccctcgtgacttccttagtgcatctttattctcctctgttccaatgtggattctaactggctcagccattggagaatccttggatatcaaaaagctattcactgctgtctctgctagttcagcatataactcaacagctttatcatacatctgtgaaaaggatcacaagaaaccaaaaaacttgaaaattagataagttccaattgaaatgttcagtgttgcttgcttacattttgtcttagatatctaaaagcaagtgccattttagactgcatatttcctcccgcagccgcgaaatgatgatgcaaaatcgatttgcttcggctcgtctcacgcatcatcccaatcccgtatacgaaccccatcactgattgtgcgtgtggatctcctgacgaggcagacgaatctatctctgaaaccgcttcctccatcaatgtagtgtttccttcactcgcagccgagagaattttgtggagtccggagtaatactgcggcgacgcagaggcgtggacggtggaatcatttgtctcgaagattcgacgccatgaaccgggatcaagctcctcttcggatttgggttcggattcaccaaactcatcgaaatcggaggattcgtaggcgccgtttatcatcaaacccgccgttgagatcttcgttggagagaacgagaacgaagggacgggcttgaacacgatggatgtagagtgagagtgtgaatagagatacggctatgatactctgacctgagactctcattctttcttttctccagtttctcagtgtttctcagggaagaagacgaaacaatggatgagggtaatgacgtaattttatcacactcccttatattgccacgttgattattatccctcatacaataatcatccgccacgtaaacatgtagattagcccctaaacttatcattatgttgttaatttttcttacaagtgttgcactggctaaggtttgaaatgggctctcttggagtaatccttattttcatcagcatttaatgagattttatggatttttttttttgaaaaatttccatagaaatgaaatgtaaataaagattttatcatgcaataatccaaaatttagttttgaatcttacatggatgcacatatatcaaaacaaatcagacaaaaaaaggtaaatataatccatgaaattcataacaaatctcaccttcataattaacaaacaaaattatttctatgcctcatcgatctccacctatttatatgaacattgtaaacaaagaaaaacaaataacaaaaaaatg

SEQ ID NO: 55 - DNA, 1363 bp, Unknown
  misc_feature (1)..( 1363): cDNA_ID_19407_gDNA_ID_1848_Annot_ID_145388 3000 nt of promoter + ATG
tataattataaattaaaaaatgacataatcagaagaagatcattgccacaaaagcagacagaaagctaaatcgattgaagctgatagttgaagctgaagaagttcctgttcattaagaaggccgtgtcaattactttgataaaatattattagagtttgtgtattttaagtttttttcaacaaaatgtaacaacaaatttgaaaataaacaggaattagtgcataccattggttgatcccggcgacgcaataggcgaaggagcttcatttacaagagagaaaaaacattaaaataacgtcgtttatacttatcaaagatatttgattaagttatatatctatgggatcttataaatagaagaataatcatcactcactggctattttggagcagagtgaaacgtcaggattaactccacatgcattgggaagtaggagagcgttctctttggtgaggtttagggctttgagcacctccggattgttaaaagcggtgcataaacacggtgcgtctttctctacgatctctttcattggcccgcaacacgatggcggaggaggcggattcaatgagtgtatgtacggctgacacggcagcagtttgtgcagacaagccgtcaactgagggcttcctccttgtgccgtcgcttcgacggagtagaggaccacgacgactacgactacggccagaaatttgttaatctccatttttttgttatttgtttttctttgtttacaatgttcatataaataggtggagatcgatgaggcatagaaataattttgtttgttaattatgaaggtgagatttgttatgaatttcatggattatatttacctttttttgtctgatttgttttgatatatgtgcatccatgtaagattcaaaactaaattttggattattgcatgataaaatctttatttacatttcatttctatggaaatttttcaaaaaaaaaaatccataaaatctcattaaatgctgatgaaaataaggattactccaagagagcccatttcaaaccttagccagtgcaacacttgtaagaaaaattaacaacataatgataagtttaggggctaatctacatgtttacgtggcggatgattattgtatgagggataataatcaacgtggcaatataagggagtgtgataaaattacgtcattaccctcatccattgtttcgtcttcttccctgagaaacactgagaaactggagaaaagaaagaatgagagtctcaggtcagagtatcatagccgtatctctattcacactctcactctacatccatcgtgttcaagcccgtcccttcgttctcgttctctccaacgaagatctcaacggcgggtttgatg

SEQ ID NO: 56 - DNA, 70 bp, Unknown
  misc_feature (1)..( 70): cDNA_ID_3598401_gDNA_ID_1860_Annot_ID_145390 3000 nt of promoter + ATG
cagacatttggcccgaaaaccccgttactgtgatgatggagacaacttagctctgatctatgaatatatg

SEQ ID NO: 57 - DNA, 1750 bp, Unknown
  misc_feature (1)..( 1750): cDNA_ID_1691250_gDNA_ID_1860_Annot_ID_145391 3000 nt of promoter + ATG
cagacatttggcccgaaaaccccgttactgtgatgatggagacaacttagctctgatctatgaatatatggaaaaaggagacctgagggaaaatatgtcaggtaagcactttaatttagttgaatccatctccttagacagtttgaaacattcaaagcctggtacaggaaaacacagtgtcaatgtcctaagctgggaaacaagaatgcaaatagctgtagaggcagcacaaggtgaactaaattatgacttatatacttttcattcacaacaatttgtgtggtagtctgaaagcaagattgacataaacaataactatttgtaacaggattggagtatttgcataacggatgtaggcctcctatggtacatagagatgtgaaaccaaccaacattttattaaatgagcggtctcaagcaaaactagccgactttgggctatcgagatcttttcctgttgatggtgaatctcatgtcatgacagtcgttgcaggaacacctggttacttagatcctgagtgagtgaatcaatctgtttcttgtactgaaataagttatgaagaattgggaactgtaacctctctttatgatactcttcttttcaggtattacagaacaaactggctaagcgagaagagtgatgtgtacagctttggtgtagtgcttttagagatagtcacaaaccagcctgtgatgaataaaaaccgagagagacctcatatcaatgaatgggttatgttcatgcttaccaatggggatatcaagagtattgtcgacccgaaactgaatgaagactatgacacaaacggtgtgtggaaggttgtagagttggctttagcttgtgtaaacccgtcttcaagccgtagaccgacaatgccacacgtggtgatggagctaaacgaatgtcttgctttggaaatagaaaggaaacaaggtagtcaagcgacgtacataaaggaatctgttgagtttagtccatcttctgcttctgatttttcccctttagctaggtaaaagtctttgtgttatcaagctttgttgtttattataatcgattgttcatattgaaatgtttaagatagttctgtgaattttcttcaaaatgtattagcctttattatgtgtaacattcttggattccaagaaatttatatctttaatattagtttatgtatgagtcatcaacgcatggtcttggatgctcttttttgattactctgttctcatgattttgaagtaaaagtttgcaagaaattcggactcatacaaattcaaagtgaacgcatgaaagcgttgttggagtcaaatgtgacatggtccgtgtataattcactagagttcatatcacatacaaaaataaacgtgcctccataaaatttaaaatttactatctgatttaaattgactgattcatttaaaatctgctaaagttttttaacctataaataatgtaacaattgatttcacatctttttttagaagtctacctaataatatacatttgaaaattctccaacgcctgaaagcggaaagaatgtcgtagacacgtaatgtgttactataataatcacctgaataaaataaaagaatctaatgttgaagacttagcacacagcttacacaagctatgaatgccaaatcaattgaccaatataatgttatctcaatacttgccagtcaagaacaatgatcaatgaataatcataacctccctgaatcagagcactcactgcaaaaaaagaagaagatg

SEQ ID NO: 58 - DNA, 296 bp, Unknown
  misc_feature (1)..( 296): cDNA_ID_1691313_gDNA_ID_1900_Annot_ID_145412 3000 nt of promoter + ATG
ctatatgtctatatgatggttctgaatttaaccacattaatattgcaatctcttgctgttgttaataaccacattaatattgcaatctcttggagatgtttttgacggaaatattggagttgatttggatgataaagacatcaagggtattctttcactatacgaagcttcatatctctcgaccagaatcgatactaaattgaaagagaccatatactatacaacaaaacgacttagaaaatttgtggaggtaaataattaagaatgagaccaaatcttacactcttcgaaggatg

SEQ ID NO: 59 - DNA, 3000 bp, Unknown
  misc_feature (1)..( 3000): cDNA_ID_3014593_gDNA_ID_1917_Annot_ID_145424 3000 nt of promoter + ATG
attgtccacatgtacccttctcttgcctcaagagtctttattaacgctagggagattggtttaatgaaaccaggatatgtctggatccttaccaatagtgtgaccgatgacttaacttggatgaatgagacagaggttgaggctatggagggcgtacttggtgttaaaacttatgttcagaaatccaaagagctggacaagtttaggtctcgatggaggaagatttcccgcagatagagctcagtgtctatggattgtgggcttatgatgcaaccacatcactagtgatggccgtcgaagaagctggaatagatatattgactttcagtaatgtggatcttggaaggaatgtttctgaacttgaagttcttggtttatctcaatacggtccaaagcttctccaaacactctcaacaattgagttcaaaggacttgctggagattttcgttttgtcaacaggcaactacaaccatcggtgtttgagattgttaatgtgatcgggacaagagaaaggtcaattggcttctggacagaagaaaatggtcttgtaaagaaacttgaccaagaacaacgaaacatatgtactttatccacttggcaagatcatcttaagcagataatatggcctggagaggctaattctgttcccaaaggatgggagatcccaatgaacgggatgaggttgcgcattagagttccaaagagaaaaggttacaccgatcttgtgaaagtcacaagggatactatcaccaattcaccagtagttacaggtttctgcatagatttctttgaggttgtgattcgagcaatgccttataacatctcctacgatttcattccttttgaaaatcccgatggtaaaccagctgggaattacaacgctctagtataccaagtctacgtcggggtgagtaacacactataccattaagaagatcatcttagagagtattaattaaatatggttttctttgtctctaccgcggttgtgggagatacgacaatactggcaaacaggtcctcttatgtggactttacatttccattcattaaatcaggtgtgggattgatagtccatgtagaagaccaagtgaaaagagacagtatcagtttcttgaagcctttaacatggaaactatggatcacttcatttttcttcttcttcctcattggatttactgtttgggttgttgaacatagggttaacccagactaccgcggaccacctgagttccaagctagcacaatcttctggtatgctttctctaccatggtttttgctccaagtaaatttcaatctcccatcctacatatctcaacatatagtgattgttatatatttagtttccttaatgcttactctctcgagttgcggattgtaggagaaagagtgtttagctttggagctaggctattggttataacatggtacttcatcgtgctcttgttgactcaaagttacacggccagcttggcatcccttttgacttcacgactacttgatccaaccataaccagcatgagaagtttgcttgaaaaaggagaaaatgtggggtatccaaggacatcattcatctttggaaaacttaaagaatcgggtttcactcgatccagcctgataccatttgatagcgcagaagactgcgacaagcttctaagaaaaggacctgaaaaagggggcatcgctgcgactttcttggaagtaccctacatgagactctttcttggacaatattgcaacgcttatcaaatggttgaagaaccctttagcgttgatggattcggcttcgtgagttttcataacaaaaaccatttttacagtttctaaactaaatgctaagatcataacatcagtcccattccacaggtgtttcctattggatcacctctggttgctgatgtatcaagggctatcctaaaagtggcagaatcacccaaagggaaggagcttgagctcgcatggttcagaaagaaagacgaaacatgtccgaatccagtcacaaccgcagatccaaatccatctatttcatcgaggcagctcggtgtagacagtttctcggttttgtttctcattgcttttctaatgtgtgttttcacccttggaaaattcactttcttctttgttaaggctaatcaggataatagtttgtggcaagagtttcataaaccagatgaaatttcatacatcaactacgtggagaaatgtccgtgtttgttgaacgaagaagcgcctgttgaagatgttgtaaacccacccgctgatgatattcatcaagacccaagggaacaactataatgtttgaatgtctcaagactctttaatttaactaacaaaaaggcgtgtgtttttatcaaacaaaactactgtagttttttttgtttcatttgttcaaaaactaatgtagtttatttagttatttttaaaatcaattttcctaagacgatgaaagcaacaattttcatgtaaggactatccacattcttatatatcaggaggttgatgatgttacttgttccccaagacagttaacctagggctaggatttctcgcattttcaaaagatttatagtaagcatattgacttatcttggatatagagtacaaaaaatattaacctcaataaaatatgcggtgcgtttttatacaacgaccaaattcttaaataatttccataaatttccaaggtttagccggaatcaacattgatcaaaacaatgttagtcaacatgttcgtttatgttgagtaggatgacacgtgtggaatttccattgagtcggatgccacatgtcttgaatataagagaattgaaataaatacttaagttagggatctatatgtaaattagactagttagctttaccctaattctttattatgtttgatgtataaatagatgtaaacctctttcattcttaagaagattatctttacacttatatggtatcagagcttacgctcctaaaacctaaaattctcctttttttttaagccgtcact

SEQ ID NO: 60 - DNA, 3000 bp, Unknown
  misc_feature (1)..( 3000): cDNA_ID_2106619_gDNA_ID_1933_Annot_ID_145435 3000 nt of promoter + ATG
  misc_feature (2002)..(2002): n is a, c, g, or t
  misc_feature (2016)..(2016): n is a, c, g, or t
gatccaacattttttccttcagttagaaatagacttattcattgtaaatacatgagcttttttctctttcttcttgaaagagttgttctaaaagtgtagaaagtgaaatacaaaattaatgttatatacaaacttcatgtcaatacatttttgatcgctcattgaaaaagaaagacgacaccaaattcatcaatcaaaaaactactctaattatagtttcatgttgattaaaaacaattaagtggaacatctaacatccggatccgtggcgcaatggtagcgcgtctgactccagatcagaaggttgcgtgttcgattcacgtcgggttcaattccccgaactttactccggatattctttttaaaaaaatccagactttgcccttcgctttcattcgataaactaaacacaactgtttagggtttgaagaaagtaaaagtgtgtttgcgatccgccatggattcaaagaaagagaaaacgggagggatcataggaatcttcttaacccaaaatgctgcttccttggcacgaagcttctacgccatgttgtgtattttgatctgaagagaaacagtataagagaaactaagtttaaaggaattgtaggaaactcaagggatttggatttggtccactcaatgatttagatgttttcccaaatcacattgagagtctcttgtccttgtaagaacattcaccgctcgatgctagttcttcatcattcatttattagattttgagattgtttgatgatgtctttaggttttcttgtaatgatttgtaattattccttaatctcaagatatttatcccagcatgttatataacaatgtggatagtgcaaactattgttgtagtctgtataaacagagactgctctgtttctagcatttttcatgcgagccacgtttgcttattcatattcaaaaacggacaaaatcaagcagagaatcacaatcaagaacagaacttgccagccatttgcttattacttctctggctttttatcatgagatccaatgagaaatgttttggagaagctcaaggttgtgaagatgatggtgtaggtggccttgttccatggccgttggtgttgaaatatgtctctttatgtctttgaattttcctctgtctgacaaagaatgggcgtgtttaattttgaagggtgttactgatgctggtgagtttgtttatacgccaatgagtgtgtatgaatccttccatgtggtgtattttgatccaaagagaaagagtattagagtaaccaaaattaaaggaattgcaaatgacctatatagacgacttaaagggctcagactcgattctctcaatgatctcgatgttttcccaaataacattgagagactcttgttgttgtaagatcattaatggctcaatgctattaatcacttatgcgatattaagcttctttgatttccttaggcttttcttgtcatgatttgtgatcattcctatggttttactatcataacatgttatagaacaattaatgtggatactggatactgcatgcagactattgcataagatccgtaaaacccgagactggtctgttcctagcatttgtcaagtgagccacgtctccttcttcaaatattaagatcaggacgtacgacaaaagcaaccagagaaatcacaaccaagaaccacaagcaaatgtagcgaactcaaaccctcatgaagtctagtttagcttatcgttgctcgtcttttgtatccacattcatttatcacgttagcatctggacgacaaaaccatctaaactctcttcttatgtgtccactcttacatccacaagtttcagaagatttccgagaggcttttaaattcgctcagggagtgctaaaaagggtttcttgtagtatacgaaactctcaaaacatcaattctaagatgtgagaaagtgaaaaaaaattggttattaagtgagtgtctttactatgcaggatcatattgatatacatttttggttatattcnaaatatagattttncataaaataatagttttacataaaataggtgttgaaactgtccttttgcttgtagcctctacagaaaagccgataatcttctttgaactcaagaggcctctgaacaaagccatttcttgagtctggaaaatctaaatttgaagcttctgagaaaaagttagatgctcaaaattttgaggtctggattgcttcactacttggtgaagagttggttctgtctctggatgtataaatagattgataaaagacttcaaatcaccctgaaaccattcaaagtaggggtgagacatacacaaagatagtttcacatggttctgttttttaggtatgatagatgacaagttgacaacggaagctaatgagcattatcatcacttcacaagggtctgtcttctccatgtctgtataataaatgaagagaagaagtgaggtattcagtctcttttagttttcatgtgtggatataatcaaagaacaactagagagtgacattgaattgttgttctgttgttgaataacattcaggtccccactttaacttcttaataaatccatttcgactgcagagattagagtactataggacaaagaaccaaccacctaatcatcacagaacctgctgtctttgttcttgcaaatatagggcacgtcttatctcagaaacattgagaaagcaagcccttgtgaaatttcacatggagattatttaagtagataaatttcattaatgcatcttttccagatggtaaagacagaaccatgtgaactcttgctctagtctgtcccacgcttcaagaccacagtttcaatgactttttcagagaagtttcaaatcgttcattgatatttctatatatacacccataaccccattatttctatcatcaaccaacaacaagcattccaataacttgaatcttttcatacatcttcaagagcttcataataattcaaacttcttttatttaaaataaaataaaaatg

SEQ ID NO: 61 - DNA, 340 bp, Unknown
  misc_feature (1)..( 340): cDNA_ID_3014774_gDNA_ID_1938_Annot_ID_145440 3000 nt of promoter + ATG
aaaaaaaaaaaaaaaaaattaacgagtctattatgcaaatggtgcataaaagttttttaacaaaaccatttattaacagatgaacagaaatcagaccggttcgatccggtttactcatggtttgtgtttgtactttctccacttgccgttttcatgtttgagaaacaaaatacgcagcgtctaaaatagaagcaaaaaacgggacgttgtttactaacaacgacaaaacaatggcacacttacccaagttcttcgtcatctcttcctgattgactctatttaaaaacccgatcggaaaattcgaaatccgttcaattgtaatcggaatcgtcgaaaaatg

SEQ ID NO: 62 - DNA, 315 bp, Unknown
  misc_feature (1)..( 315): cDNA_ID_1691379_gDNA_ID_1940_Annot_ID_145443 3000 nt of promoter + ATG
gaatcacacattcaccataagcagacctgaaaaacctgtttatcaatttggcgccattgccaattcattgttgcattgttacattcaagatatcagaaacttttaagatcaagttcttttacatttattaagttactaactcatattttcgtcttcttgtttttgtggtataggtactaatctttgtgcatgcaaactcgatccaaaggttctgcacacctactaccattcaaagacagaattgacagaatagctcgcgagttacaagaaaccaaagcaaaggcagcctgtgatcagccaagaccagctactatg

SEQ ID NO: 63 - DNA, 1836 bp, Unknown
  misc_feature (1)..( 1836): cDNA_ID_19619_gDNA_ID_1946_Annot_ID_145447 3000 nt of promoter + ATG
gtaatacacacaagttattcaagattctttgattctcctccgtacattacattctttaggctttacttttgtggggcttcacgtgggttatttgatcaatgggcttttaagatgccccattttacctagatgaagaaaaaggcccgttatattgctggccaaccatgcctagtctcacgcttctccaccaaccatgcctagtcagttagtagtcactaactattttttttacaaaagtaaacatgtagatgatgtatgagtagactattggatttctaaaataattgatttattactagtagtatcaagaaccgaaaaaaagaaagactagtattgttgttatatgaactcaccaaccagttcaatccaaaaataacctaccaaatcaatagatgatttttggcattttattcatttgagtcatgaccttccttagttagtgctaattattgcaataaaatacattttatactcaatttaaatactgcccgcttcctcaaattatgtttctctacaacattaattattatgaaaacaatgaaacgggaatatgtggttgttgaatgcattaaactatctgcacatgagtctaagttttgaccaatgtttgatacaaatggcatttacaaaaatattggaatcaatttcgagaacagaatttagacatgaatcatactccatattaatcacatcgtgtagaccatttctaactcatcttcatttcatctccaaaataaaatttggagtaaaatttcttccaactcatttttattttcaatttcaaaataaaaatctccatatacggatatttttcatttttaatttacagtaaaatttagaaaatctctatttttgactctaaaatagagtagaattagagaaaacctcaactccaaattaaaattactatattttgaagaaaaaaatagaaaaataagttggaaatgctcctaataataattagcttttaacctttatctttctagttttaaatgtttttccaaattatttttggttgggttgagatttttcatccaaacagtaaaaacaattatctttgctagatgtctttttcactttgatttctaagatcatctctagctatttcaacaaccaaatattcccgatgagctaatgtacttgcatgcactatttggaaatacaacatacaatttcacaaacaacatcacgtggaattgtatcacattcctgttgctgtggaagagaagtgcaaattctcttcaatctctctgtggaattgtatcacattcataacaaccattgatttttcaaagatcaggattccacagggaaattgcacttcgctttaagaggactaaaactcgtcccaatcccattaatttgcataagtcgcctccaaaaaatcaaactttgatcaaatcaagagtaaaatcattaaaaaaaacaattggtcaaccaataagattcaactgattaaggttacgtatatgtgtaatcaatttttctcgtctatgctaagtataataacaacatgtacaattttttatgtatctaaaatatcttagtaataaccatatgatagttgactatactaaaaccaaataatttgttgaaagccaatattaattaatacaaattgatatttttaaattgaggaataaacgcgggaagaagaaaaaaacagtataagcatggtgagagccatagtggttgttcggtcatcagctgattgcattctcctcttttaaatactgtttcctctctgtaacaaatcttcacaacacaatcaaaatccctaaagtctcaatctttaagcaaataaacaaaaaagctcctatcttttttattccaatg

SEQ ID NO: 64 - DNA, 3 bp, Unknown
  misc_feature (1)..( 3): cDNA_ID_1691512_gDNA_ID_2017_Annot_ID_145491 3000 nt of promoter + ATG
cac

SEQ ID NO: 65 - DNA, 2181 bp, Unknown
  misc_feature (1)..( 2181): cDNA_ID_1691539_gDNA_ID_2060_Annot_ID_145502 3000 nt of promoter + ATG
catatatgtacaattaccaacttcagggaccttttccatatgctcaaatccgataagctcatgtctgattatttttgttatgtgttaagtcgactaaaaactttgtgtgaaattcttaattttcatggtataatactccatgtgagagaggatccacctattatgttacaaccttatactctttttttacgaaccttggttttagcttcatataatttgttgtggtatgactttctttgcttgaaagactttggtctaatgctgttgaaccttcatgcgagagtttttatggtggcttgggaagcttgtcaaaggaccacccctcatcatgctcgcttaacgtcttcaagtcatacacctcacttcatgttgctattgtttgcctaatctcaactttcattccgcatcaattctagcaaataaatccaagcaccagagcaccatcaccactacccaaacctttgtcaaagctctacttcatgtagctctcctcgtgccggcaagaatcatgtctttgaccccttcattaacgccacttcgtcttttgacagagacaatttgtttttcctttgaatcgctcttgaaagagtcgtcgataaactttgatctcacaagtaccataatgtaacgcccgcaatcctcaataggatcgttggctacgacttggtccgagagaagaaggtggagtctcgaacaagtgagaaggagctgccataagctcggacaaaggggaaatcatgcaggctaagctaggatcataaagaaatcagttgggtcagctcgcccaaacctcaagctcagctggaaggagtgacggttactcaggtcgagtgacagtccagctcgggcagctggatgagtgacagttgagctcgaggtagctggacgagtgacggacgagctcgaggtagctggacgagtgacggatgagctcgaggtaactggacgagtgacggactagctgggcggttatgggcgaagagatacaactcttcgaaaatgtgcaactcttcggaagggcgcaactcttcggaaaggtgcaaagaacggatgtgttgattcgggaagcatccattcgccccctatataagggagggcgcccaggaccattccactcaccacaacacaccgaaaacacaagaaactcaccattaaaactctctccctcttgggagaataaatagtcttaggattcggtagccgggctgtggccggcaataaagaagaagggtcggatcgacctaacctcgagaaggaaggtaagggatcctagattttgagtctaagggttctaagatgtgagttagtagtcggatccttgaaaggatcgactagagggctggatagtatccgggtcatgtgcatcctacacaagactcggtccgggtagggatcggctgaggcggagacgcggctcggcggaggaccggtgggtcttaactgacctgccgagaatcggccggactgatgcgcgatcttcccctctctgaattctctccacgtatccgagtagtgtatggcatatagagcattgcatggacttgcatatgattaagtaaatgagattacttatggctctatgactttcaggaacgaatggtgatcgtgggaaggacttggcttaggcgcgagagactcaaggccgggatgatggatggtgatagttcggatagtgtagggatcgattatatgacttgtaatagcttatatgcaaactcgtaggttgtatcaaatcctttgcttaatcaataaattatccgattgtttgtttactctattcgtctcatatattgaatcacggaatcatatggaacggattagactaggaaagaacctcataaacggttagggccgagtgacttagtggcttgggtcgagagaattcgtccggactttaggcagtccggatcggggcctttcaagttggtatcagagcatgcttggttctaggactaggtgttgggttaaggggtatcaccactcgtcggcttgagaatctcgcggtagttactctttactcttttgcaattttactaggagttatgtggattaactttggaggtttcgcagatgggtaagagcagcaaaacgggaaagagcaagaaggacaagggcattgtcgtggagactttggttgaggaggaaacgatgatcaacgagtaaaccagagttaggacgatg

SEQ ID NO: 66 - DNA, 399 bp, Unknown
  misc_feature (1)..( 399): cDNA_ID_1691556_gDNA_ID_2079_Annot_ID_145510 3000 nt of promoter + ATG
aaaaaaaaacaaacataatgtacttattttcatgaggtccacccaacaacagtcgtcacactagtcgcgttggacttgcatgcgcatattatactctatagtcaaacccacactaacctacgccgatattcttatccaccaccacctcttattagctcaaaaaaatttcactaacccatagtcattattgcttatactccgtattaaaaaatgttaaaccttttgatctgacgtttaaaagcaggtttctttctatttccagataaaaaactttactcatcgagactcgtttagtgattcgaaatttcccttctcggctcaaatcttcgatctgggctttcgtgtctttttgcgttttgattggtaataaaaagaagctttttaaaaactttttccatg

SEQ ID NO: 67 - DNA, 14 bp, Unknown
  misc_feature (1)..( 14): cDNA_ID_1688600_gDNA_ID_2096_Annot_ID_145533 3000 nt of promoter + ATG
  misc_feature (6)..(7): n is a, c, g, or t
taagtnngagcatg

SEQ ID NO: 68 - DNA, 2195 bp, Unknown
  misc_feature (1)..( 2195): cDNA_ID_1688608_gDNA_ID_2099_Annot_ID_145538 3000 nt of promoter + ATG
tatgataaaaatcaggatagttagcatataaacgcattatcgagataatattgttagcgaaatatagatagagtttgatggatggatgaaatgacattgagtacaaaccaacttaatatgttaataatatatttgacgatataaaaaaattctcagttattgaaccaatgtttagatttcaaagactgatatatatgcgaagcgataacattattatttaaaggtaacaaaatatttagcatgaaaagcaaaaaagttgacttgcgactgaataatcatgtagaaaaaatacatgcatcagaatagttaacatataacgtattatcaggataatattgttagcgaaatatggatacttggataaagttttgatgtatggatgaaaagacttaggatacaaacctacttaacatgttaataatacagttgacgatataattaaattatcagctattgaaccaacgatttgatttcaaagattgtataattatgggaagatgataacattattattaaaaggtaacaaaatatttaacgtcaaaagcaaatatgatataagagtataaaggtattttcatgatggaaagagaaaactcaacagtaattttttcttggacttaattttgtaatattctgtgtatatagagtgataatacccttgaaatccacatatcaccaataaaatgtatatatatagcccctactagactactaatcttgtgtaacatatatgatttgtctattacaactttagaagtatttgaaaatataattttgctaaatatgatttatatgatttatcgcttttttagtggaatcgaactccaacaataaaaaaggcagaatcaaatagatttaatcactcgactaaatacacatctccacgtaatttatcgtttacatatagcaaacgaacattatatctgacgaccaaacctaaaataaatacagatggacatattcagaaacataatataccaaagcaaatagtatcctaatcgtacagtattaagatgactctaatacacattgacttctttaaataataatataattttatattaatattctaaatcatatgtaatgtataatattaagatggtcttatatcttattatataaagtatggttttcaaagttactaatttataggatcgtgccacgtgtcaagtcaaacgatcggatgtttacatgtgtcattaaaaatttaacttatgattacacccgcctaaataatttatttttgtatcttatactcgcctatttaggcgggcattatctagtctctaatatacattgactaactagtaactagtgggtgagagtcataaataatttgaaaagtgccaattgagacacatgcatcaaaggggagtcatgtaaaatacttcgaagattcatctcaacataaaataaaataaaatcaattgattcgtcttcttatcctccaaaacattttatttttcttcgtcaattaattttgtggaaacaatttcctattctaatattttcacatttaaccgagactaaactctttttctctctctcttcctcaaataaactacttctaatttttgtcttcaacttaagaattataacaattatgaaagacctagtcagtttaccggcgaagctcgggtcgtatattatattttagcaaagaccttaattcttacattttttaaagacccaaaacaaatatttttaaccaaaaaaagtctctctccatattcgtatacaaataaatacctttcatccatcagcttatagagaccaacatacaacaatactctctgttcttcatcttctctatcctgcaacaccaaaggttagagctctctctcctccctctctctatacagatttgctttaacttttatcaatgttttgagcactatattcttatataaactattgtaaacgtaaagagcatagtctggaaaactatagagttctattgtcttctaagttctaattagataattgtttttttgggtaaacaatagataatagtggtaacggcttctttattcacccatgaaatttgatcgtttaaatggccttcttgcttcactctagatcttgtttgatcatcggtttgaaaatggttttatcttttaataattcccaacgtaatgaaacacatattgcttttgatgcgaattactgactaagtaacacaatatgtctttatg

SEQ ID NO: 69 - DNA, 1046 bp, Unknown
  misc_feature (1)..( 1046): cDNA_ID_3013459_gDNA_ID_2115_Annot_ID_145553 3000 nt of promoter + ATG
  misc_feature (20)..(20): n is a, c, g, or t
tttttttttttttttaaacnctttaatttttttttttaaacactttaaaatttggttgagggcattctaaaaattttacactaagaaggttactttgccaagttttctaatttgcggacaaaattgaaacttaaaatttaacattgattttgtatggaaaatacgaggatagggaaaaaaaatgcaataaaagaacttgtttcccaaaaaagagataccaaacagagcttgggtttttagggattttctctctcaaaacaaaaaaaatttagggttttaattttccggccaaatttcaaaactttccatagtccagaatcagattctcggtttcaggcgatcagagttctcgatattagggacaatgtcccacatcggaagttgagtaggatcttaagtggtatatataagatatgggtctctccacttattgccaattggttttaggttggaagcccacagtctaatatcgatatcacctcttgagaactatagaggtgatcttaaaatcttaaaatctctgttcatttgtctagatcgatatcacctcttgagaactatagcttcggtgttttcctaatgactttaacaacaaacactcgaatttggaatgctttgcacaacgaagctgacatatcgactctaaccaagagtgtgcttcaggctaatactgagggtacagaacaatgtttttgttctgaaaatgatgggagatctgaccttgttttggatataatccgttcaacgaaattgaactcttcccaagaggatgcaatcttgggctgccttgagacaagaaactgtacccataagaacagtgtgaaactgatatggggacctcctggaacaggcaaaacaaagacggtcgcgactcttctctttgcccttctcaaactaaggtgcaagacagttgtgtgtgctcctacaaacacaactattgtacaagttgcatcaaggctcttatccttatttaaggaaaactcgacagcggaaaatgctacttacaggctagggaatatcattttatccggaaaccggacagaatg

SEQ ID NO: 70 - DNA, 327 bp, Unknown
  misc_feature (1)..( 327): cDNA_ID_1688704_gDNA_ID_2141_Annot_ID_145564 3000 nt of promoter + ATG
tatcagggttggtgaattttaaatattcccagactgctgctaaaaccttaatgcatccaattggtgttgacgagatggctatcctgctcagtttttaattgctgcttggtcgatcttggaaatgattttataatagcagtgcagtccttcttgatctttggatgcatgcccaaaagtgttaaatcaactattctgactcttgttcccaaaacagatggtgcacaaaatatgaaggagttcatactgatagcgtgatgcaatcttctatattaagtgatatataagataatagcaaaccggcttaaagttactttacaagaggcgatg

SEQ ID NO: 71 - DNA, 1844 bp, Unknown
  misc_feature (1)..( 1844): cDNA_ID_1688718_gDNA_ID_2156_Annot_ID_145569 3000 nt of promoter + ATG
acctttgttttatttttactcttgtctctcttttcctccgagtaatgcttttactctcgttggctattgactctgaaatagttgtacttgctaaatctccaactaagctacacttgtgatagatccaaacatcaagcgtatgctgcgtatcatcatccacaataaccactccaccctcatcagccaagcccaaaaccaaatcaggcgtcttttgtgagaagtttgaaatctatttcttgtagcaaaaacctcacgtcttgtgactctaactcttccttgactctgaagaatccatagtgaacttccttgagtaatttcagaacattggccaatccaccattgtttttactctcgtctctcttctccaccgtgtaagaccttgactcttctgggccattgactctaaaatagtggtactcgttaatctctactaggttactcttgtgatgcgtccaaacatcactcgtatcatccacaataaccactccacgctcctcagccaaaaccaaatcaagcgtcttcacgtaaggagactcgtctcttgttatcactctatcaccaaagtagattctcttgggatcaatcagcttcaacaaggattcgacgtacactctagtacccattgtataaacatacattgtgaacaactcgttggcttccttcaaaaactcgtgaacaaaaggccgtagctttgtcaagtaatcgctgtccaacttccacagatcttcccttgtagttgaacacgcttcttcgattagacacttctctgtttcggaaagaagtgaaaccctaatagagtggagaagcgtgtggtccaagtcgagtacaaggtttagcttcttctcgttgagacaatagaattgcgtagtaaagcgcttcgtaaacgctgctgcttcgtggcttagctgcaaaccttgaacgagataatcgaatgctctgccatggcgtttgtttaccgtcgatttacaagcgatgcagactccgtaacgaacataccagtgaccgcagctactacgagatgacgaaagtgacgaagacgattcgttgatcgccggttcgaattccatagaaatgttttcaactgcaaacatgatttctctgattgagataatcctttctctgtttgatttgaaaatcacttagcactgatcagattgtttttgagaacagaaaaccacagtaatcgagcaaaacaaaaccctaatttgacaagaaactgacagtagaaagtattttaagggtgtttcagattagatttaaaaccacaaaaaattgtaaaccgggtgatccaaattagttaccttttttaatctaattaataatgttttattccataactaataaattaacaacaagaaaatcataacttttaatctaaaaattctacacaagttgagataaaattattagatttctgatttatcaatctacacaatgatatctcaccatctgtaagattaatcagattatgacacgttttaacaaatttaaattttaatgtaaggtataataaactaacaagataatttattagctaggcaaactaaccatcaaataaaaaggaaaatttacaatagtctgaattaagaaaagaaggaaaaaaagaaagtaaaagagggatatacagtatatgtagaatttcactttcttaaaatttaaagcataattatttttttgaacaaaaaaggaataattattattgctctgtaattttctggtattagtaaaaatcttagttgtcatgttttcaaagatttttacttatgttttacgaatttacctatgaaatcaattaaaaccctaactaagattttcgttaccgtcgctttctcctaagtaagatg

SEQ ID NO: 72 - DNA, 2502 bp, Unknown
  misc_feature (1)..( 2502): cDNA_ID_3013454_gDNA_ID_2166_Annot_ID_145578 3000 nt of promoter + ATG
  misc_feature (689)..(689): n is a, c, g, or t
  misc_feature (758)..(758): n is a, c, g, or t
  misc_feature (925)..(925): n is a, c, g, or t
  misc_feature (930)..(930): n is a, c, g, or t
acttgagggacaaaacattggattgggttgtgacaagtctttagactgagacttgagggacaaaacattggcttgagttatgttggtgcaatgaaaatggtacccacggcttcaaactttagtctttagactgagacttgagactgaacgttgatcattcttggtacccacggctttaaaatcacaaagacatatggatcatgtttagtttcttgtttcggtctttagacaatagttacccacggctttaaatgttacaagtctttagacagagacttgagggacaagacattggattgagttattacaagtctttagacagagacttgagggacaaaacattggattgggttatgacaagtctttagactgagacttgagggacaaaacattggattgggttatgttggtgcaatgaaaatggtacccacggcttcaaactttagtctttagattgagacttgagagtgagactgaacgttgatccttcttggtacccacggcttttaaatcacttagacatatggatcatgtttggtttcttgtttcggtcttagacaatagttacccacggctttaaaaattacaagtctttagacgagacttgagagacaaaacattggattgggttatgacaagtctatagacagagacttgagggacaaaacattggaatgggttatgacaangtctttacactgagacttgagactgaacgttgatccgtcttggtagccacggctttaaaatcacacagnacatatggatcatgtttggtttcttgtttcttagacaatagttacccacggccttaaaaattacaagtctttagacgagacttgagagacaaaacattggattgggttatgacaagtttatagacagagacttgagggacaaaacattggaatgggttatgacaagntcttnacactgagacttgagactgaacgttgatccgtcttggtagccacgactttaaaatcacacagacatatggatcatgtttagtttcttgtttcagtctttagacaacagttacccacgggtttaaaaatgacaagtctttagacagagacttgagggacaaaacattggattgggttatgacaagtctttagacagagacttgagggacaaaacattggcttggtttatgtttgaagcaatgaaaatggtacccacggcttcaaactttagtctttagactgagacttgagactgaacattgatccttcttagtacccacggctttaaaatcacttagacatatggatcatgtttggtttcttgtgttggtctttagacaatagttacccaggggtttaaaaatgacaagtctttaaacagagacttgagggacaaaacattggattgggttatgaaaagtctttagatagagacttgaaagacaaaacattggcttgggttatgtttggtacgaagaaaatggtacccacggcttcaaactttagtctttagagtgagatttgagactgaacattgattcttcttagtatctacggctttaaaaccacttagacattagacatatggatcatattcagtttttaatttcggtctttagacaacagttatccattaaaaatgacaagtctttagacagagacatgagggacaaaatattggattgagttttgaaaagtcttcagaaagacacttgagggacaaaacattggcttgggttatgtttggtgcaatgaaaatggtacccatggcttcaaactttagtctttagactgagacttgagactgaacattgatcattcttagtacccacggctataaaaccacttagacagacatatggattatgtttggtttcttgtttcggtcttgagacaacagttacccacaactttaaaaatgacaagcaagattatgattgattgaagtctgtaagtcttgtttatgttcaaagattggataattgaatctgattgtctatataatgctgtctgggcagcataacttcaagtctctgcatagaattgccttcattaaggcttttctaatgatgtcgtaagaacgagaaattcaatgatatgcttataagacttgtctaatgatgtctgaatggggaattctcttgcaaggatggaggaataagcaagcaagctgtgattaacactgtaacacttgtcacagttctatatattgctagctgggcagcataacttcaagtttctgcatggatttgcctttattttaaggcttttctaaaactcaatgatctgcaaattgatggagagtaaattccatgttctactatagaactcaatgatctgcttattgatggagaataaatgttcttttatagaactcaatgatctgcttattaatagagataaagtatcttttataagacttgtctaatgataactgattggaaaatgcattaaaacatgtagttaatcctctttgcatagctcttgaaactcttcctgttagcgaaggcacatcattgtgcaacgcttgatg

SEQ ID NO: 73 - DNA, 340 bp, Unknown
  misc_feature (1)..( 340): cDNA_ID_1688809_gDNA_ID_2234_Annot_ID_145590 3000 nt of promoter + ATG
ggacgattgtataaatattagacctcattcacacaactctcactctcttacatttaatgtgcaagaaaataaaaaaaactatatactatagacgtgtatctatatatggttatgatattaaagccatccattaaatgtaattagttgtttgttgattgttgctctcaagtctcacctaaagaaaaccttaggcctacaaagattaatcactatctttataattccctctccaaccaatataataaaaataacctagacgaagaacaaacaaaactctctctttctctctctctctaataagtaaggttttgatctttttcaagatcaaacaaaaacaatg

SEQ ID NO: 74 - DNA, 206 bp, Unknown
  misc_feature (1)..( 206): cDNA_ID_1688835_gDNA_ID_2253_Annot_ID_145599 3000 nt of promoter + ATG
caatcccaatgcatgcttgtgtccgaagcatgatgtcatcatttgttagttcccctgtctcgttcgatcaaaaaacacgttttgacagaagagattcaaagtgacaatcagtttcaagatttaattctcttacccactctctcaccctggctttcataactttctccgggaataagaatcgccggaaaagaagaaaaccgccaatg

SEQ ID NO: 75 - DNA, 239 bp, Unknown
  misc_feature (1)..( 239): cDNA_ID_1688839_gDNA_ID_2263_Annot_ID_145602 3000 nt of promoter + ATG
gtatctgacatgtgtccaatcgctgcgtcagtacgcgcgcgtgaagctcaggaaccgaagcgtctcgtaggtttaatgatgacctcgtaggtttgccgcccattcgcctctatttatattagattaaaccctcgggaaatcattttccgccgcttgcaagaagaatcaaaggtagctctcgctctctcctctgcgaattattttgtactctcgattctttatcgatttttccggcaatg

SEQ ID NO: 76 - DNA, 1781 bp, Unknown
  misc_feature (1)..( 1781): cDNA_ID_1688863_gDNA_ID_2273_Annot_ID_145608 3000 nt of promoter + ATG
gataaaaagcccctgtggacgcaggaaaatgctaccatacttctggcaggcttccccaaccgttggagtgtagataacgggtagcaactcctcgacgtgatcaatgagaagtttgtaaaacagcctctcgttggtctcctgaaatacaaaagcattgtgaaagaagttgggtaacaaaggaaggcacttggtgtagttgagatagcgagacttcctaatgagttagtttacctggagatccatcatagccatatacttctgcaagggaacttgatactgacgaagagtgtgcataatttttttaacctgtagacaaagcgtgcagtaaaaggatcaaaagtccaaatctccagttgcatatatatatagaaagggtaagtgaaacctgacaagacgggaaacctgaagatcttgtgagataacagtgggggggaggaggccgcgtagatagtgagcgtcacgctctctgtggctaaaggcaaggcctttgttgtgatgtggatcacgcaacaacgtatacccactggcgacagagagagaccaaggagtgataggcatgtcctcggtggcggcatcctcgccgtagacatcctgaactccaccagatacggtggatttgggaacaatgtcggcggcggaggtctcgagagaggaggatgaagtggcagtggtctcaatcaaaacgctgccggtgggatcctggttagatccgagagaggaaaagactctcaaggaagcaggaggagtaattatagttctaggctggcgcagagagaggcgtgtggaacatccaggaacaaccgtcttgttctgagaaaccaaagcaatgagactttttcgtatataaaaaaagatgagacatggacgatggatggagaaggaatgatgtaaataataccagaaacaacgagggagtgagagagatcatggcgtctggggatgccttgtctcttagacggaggaggagaagggaggagacggagagagtcttcttcttcagagcggccgtggtcgtggatttcagcgcggccgtgatcgtctctcgctcactttctctcttcctatctccctcacacgctctaaatctgctgggagagagtcttcttcttcagaacctccattgttgacgtgtcttcttccttttctatctcttcccaaattgcgtctccactccttggcttctccctttatttaccaatttgccattgctcaccggtccctgtattggtacgcttttgtcaattttagcccacaaaatctaaattataacttttcgttgactctgacctctctctcttatttcttttcaattgaaaattgtgactcaaactagcaaaaggacagacaatttcaagcgaaaatgcaactaccatcaatgtactggtactaagtagatttagttggtttggaattggtatgagagagattcaccacttgccctctctacttgacatttatttttttatttatgtgacagaaaaggactcttccaacttggacttgtgtcacactcgatgcccatcctgtgaggatccacgtcaattgggtaaacaaaaggccgcttaaggcccaacttgggtccatccataatatgatgaatagtgtcatcctctctggtttttggaaaaggaaaagttgcaatgaataaaagcaaacaagagaattgcatctcatcattatgctcttgctttatttaacaaaaactttttctttggccaatgatcgatccttgctctacatatatacaagtattattacgagtaagaccccaaacaaacatg

SEQ ID NO: 77 - DNA, 298 bp, Unknown
  misc_feature (1)..( 298): cDNA_ID_1688872_gDNA_ID_2279_Annot_ID_145611 3000 nt of promoter + ATG
  misc_feature (191)..(191): n is a, c, g, or t
gtcaacaagaaaaaaaattaaacttgaaaatgcccaataagttttctacttggaaatatatactaactctattattaattctaattctaggatttaagatcgagacatggctagcaactattttttaatattcaaatattttttgcccaaaaaaaaaattcgtatattttgtgaaacaacttaatgtttanaacaacaaaaccctaacttacatgtttacttttcaagtgcaaaataaaaagaaaattttcctatatatagtatacataatccaactcaatcaaatcacaaagcaatg

SEQ ID NO: 78 - DNA, 305 bp, Unknown
  misc_feature (1)..( 305): cDNA_ID_1688917_gDNA_ID_2301_Annot_ID_145626 3000 nt of promoter + ATG
cataattgaacattgtttttggaaaataaaaaacaaatccctaattcaacgaatctacttctcttatccaacacgaaatcaagagttttaaaaatatgaaaaatctaaagaaattattcaggtttcaataatatctaaattagtgcctctaagtatatttttatataattaaaaaagcatattttgttttgggccgcatgaagtcaggcccaaatatttaaaggcttatttgattaatgatatttgaagacatgtccttgaatcggagttttcgaaaattttgaagggagcttttctgacagatg

SEQ ID NO: 79 - DNA, 1591 bp, Unknown
  misc_feature (1)..( 1591): cDNA_ID_1017185_gDNA_ID_2304_Annot_ID_145627 3000 nt of promoter + ATG
acatatatgtaggtgtttattgtgcagagagagcctctattcattagcatttcccatagcttatctgccttttatgtcatgtggttggtcgtaaatgcttgtgatatctttcttttgtagtcagttttaaacgacattagttttcttatataatattgcagtgccttgagggatcgcaggttcccacctatacaggccaaagaattgccatctctgcagtgtacggtgtctgtcttgactgattatgaagatgcagaagattaccttgattgggaggtatattctcttcactcttttcttacaatatgtcaatctcacgaattaagaatatagttgccaagaaggaatgcatactattcaatgtacacagccaataaactttccgttgtcctttccctcatatcattttcccgcttagttaactgctctgccttgctcatgacattgtagtttgtcgaattcttcttgtttgtagtttgtcttatacattgtcccgttggtgatattttgttttgtgatttcactctaaaggttggtaagcatggtataatcattgagtttactgaacctgagactaatacaaagcgaagcgccacatatttgcctgaggtgccagctcatgaaggtaccatttcaatacaataattcaagtacgtgttgttgctattggtattgttgatacaacgattactttttttatccccaggctggacaaagatagaggcaatcgattcgctggtgcgtaaagcaggatacaatggtgtaataacagaagcagtgcgtaggcgaatcaatctaacgcgttaccagagtacattattcagcatgcattatagcgaatacctttcatatgtgaaggcgaccaggggcgttgttggcccggttattaatgggatcaacaagcacgcctttgcctgatttgcacctgcaaatggatgccattgattatgtttggctacctcctaatttatcctctgtcttgttgtctggctctcataaaagaaacgagacttcgaacttggctgtttcactattgtaacattaattaaatcactttcatcccttctctctttgttcctcacttcctcttaattagactcgatgttaaaatcgtatcaggtaaacttgaacttagtgttgacaatgtccaaattgaccaaccgtttatcaacctcatactacagtaacaccaagtcaactgtttttgttaaaagtcaactcaaagttggaggttacttatggttaatttaagagtacacgcttatttcgtaagaatattttaaaagttggaggttatttatggttaatttaagagtacacgcttatttcgtaagaatatttaaaagttgggggtgtttattttgattttttcgcatattaaaaaattaagaatcatgaatcgcttacgcatgtgcagtttggacgcaactgaatcgtaccaatgagatcatcctccttattttaatctcccacctgatttgagctgtttctttctctttcgaactctccgtcacttccatttcatttctatttgaatcttctcaaagctacacagatctctggaatcgaaaaagcttgagctgtgttaatg

SEQ ID NO: 80 - DNA, 499 bp, Unknown
  misc_feature (1)..( 499): cDNA_ID_3013649_gDNA_ID_2306_Annot_ID_145631 3000 nt of promoter + ATG
cgagatagggtgaagaagagagagaaaatcccgacagaggagagagagataaagaccgatctaaagtctgtaggttcttcttctgaagctgaagctgggttcgaagttcagcttcgttgatgcagtgttgtcgttttgacgcaaaattgctacttgccttcctatggatatgggcctaactataaaggcccactaaacatataagagtcggtattttcctgacaaaaaagccctaacaagttgtcggatttacaatcgtacaccctatttttaagccgcgcttatctcgaacctatacctgtagagaggaaataagcatttgggggaaatcaatcgaaaaccctaggagagataaaaacaaaaatctagacggagatttatggcgacagcgaatcctggccgtggaggtggtagaagaggcggtggagctatggatgacgataagttggtcttcgagactaccgatggaattgagcccatcacgagcttcaatgatatg

SEQ ID NO: 81 - DNA, 447 bp, Unknown
  misc_feature (1)..( 447): cDNA_ID_3014503_gDNA_ID_2330_Annot_ID_145648 3000 nt of promoter + ATG
taacctaaataattctttctttttgtctccaacctaaacaattcagtacctattacactattatataattttggtgtacctaatgcactattatagtgtttactataattttatgacagtagcaccaaaaatcatgctatttttattttctttctaccgtgccaacgagaaacacaacgttgtaataatcattcatattattggaaagttggttagaatttaatatcgagggaagtagccaagcttttagaaaaaaataacataagttgagaagaaacgtgattagagaaagtaggtcatctgactgattaaattcaaatgtaacaacagacaacccgtaacatcatcagttcatcaccttcccctatttaatattcatatcgcaacttctccctccgatcaatagatccgtactcgaagcaggaacgagtgaaactgaaaaccatg

SEQ ID NO: 82 - DNA, 1633 bp, Unknown
  misc_feature (1)..( 1633): cDNA_ID_3014485_gDNA_ID_2334_Annot_ID_145651 3000 nt of promoter + ATG
gagggagaatgatgagcagttgcagatggggtgttttctaaaccaactttatggataggccatgatacaaaagccaacaaacagtcttcaaggtatgtagtatccattgtaggcctccatataaatgtatctggctgatgtattgaatccataaagatttttactgcttttggtccaagaggaagtccattaactaatgcactttcatcttgtgtcagccaaggaccctcagcaataatcacctaacaatcattttggttaagtgttggcggattaagtaattttagattcccacttatgatctttcattcatagcttttatcatgggcttttataaattaccaaaataaaaacttatctttcataacagttacagaaaatgagctatcctcgtgtgctatcaatgtggatatttgttgtagtgtaagtaataaacaaatagattctaaccgagtaaccagagcaaacgtttcttcaaagttcacatgtaacattcccaatctcaagaaatgggctatacattattgaaatcaaaatttgtagcccactaggcctatatgaagcaaactcccaaaaacaagggtaattaatctttaatatgtagctgtataagcattttcatctaagtttagcaaagtaaccttagccactaagagaaacaaacgaaagagagacaaagagagggagagagaaaagagaattatggtgaggcaaaggctttggtcaccatttgagcttcactgatagtcaccgtcaaacacttcacccactagaaccaagatctaatagactagtttgtttgggtaaggaaactcttacataattatgtcttctcctctttcaagtcttttgttttggtcattttggaacttagcttaaaatactaattttaggtcaaaaattagaggtaaacttaggtgaaaaattagaggttgcccactagtctccggaagttgtgccgtctaatgtggcttaggcagaagcaccactagtgaatgtcctgaggctaatgagaagtctatgtttagaaattttgtaggttccaagaatacatgcggagagagcgaggtatgagaggagcatcagaagtgaatattctacagcatggcattaccgaatgaggcatccccacctccaccacatcttgtgcatgcttatagacaagatacatcgtatgtggatgctatcagatatttgaagctcgtgtgtatggagttattttgtggcaatctaaccctattgttcctaataaccaaagaacaaaattaaaaagaatcttgataatgttagatgtctacaaaagtactgtaaggagttagtggttcagtacttaaaggaagaaactcaactataatgggataaggttgtagcctagatgtagggacgatatgagttgacttggaaggatttcaacacatacttcttaatgaagcattttctggggaggcaatgtaccagatggagaataaatatttagaacttcaccagggaagcatgcttttagagagtatgaggaatagcttgacttattgagttggtttgcatgtcatttcatagatgatgatgagcttatgcttaggtttttgaggggacatagaattgagctcaagaatcgttttgagatgtatatatg

SEQ ID NO: 83 - DNA, 569 bp, Unknown
  misc_feature (1)..( 569): cDNA_ID_3029968_gDNA_ID_2349_Annot_ID_145662 3000 nt of promoter + ATG
gggagagaatgatgactgatcatctcttttaacaccgagccaccatcgtctcgacgctaacgagggaaaagaagagaacaaagcgtgagagagatagagataaatccggttctagaatcccggtttaaccgccataccggtggaagattacctttactacgctctccgcttcttcttctcctcgattcgattctcctcatgggtttatcatgaatttttaggtgagaatttcgatttttgtaatttgatagtcttctctaggttggagcataattggcgttaggtttggtgattggtggattcagtttccattggtttttgataatttgtgctggcttttggccattgattctgctttttcagttttcttaatttgtgtgtggattatttgctatctgacagtattatcctctgctctcgcaatttggacttgaggaattttacattgatgaatttgattttcttaggttttgagtaattcagaaactcgagtgatgatcccgaatgatgatgatgatgcaaattctatgaagaattatccgttaaatgatgatgatgcaaactctatg

SEQ ID NO: 84 - DNA, 288 bp, Unknown
  misc_feature (1)..( 288): cDNA_ID_1714593_gDNA_ID_2353_Annot_ID_145664 3000 nt of promoter + ATG
atcattttggtagtttctgatgagaattttctcggatttacagaacagaaaattcaaattggggatgatagttggaatagttagggtttctgattttggttggttgtgaaaatcgtcatgtgtgtaagtacatttagcattttgggtatagtagaaaatggaaaacttggcaggtgaaagttaggtttaggtttgattttgaatgagaaattgattgattcaaatctctggatacgcatgatgagttcataggtccagcaaaaagctactgtttgtgatttttgtatg

SEQ ID NO: 85 - DNA, 504 bp, Unknown
  misc_feature (1)..( 504): cDNA_ID_3013567_gDNA_ID_2362_Annot_ID_145667 3000 nt of promoter + ATG
ccggtggttcttctcccaccgccgtatgttcttccagcgctccggaccgccgtctggtctgactttaatttgagatctattccgatccctaacagctacttctggtatactatcgttctctctctctaacacctctgcgtatttggatcgtattgactagagtcttcccattatacttgcatcgttctctcttccatggtttcgaacttgtttaagcttatagtcttcaataccttctaactatctaaaaggtttcgtgtttcaatttgcttctggtgcgatttgctcagtgttttctttctctaccggaatcagctctagacaaattgtttgctatgttattgtattcactgggattttggatagtcccagtgaaaatctttcaatcttgttcgtgttacattttctgatttatgagaggaataaaagtctaccactttaggtaataacttatctcttttgattcttgtatcacagcaagtttcaacttggaaagaaacaatg

SEQ ID NO: 86 - DNA, 1569 bp, Unknown
  misc_feature (1)..( 1569): cDNA_ID_1689086_gDNA_ID_2364_Annot_ID_145671 3000 nt of promoter + ATG
ttaactatatgaactaacttataatttgaatttactacataaacaatcaaaatatggctgaaaccaacaaatcaatagatgccgttagttaaaccgttaatgtagctgactaggatgccacatggatagactttacaaaaacgaatctaaacaacttaaaagacgtcgtatctgtgacatctactgtctcttgaactattgtgttcaagggacagtagatgtcacaggttcgatatgtttatattcgtttacattcagtttacttctaagaaaaatataatatttttttttaaaaacatatatttcatcaagcaaacctgaaatagccaaaaagatttttttttaaaaagccaaaataaaaaataaaataaaaaaggaggaaaaagggttccataacaagaaaagagaagaaaattaaaaggctaatgactaaagatacattttcataataaaagaataaaagaatttaaaaaatgtatatgagcaaatcataagcaaaatataagtattaaacaatatcaaataggtttaaattaaatttattacacagaataaaataattagtaatcatcaataatactaaaaacatatagtagtacaaataaaaacatagtagtacaaactcacggaggaaacgggtgtctaacgtaattaatttttcgattcaaaccaatgattcatcgcctaagatttttgtgccggtctagcgacacaacccacatatttttttcaaagttgatttataaagttctatgagttgtaaaacattattaccttagcaaagagagacctgcggaagaatctggatgttgtacaaatattcaaatttcctatattaccacctcgtttacaatttattaatggttatgatatatatgtttgtgactcagttgcttgttaagtatgaaccgtcaataattaaaaagtcattttagtagaaaaacaaaaaaaatgtataattgtataacaagttaacaacccacgtatgttacagagttgatttataaaaaaagattggggacagagttaccattagaagtttggatcgaaacaattgtttttttttgtttttgataaaatattgatcgacacaattgtttgacattcatttaatgttcttaacacaaaaccaaaatccatatgactatatttatattaattatgttgttagttttgttgaaataagttatccaaaaacaaatttcaagaataatttgaaagattttgggtctttctactttctaggaattgcaaggtcaaggcggttggtcttgtgtcatgattttcttcgttttaactattcaaagaaaacaaatattgataataaaataaccttgttgtgattatctagaaaaagggctgtagaagaaacaagaagcatctctgttttatgttcccaaatgaaccagaaactcttagaaacttctaacacctcttagaaaccaaccttttagcataaaccctaatcccatctttataaaccaaacacttcttgcctttttcttgcaaactcacaaaaaagaagacaagaagacaaaaattaagaaatttaccgatttgaaaacaatg

SEQ ID NO: 87 - DNA, 314 bp, Unknown
  misc_feature (1)..( 314): cDNA_ID_1689090_gDNA_ID_2367_Annot_ID_145673 3000 nt of promoter + ATG
acatgattggtgttttaggattattgactaaaagcctattatcaatttggcgccgttgacaattgggtgtttgtttgctatatttgagatttcagaattgttaagatcaagttcgtttttggtataagagatactaacattgtgtcttttcagactttgtatttcaggtacttagcaaccaaactttattcgtctgttgtagtcaggttgctacatgtcatacacggtcacaagggaatcagaacttcgtattcaacgataacatcgaccgtattgctcgccaactgaaagaacagacagcaacagacacaatg

SEQ ID NO: 88 - DNA, 593 bp, Unknown
  misc_feature (1)..( 593): cDNA_ID_3013435_gDNA_ID_2391_Annot_ID_145692 3000 nt of promoter + ATG
cacaacacgtactttgcttaacatccctgacttcacatttccagctcgccagatcaccagctcaccacgttaatcctgtatcacattcccataggcttcacgtcttcacctcgtcaccgatgtgcagatcggctcctggttccttttagatcgccgggaaatcgatctgacctacgctcacgtcttcacctcgtcaagagtagacttttttatttaacactacacttggaagactttcttacctactctcactatcgacccgattcttcagaaccgggttttggattcaatttcggataacccctaaattggtacgccaattctcagtcactcagaataaaaaaaaggctcacctttgtccacgaatcgcaagtgagtcatagaaaaatcgaagcttttgactgatctcagtcactttagtctccctgctcacgacccttctcgtctacttagggttatctccatttgcccctcttcctgtcaactttcaggtattacttgtcaataagatgtgaaattgagtatgtgcatcagatgtttcctctagattgaactgattccacctttgatatgcgcagacacgaaaactgatg

SEQ ID NO: 89 - DNA, 233 bp, Unknown
  misc_feature (1)..( 233): cDNA_ID_1689176_gDNA_ID_2399_Annot_ID_145697 3000 nt of promoter + ATG
aagatccattaaaaaaagaagtcgtctctctcaaattgcaaaatcacccccacaccaaaagacaaaattaccctgcgatttaattattatgaatttatgacggtacctccacgtcaatggctgatgccacgtcatcacgcatgttgagatttggtggagagatccggggttcttagaggtatccaactatccatccatcatcggtcagtccccaaagtcggcggaagaagatg

SEQ ID NO: 90 - DNA, 1814 bp, Unknown
  misc_feature (1)..( 1814): cDNA_ID_2026252_gDNA_ID_2404_Annot_ID_145701 3000 nt of promoter + ATG
ggcaggtttgtacactcattcttgcttctgtatatgtatattcagcgagcatcgaaattgttgtgtacctttgttaacaaacaacctgcatctgtcacagctgtatttggacatgaagtttgtcatatgctttgcatcccaaggtcgctacctatcgaggaatttgcacaggggaactaatgagataatatctaaagccttagcagctttcactgcaacagggatagatccatataggtacatcggttttgagggtgttttgcaatgttttagcctttatggtaagtataaatgattaaaatgtggttgtgaatgatgtgcagtgagctgccagaagacgattggttcaatgacatatgtgtggatgcgatggaaagattgagtggcaagacaaagggcaacaacggggatgtccacagtccgactgcttcagtgtcagctcagtctgtttcatcagcgagatctcatggcagctattgaaaccaaacccatcttacatttgttaagaaggtgaatggtcaataacttttgatcttctcttttcagctctgcttttccaaaagctttctattttgtagagtctccagttgttgatgagatgattttgggggcgtgtaaatgttgttgagttgacatgtttgttttcttgtattggtcctctctctctctctcaatggatgcattctttgggttaaaatattgaatcagatgtagcaaacttgaatgagatattttacgattcactttttgtatttcctactcgaatcatgtagttcatagcgtaaattagttttaagtaaatcgtgttgtgtaaactcctagtctaattcttggtacggtgggtcggatcttgggatgtacaaaagtttgaataatgggtaaggacggttacctaccacatggacccttaaaggcttggtaatttggccacgcatgcccgataaggcaataatcattcgcgaatgaggcttagagatgctagagtcatccctcgccattgatgcaaacacctcctttgcttcttttctacatgtttgagattcatgttttgacagatgacaaacaaaagtaggtggtgatactcaggctgtgaatggtaaccaaaaccgtaccgcaacagtgctgtaacgtatcaaaatctttacatatacatatgtatctatgtatttttgttcctatttgaaccgcaccgcacttctcctgcaccgcaaaacgcagtcaccattcggagcctcagaatgtataaaacatggcaaggaagatgtgatgttgatagctctatggtagatttcaggtaatgacttttccaatgataattccaagtgatagtagtctatagtcacgtgggaggaggcacaatcagactacattactgaacattttgatttcagcttacttaccattcacatgttatgagctgaatctgatatttaattaacaaaatttgcctcgttacaaaaatcgaattatcagggtgcaaaacacaacaatttattcaatagattatttctattatgtagcttaaaatattttatttttttggtgagaaagtaacttaaagtattttaaatgtctagtttgatcagaatttttattttattttgtgagatatacactgtgggactaaaaagaataaaagaagagataaatataataataaaatattggaggtgaatttgtttgtaaaacaacaagtggaacaactggtttcgcttcttcttctacagagcttccctcgtttcctccgccggagagacactccattaaaatcccttcttcatcgatccttcattagatttacaacaacaacaatg

SEQ ID NO: 91 - DNA, 461 bp, Unknown
  misc_feature (1)..( 461): cDNA_ID_1689202_gDNA_ID_2411_Annot_ID_145707 3000 nt of promoter + ATG
agaaaagaggacattacaccgaggagtgtcgcgccgttaaaaagtttatcgcagctggggttaaaactaaaaaaggttcaaaccccaaagttgaaacccctcctcccgacgaacaggagaaggagcaaactccaaagcaaaagaaacgggaacgaacaccggagggaagtgactctcccccacccgctaggagagaacgcatagacctagtctttgcagaactcgatctaagtggcaggacaggaaggtcagtcaccacaccttcccccgcctcgcataagaaaaacataaggtttccattacgcctctcaaaattctgtagaagcgcaactgagcacctctccccgaaacgcatcgatttcatcatgggagggtctcagctctgcaacgattcaatcaattcgatcaaaactcattagaggaaggcagattcttacacaaaagacaagagcccgatgatg

SEQ ID NO: 92 - DNA, 791 bp, Unknown
  misc_feature (1)..( 791): cDNA_ID_3013557_gDNA_ID_2413_Annot_ID_145709 3000 nt of promoter + ATG
tctctgtaatcttcgacggaccatcgtcgtaataaacgtttttgagatgcatgatcttgagacaaggtaaagaaacaacaagctcttgatgcttcattatcccaacatttgcaagctttaaagaaaccaatgtcttgctcttataaatcttcttaggcatgaattctttaataatgacaggattcttgttctcagcatctagatgttgaactccgcgatcaaccgcagtggcgatccactccaagaatctgttggtacatacatgttggacatgggcttcgccccaccaacatgtttaagagcccaacacattgaaatcagcaacaaggaaggaaggaagaaaagatcggcccattaaagataaaagagcccagcatcagacgaagcccgcctcgaggaagctgttgatcaagagaaagtcccacatcgagaagaaaactgtactatagactgtccttgcagtactataaatactgacaaaggaatgtcagaagcggggaccgaaaaatgggcagagaaaagtaatagaaacttctaattcagattcaaaagcataagtctagttttgacttgcaaagtttgtatttacgtaagtttaggctcggctgtggaaacaccttgtaaacagccgaacttcaaggatatcaataaagatcttccttaaggctcgtcatttcattctccggtttggaggttcggttttatactccaacaattggcgcgccaggtaggggtctaccacaagaaaaggagaagagaaagccgaggaagatctacgagaaggaaggatg

SEQ ID NO: 93 - DNA, 638 bp, Unknown
  misc_feature (1)..( 638): cDNA_ID_20646_gDNA_ID_2415_Annot_ID_145712 3000 nt of promoter + ATG
gtcagcacgtaagaaaaggaagatcaaatgacatcatgtcgacaagaatttaatcaacatgtcgatgtcttttaccaaaaagaaaacaaaaagtctttaacgtttaacgggactacggtacaaaatcgtggataaggtacaaaacacttttcattctaaaatgtcttttcctttcttttaacaaattatttcgtcagcacgtaagaaaaggaagatcaatgacatcatgtcgacaaagatttaatcaacatgtcgatgtcttttaacaaacaaaaggaaacaaaaaagtctttaacgttagtacaaaatcatgtataaaaggtatgtgattattatatggtgttcaagtataagtccgtcgtgtgttctttatggacttgtgaaatatcaataattatatctctgcggagatttgatgggaccaagtcggcgggcttctttggtttcaaaagaatcctctcaccgcaagtcgcaagaccgaaaaattgtggtttccactttaattccacataataaagttaaaaacgtaagaccgaaaatcaaatgtcgacaagaatatttgtcttataaagacataacgagactgaaggaaaaattaatgctcaaaccaaatacttcaaactcaaacacaagaaatg

SEQ ID NO: 94 - DNA, 914 bp, Unknown
  misc_feature (1)..( 914): cDNA_ID_1689239_gDNA_ID_2421_Annot_ID_145716 3000 nt of promoter + ATG
acaaagaaccggaactgataaatttagcaagaaattgttttgaaaaaccctttataaaaacatagtaatagttagtctaacctacttgagaaagaaaactaagattatgaagtttggattttcataaatggaagtagatttagttgcattaaggatttttccggcaatgtggtcacaaagacgagcaccaatctcattttgtaacagtgtgtgtgaattccgaaatattcatatattcttttcagaataattaaaagttttcgtcggcaaaggatgacagaaaatatcgtttcttttgcaacaggttgtctttgttgttgacacttcatatgcaagagttgtcgttcttttctttgatgtaatcattttgggccttggcctttaactttaagcttgtttgaatcaataataaagataacattctcgtgaaaaaaaataaaaaatcacttattcttcacaagcaagaactatgagaaaggtggagaaaatgttcctaattaaccagtaaacaccacttgtccattagtggctattactgactgtcgatgcaattgtgaccgaaatcgacctctgcatcgtctcctcgatcaggctttagctgatgtatacaacaatcacaatctcaggacttaggagatactggctctgtacattgcaaaaccccttacatttcggtaaaaaaatatcgagcacagaaaccggtacatttcggtttactaactggtgacaagctggtttattaacacagttaaaccaaataattatttcgacttatatgagttagagttatgactgactcatcactttatatctctctttctcaaaaaaagtcaatggtgaatacgccttttccacagatttttgtctatgtgaacttcaacttttctcgctagtcgctactctagtctctcatg

SEQ ID NO: 95 - DNA, 1565 bp, Unknown
  misc_feature (1)..( 1565): cDNA_ID_1689243_gDNA_ID_2423_Annot_ID_145717 3000 nt of promoter + ATG
tgagcttcttcttcatggttgctttttttgaatttcttctcatgaaccgatagagaactctgtagctcatcgatcgtcattctccctgtgtctttggactcctcgatagacacaacaacatatgtgaatctttctgtcagagttcgaagtaccttctcaacgatcttcgaatctggcatgtcttccccgttacttctcatcttgttggaaacaatcatcacccttttgaagtagtcatcaatgttctcattattcttcatggcgagaacctcaaaatctctccttaaggtttggagaagagaacgcttcactttctcgtttcctccaaactttctcttcatggattcccatatgatcttggatgtcacgacccgatcgattgcttggaacaagtaatacttgacttgatgatccttcttcttcaactcctcaagactcttctgctgcgctacagtagtctcgattcccgccgccggctcgggaacgccatcttctactagattccacaacccctttgctcgtaagaggttctccattaactcgctccaatgatcataatgaccatcgaaatgaggaatcgcaagtgttttctcttcactcatctttctttcacggttctctcttttcttactttgatcacttttaaagttgtgttttgctctgataccaaatgtgattgtaatttcagagaagacacaatattgcactgaaatgatctaactttattcatcacgtctcaatgcattttatagttttacaacaactgaagcaaataacagaagcaaactaaaacaaggacacaactccactagctcaaccactaagctagattaatacaaaacagaattgactgaaacaaactaaagagagcacgtctctattattcctaaacttgcggaaacaaagacacgacacaacaaacccaacacgacgaccataccctcgatacagtagctgctccgctcatcaacgtccatttcgccgcctttagccgtcaacgttctctggttctgttgccgtacaaaattcttaaaggtcgcgtttttatgtaagcgtagggtttagttgtcgtcacgctctttttaattagactttgttaatttaattaggttaattagataagacctaaaacggcgacgtgtaagctgtcgtcttcttgacctttttggtgaactcctccttcttctctatagctcgctgcgtctctgtgtcttgttgcttggagcaagctctccagcgtgagttaatctaatctctgtaatgattaattaccttcttttacggtttctggaattgcatctgtgtgtgagcacttggtttgaaatatgatttaactagtgaattcgataatgctgttcaataagaatgcttagaaaagccttaactgagttttactcaccactcttcttattgaatctagaaattgaaagtgtgaatttttgcgagttctcttattcaaactccactgagaaaggtggagttttttgtctctgttttctccctaattcttatagtttgagctaatggtgttaatcaggctcaagtatagataaaataaaataatg

SEQ ID NO: 96 - DNA, 1792 bp, Unknown
  misc_feature (1)..( 1792): cDNA_ID_2686209_gDNA_ID_2423_Annot_ID_145718 3000 nt of promoter + ATG
caagacatggagcttactaggttggtggatgaaatgaagtaggccatatcttattttgttcttcccactcttctttggataccgcaacatatttgcatacctatcatagttatagtagaaatatgagattgcactgaaaatataaatgaatgagcagaaagaaatctctaccttggaagctaaatgaatcaaaaagccttgaagcaaatagtggtgagaaaagagaaaaataaacctacttcggtaataaaaggactcaactcatagggatcaacgagtctctgcacatcaggaggcatgtcacttaaatgatcgttgtgctcaggtgctagacataagatgacagtcaactgagtttcacctgtccaataagcttacaataaaaatctcataatcttatgattggtgtatcagcgcgccaagaaaactaacaatgggataccgcaatctggaagaatcttcttcttcacccttttaacatgacgaagatcttttagaggagcaatcttacataaatgcctatcatagcaaagtcaaaaaattcactcatgagattacagcactgaaatcaacgagtcaagagtcgaaacaagaatgacaaacctcactattgtattggcaaatctgggtttgattaggctagcatataccttcactgtgaacaacaagaacaacactcacacacacacagaagaagaagtttagataaagaacctttgatagactaaaaaaccaaacttagagattgaatcatactagtgggctgatggtcaggtgacaatgaaggcttttcaggtatatggataatttcccatgcatctgaatccattattttattttatctatacttgagcctgattaacaccattagctcaaactataagaattagggagaaaacagagacaaaaaactccacctttctcagtggagtttgaataagagaactcgcaaaaattcacactttcaatttctagattcaataagaagagtggtgagtaaaactcagttaaggcttttctaagcattcttattgaacagcattatcgaattcactagttaaatcatatttcaaaccaagtgctcacacacagatgcaattccagaaaccgtaaaagaaggtaattaatcattacagagattagattaactcacgctggagagcttgctccaagcaacaagacacagagacgcagcgagctatagagaagaaggaggagttcaccaaaaaggtcaagaagacgacagcttacacgtcgccgttttaggtcttatctaattaacctaattaaattaacaaagtctaattaaaaagagcgtgacgacaactaaaccctacgcttacataaaaacgcgacctttaagaattttgtacggcaacagaaccagagaacgttgacggctaaaggcggcgaaatggacgttgatgagcggagcagctactgtatcgagggtatggtcgtcgtgttgggtttgttgtgtcgtgtctttgtttccgcaagtttaggaataatagagacgtgctctctttagtttgtttcagtcaattctgttttgtattaatctagcttagtggttgagctagtggagttgtgtccttgttttagtttgcttctgttatttgcttcagttgttgtaaaactataaaatgcattgagacgtgatgaataaagttagatcatttcagtgcaatattgtgtcttctctgaaattacaatcacatttggtatcagagcaaaacacaactttaaaagtgatcaaagtaagaaaagagagaaccgtgaaagaaagatg

SEQ ID NO: 97 - DNA, 987 bp, Unknown
  misc_feature (1)..( 987): cDNA_ID_3014460_gDNA_ID_2431_Annot_ID_145728 3000 nt of promoter + ATG
ctacgaaatctctacaaccaattggaaggtttaatgttttacccttgtctcctccaatcatgtcgtttcaaaatcctctaatttctcagtcctagtgctaaagctcttgctgggttcaagttgatttctcagtcatcgattgaaattttctcgggaaaaagttctcatcgtctaccatcgacaacgaggttagtcgttaattggattttgatccgtctctctaccacaaattgtttcctttcgtctcctgtttatgtgtttttaccattatccgattcgcatcaaatccgtagcaacatttaaaactaagaatctgcaattaagaactgtttcgtagctgggattatgttcattgaagcgttaacttgattcaattgaacagttattgaaaggtggtggtgcttttgcttctttgtttcacagaaaccagaaaatgcaaagtcttagtcaacttggaccttcagagattttccttgtcgccagaagagaaaaacccagtacgaggttagttatgagcgactcgagctcgattcatgacttcttgagatattgcacttcttgactttggtgcttgattctacgaatttgcagagcacagctttggtttacgggaagactctcttttagacaagaaacaaatggtgagtgaatcaaaatgatacattggagaatctttgaaccaatttggtttagtaacgatgttgttttgttaggggttcgtttaaagaatagagtagagtttagtccaagacctgtacctccaaatctgattgcagcagagaaagaagaagctaaagcagttcttactctattcttcaagaagcaaggtcttagcaacagtctctcttctcggttaatcaacaaatccgatcaattcattgaccatttagtgtccaggctccattctgttcacaaagctcgatacctcgtaggttcgatctttcttcttttaaacctttactatgtaatgagaagagctcggcgatg

SEQ ID NO: 98 - DNA, 448 bp, Unknown
  misc_feature (1)..( 448): cDNA_ID_3014452_gDNA_ID_2436_Annot_ID_145730 3000 nt of promoter + ATG
tttgttcttgcttttgttggttttttctggtgaatctcctctgttcttgtctgaaattcgcatctttttttgaggatcacgatttccttttttatgttttgtttgagtaaaatgttggtgtttcagaaaaaatatgaatcgatagaagattcatatttcaattacaatggaagtttctgcgattttagtacctacattgtaaccaaacatcggttcttttgtttcaagtacattgtgtagattatataatatataatgtgcttgttacgctcattgagatattgagaagaacttcttgtttctttttaaaaaatcttcatttacaccttcctcctgagtttctggtaaagtgtcaattgatacttgttaataatctttgcaggtttggtttgtttcttgaaatttaagaagcttggggagagtttaaagatttgcaaaaaccagaatg

SEQ ID NO: 99 - DNA, 2552 bp, Unknown
  misc_feature (1)..( 2552): cDNA_ID_1024912_gDNA_ID_2569_Annot_ID_145788 3000 nt of promoter + ATG
  misc_feature (1)..(1): n is a, c, g, or t
nctatggaatagttcttcttgagatgttaacgggtcggaaaaatatggacgggtcttacccgaaagaagagaggaacttagtgaaatggagcagagcttttctagcagatgattgcaggctctcgcttataatggatcctcagcttaaaggtcggtttccggcaaaagcggcgaggagcatagcagatatagcacagaaatgtctgcaggtggagccatcagagcgtccaaccatgagaaacatcgtggatcaactcaagatcatacaggacatgaagtactcgtgtaggttcccgttaagagaacccgcaccagtcgcggcaaggaaacatatgggaagatcaagcagtctcaacacgattatttggaccccggcatcagtgccaccaaggtcgagtttttcaccgtcacctccaccacgacgaccgtctgtttcacccacaaggggacggacgctcgtgtttcccccagtgtttccgccgcgagcgtgttcatctttggaggaaatggctcgggaagaggttcgaagatcgtcttcagccagtggtaggagaactagcctcgaagggttttgatttgttcatatctctcttctttcttctttttcctatttgtttttaatttttggcgttgatttgttttttggattccaaatataaaaaattgtttttttctttttcttttgttgtttatgaatccggacgtcgatagagagggtttgtgatgttttgtacataataatcaacatttcttctttcacattaaaaagagatccaagtattgtgtacttaacagagaaacagaaaaaggaaaaagaaacctaccttattcaagaatctatctctctgattcgattcaaatcttttcagtgatcgttcatggcttcctcaaagtgtttgttgttgccgtcgctaccatttgagttgatagaagaaatactttacaagattcccgccgaatccttgatccgattcaaatcgacgtgcaagaaatggtacaatctcatcaccgagaagagattcatgtacaatcacttggatcactactcaccggaacgattcataagaacctatgaccaacagatcattaatccggtgaccggaatcctctcagacgcactaatccctgacgagtttcgcgatttgtatccgatttattccatggttcactgtgatggactaatgctgtgtacgtgtcgaaaatgggacaacagtctcgcagtttggaatccggttttgagggaaattaaatggatcaaaccgtcggtttgttacttgcacactgattacgttgggattggatacgacgacaatgtatctcgtgataactacaaaatcttgaagcttcttggtcgtttgcctaaggatgatgattcagatccaaactgtgagatctatgaattcaagtctgattcatggaaaactcttgttgctaagtttgattgggatatagatattaggtgcaacaacggtgtgtctgtgaagggtaagatgtactggattgctaagaaaaaggaagactttactattataaggtttgatttctccactgaaacattcaaggagatatgcgtctgtccttatactttggtgactcgattaggctgtttcgatggagatagactctctttgttactacaaggtgaagaatcacaggggattgaggtttggatgacaaacaagttgagtgataaggttgtttcgtttagccaatatttcaatgtcactactcctgatcttccagcgttacatatccactattgtatggcttgtccgggatactccattggtaagcgcagaaatataagggtgtggtgtgagggaagtgtagacgtggatgataagtcgtatgttatcatcacgttttacaaaattgatgaaagtgggatcataaaacaaattgagacagcaagctatggacagtttgagtacgatgacccgtttatttgttgctatgtttatgttccgagtctgattccgattcagtgattcccgccgtccagaagaaaaatagttagcgatatgagtgttgtttcgtgttcttaaagctagggttttgtttggctttgtgtttggtgatcgtctaccatgtacatattgaaacgaactaggttattgaaattgacttctggttttggtttttgtatttatgagcttgagaagttttaggtttggtacagagttgtatcatcttccatatattgctaaaactaagcatcattatccgaagacctaaacatttacaatgaacaaatctaacatttcaattgatttgttcatgtgcatacatataaaaaataaaatgtaactatttgaggaaaaaaacatctaatggcatttgattggaattggtactctaaaaaatcagataaaagcgtatgtaaaccggataattgaattgaaccgaattacggttcggttttgttgttggtgtgataaaggttcgattgagccgtaaaaccttccgtcctcctcgagtcctttccatcaggaccttatccacagtccacacacagcgagactctatttactcgccggcggaagaacaaaatg

SEQ ID NO: 100 - DNA, 122 bp, Unknown
  misc_feature (1)..( 122): cDNA_ID_1684034_gDNA_ID_2570_Annot_ID_145791 3000 nt of promoter + ATG
tgaggctactcacactaatccagcagacgaggtttgaaaaattatttcacacatatgcttttccaaaagtggtgcaatctgttacttgaaatgggatgatgatacgaggtttgcctacaatg

SEQ ID NO: 101 - DNA, 3000 bp, Unknown
  misc_feature (1)..( 3000): cDNA_ID_1020019_gDNA_ID_2570_Annot_ID_145792 3000 nt of promoter + ATG
  misc_feature (749)..(749): n is a, c, g, or t
  misc_feature (979)..(979): n is a, c, g, or t
gagtatagttctctgaacttccgtgatgagaataactctttctttttgagacttgtctattgcattttttcaataactctaccccttctgagttatatctcggagattattgaattcctgactttttcctaacgttagagtactctacattctatcgataggaggattttgtaaccgagaagaaggaagagttgtcaaaggaagagttggggcgtcttgttgcctctcgttggacaggagagaaatctgataagccaactgaggcagacgatatccccaaagctgatgatcaggaaaaccatgagcacacgcccatcactgcacatgaagcagatgaagatgatggatttgtttcagatggtgatgaggataccagcgatgatgggaaatacagcgaccatgaacctgaagatgattcctatgaagaggagtatcgccatgattctagttcttcatacaaatctgatgcagatgatgatgtcgatttttcaggtctgcactatttccacagatgtttatattcttgaacgatgttaatcatctatcatatttagttgacttgattgaatttcattactgatagagacaacctcaaatcctacttggttggagaagatacaaaagactgtcaagaacattttgctggctgtgaatttattccaaaccaccccagtggacaaatcaggtaaaaaaatagtttagcattttcatagtgatactcgtattctttagtgattcatctatattgntgtggaatgtgcagaggctgatcgggtacgcaaagaatacgacgagtcaagctccaaactgaataaaatacagtcaaggatatcgagcttagaaaagaagctaaaacaagactttggtctgtatgataagacatcctaagccttcacttacgtttacctttctttgagttagtccttatatattgtttataacaggaccagagaaagagttctattcattccatggtcgntgttttgagagcaaacagggcaagtaagaataatcttagcaatttaatgtcacatccattctttattaacattactatcagctattagaattatatatctgatgcatttactgttattacctaaataatgctgtaggtatacttacaaagtctgcgcatataaagaagcaacacaagaggagggctattcgaaaactcggttagggtaagtgtcatgccactttatcttttctgtgcatgctgatctctttcatgatacagataactaataacaaggaattggttcgcagatgataattaaatatgagtgattattttatctgtgcttattttgtcgcttccttattttgtttaatggaatttgctaaaatagggagtgggacaaatttgagaactcttaccaattcatgtcatataccaacggagaaaaatgctggaatggtcccgatagaagcctgaaggtagtgtctgattacattaaatccaaactaattgttcaattaatattttctccaattatatttatataaaaaaaattatctgagaagatttttgcgcttgcaaagatcacagagatatacaaagcttgactgtctcactaaatgcaggtgaaactaagatgtgggttgaaaaatgaacttatggatgtcgatgaaccaagccgttgcgagtaagttcttatcgtaacctacatctcacgggtcatcatctccttttatctccagtttttctttttatatccttaaatttttactctcttgttgcagatatgcggccatcttatctactccagctcggtgtttggaagacaaacttaaagtaagtttttgtgtcatctcaaatctcaaaacagacctacactagttaacacttccttaacctggtgtttgtctttgtataggaactacaacagaagctcgagaagttgatgaaccaagacaaacctcagaatcacgacgaactctgatcattttcacctgaaataattcttaccatatgcgcactgcgcttagatttatgtcagtttagactagtaatcttgctcagtcgcaaacgtcaagagaggacttaaaaaaagaacagagaagttttgggccggaagagaatgaatgatagagtcaagtttacctcatttgggttcaatggagattttctatatcaaaagtatttagacaatgttcaaactttggttaagcacaaagaacaattcttctatataaaaacatgaagaagagctaaaaccttttaacttttttggagtcttaaaaatttattcgagattgttggagctcgtcaatattaaggtacatatgtcagttatcaaacatctccaagttcacttttaggtcagaaaatggttttaatgtctaaacaagtggtaggtttggtttggttcagttttaatgctttcttttacagattccattaccaatagagacaaactagaacacaatatttccggaaataaattactgcagttcaacacttaacaccatgaaagaagacaaagaacaaagatcaacttcagaaattagtttaaacactattgccaaaatggcaaaatacaattaataccattttttaatcaacataaacacttaaaatatcattataagatattttatatttggaaaaaaacgtggcccgacaatagatcgagaagacataaaaaggtaaacgaaaacgaatattaataaacaatgtgcgtcactccttaattattgaaagaaaattaaaccggtgtgaaccaatcagtaaacatatggtcttttgttgaccaaatctaaaccaataaccttcaatttcatttctcattttttacctcaaaagtcaaaaaaaactctagaagaagactcttaactcataaatctctcattctttctcagattctctctctctgttttccttgttctccaagccagatctctctccataaatctctcttcatctctctctttccaccaaaacatccgcgatcctcgattctcaattccgtgtctgttttttttcttcacttagcg

SEQ ID NO: 102 - DNA, 2342 bp, Unknown
  misc_feature (1)..( 2342): cDNA_ID_1684091_gDNA_ID_2597_Annot_ID_145807 3000 nt of promoter + ATG
  misc_feature (581)..(581): n is a, c, g, or t
  misc_feature (596)..(596): n is a, c, g, or t
  misc_feature (700)..(700): n is a, c, g, or t
  misc_feature (1851)..(1851): n is a, c, g, or t
cctacaccgaactgagtctcaaaaaacgggttggaagacagcatgtcgacgtgtaattcatttggatggaacatttctaaagggacgcatgaaaggacaattgttgacagctgtgggaagggatcctaatgatgcaatgtatatcatcgcatgggctattgtaccagtggagaacaaggtctattggcagtggtttatggagttattaggagaagacttacgtttggagcttggtaatggtcttgcattatcttcggatcagcaaaagggactgatatatgcaataaaaaacgtcctaccttacgcagagcatagaatgtgtgctagacacatttttgcgaacttgcagaaaagatacaagcagatgggacctttgcataaggttttttggaagtgtgcacgcgcatataatgaaacagtcttttggaaacagcttgagaagatgaagaccataaaatttgaagcttatgatgaagtgaagcgaagtgtcggttctaactggtctaggtgtgaaaaaattccgtctcttatttgtctatggttttggttggtttgactcttgttttgttctctacaattgncactctggttttggntgatctaatggatttattattttctccttttgcagagcattttttagtgatatcacaaagtcggctgcggtagaaaataatatcagtgaatcatacaatgctgnttttgaaagatgctcgagaaaaaccagtggttgcattgctagaggatataagacgacatattatggctagtaacctagttaagatcaaagagatgcagaatgttacaggcctgatcatacccaaggcgattgctattatggagaaacgaaaaaagagtttgaagtggtgttatccattttcaaatggaagaggcatttatgaagtggatcatggaaaaaataagtatgtggttcatgttcgtgataagacttcttgcacttgtagagagtatgatgtgagtgggattccttgttgtcatattatgtctgcgatgtgggctgaatataaagagacaaagctgccggagactgcaattttagattggtattcagtggagaaatggaagctatgttacaactctcttttgtttcctgtgaatggcatggaactatgggaaacacatagtgatgttgttgttatgcctcctccagacaggataatgccaggaagaccaaaaaaaaatgaccgaatcaaagatccaagtgaagaagcttcttcggagaattctcaaaaagctttagtggtaagctagtcgtggtaatacgtctctctttcttatatatttgtaatcttgggttaatattttatttacttttgtagacatgtagcaactgcggacaaacaggacataataaacgcacatgccaaatagagctagtgcctaagccacctaatccatctctagaattttcttcttatcatgcgaaagttattgtggtaaaattctaattttctatagtagtgtatgccaaatattgtttggaaataatcttgttatttatgcatttgtttttgcagacatgtagtaattgtcaacaaactggacacaataaacgaaaatgtaagctcgatccagtgcctaagccacccaatctgcctcctggaagaccttcaaagaaacaaaagaccacccaatgaacaagcttgaagtatgaagtcttgctttttttagatttcgatgttgaaacatgtttgagctagtaatgttggctttagaatttttttttgttctattagatttaatacacatggatctctaaaagaatttttggatcggttgaaaatttaattttttttaacagcaaaaataaagcaatcaatatcatacatnaacaatatccaatgcaatggctgtaccagagtctcctcaatgatagatcgttgatcagaagtggcagcgtttaatttaataaagcaaaggaattttaataaaatgttttattgcagcaaaaaaaatacatgtcgtttttcttcaatgtaaaatacagcgtttaatttaactggatatttaacagtacagtagacggaatgaggttttcactaacaattttagagttcatgtgttttttcattaaatatatcattgaggggttttttcacaatccatatttagttggggggttttattactaaaaacccttttttaaataaaggaaataaatctgaaccgacgcttaatgagccgggtttgggcaaacgggtggggattcgagtgttgggctacgtataaatagtgttcgggtcggataaaatcctatttccctctcttctcttccgtctttctcgttctgtttctgattgttcgtgtaaaaccctagaatg

SEQ ID NO: 103 - DNA, 3000 bp, Unknown
  misc_feature (1)..( 3000): cDNA_ID_2990982_gDNA_ID_2598_Annot_ID_145809 3000 nt of promoter + ATG
  misc_feature (38)..(38): n is a, c, g, or t
tctctcgccacgttctcatcaatctattcaccaaaagnaaaaccagaaaaaaaggattgaaaatcacataatcaacctttgatcttataagacaatgaaccagtactatgctcacaaaagtaagaattccagataaacaaagcagaagaacactccaacttgcaaaattacacacataaaaggaagtaatttgagagttagaagaagaaccttagggccacgctcgatgtacttcatagcaacaagttccttggagtttttgactctcatgagcctcgccactccaaaattcccagcaccgatgtctttaacaagctcgtacttgtccattttctcgtagcgaaatcaaacaacaagcctaatttccactacacaaagtcacaaacccagaaaatcaagggatgcgattcagaggtttttcgcgatggctaaaaaaggcacaaagtgatagaatgagattttgaaagcaaaagcgaaattgtcgatatccttttttcttatccgtgaagaaattccaaaagaagatatgattacgaattacaatgatgatgatgatgatgatgatgccgtaataatctccatcgttccttgctggcttcttctctcgaagtcacgatggctcttatttttttattatttaagtaatagtttacttattgaattatttttggttaatttaagaggtatattaataaatgcgggacctacaaattccaattctatcggttctttagtgactgagacgtcgctatatgtgaaaaggatattttagttgtcacagaattgcgtctatttcttattttttcatctttttgcaatttaccgattctacgagaacatcatttgtttattggatatgctttttttaaagaatcaagagaatacgaaaacaacttgtactcaagaatgtttactataattctctagtggatctttataagagctggagattagtttggattttatcttaaagtatccagttatcaaaaaatgagattgttaggactttttttacccgagagtatttagttacaaaaaagaaagttagtttaatattagataaactataattgcaactaacggtcagtagaaagctatataagttatataacgaatctgaatatgacttagttatcttgttggattgtctagatatgtttttgccttttacggaaagattcgatttggaacaacttctgaattaacctgaaaaacgtaattaaacattgacttgttggttgtttgtagaatggttggtttatactttccgaatgtggctatgtgaaatcacattttgattatatgtataaagttgagatataattttaaaatttgcaaaaaattattagttttgttaaaataataggagatgcaaactaaataaattctcttcttaactaaaaaagcaatagatttgttaacattgaatgatggatagatttgtgagttgtgactttgcttaagctaccccaacagataacggatatatcatatagatgttgagtaagaaagaaaaaaaaaacatttacgattgcattctcgtaatgggctttatgattttaaggcccaatagatgaagtaaggctaatgcacaactttaagaaacgtaattctaggaagtgtttatcgactgcgttgtaggtttcttgtgttcgtggcactatggattaggttttaatatggtttctaatttcgttgatttcagtggcataagtccagttgttgcttgtggcaaactgtttcatgtacaaaaacacttacatcattactaaattatgtcatgggtttggtttcgttaacaataagtcaatctccttgatgagttttatctatatgattatctatttgtctatttgcaacatgtagtagattgaactggggctgcaaaatatgctcttgcaattcctagttagatctagcttttgataatacgattatctaatttgtcatttcgatatgatagatagattgtttttaaaagagatctcaaccacttttctttaactaaaataaaaaatttagtcactttttattaaaaataactaaaaagttttaaacctatcaggacacttccatcaacagtatttaaaagagatatttattattaaaataatacaaagtggtgaaaagaagagagaagtgagaatcgtctctgttttcagaaactctgaaaaacgtttatggccacgtgtttttccagaaatgattgattttattctttttattaaaatttaatactttatctaaattcaattaaaataagcaatatttttttcatgagaaactcttttttgagaatcaaccgatgtagatggtctcatactctactctgttgattgtgtttaagtttctgaggatttttctactttccgacgttatgccaagaggctggtcttcactagaaaactacttccacccaattcaagcaagtatgacctcttctccccacaatttattcatgtactgaaaggccattagaagttgactgaattgtgaaggtggagattatgtattcacttgttgatttggtatacattctatgtaaggttcaattatttacgttatataattataatggagtaatttacagtaattgggttaaaatggtttgattcggtcaggttgatacggtttggaagttaaacccggcctagatatgatgttacaaccagtccacatcttttatgattttagtggaacaaacgaagagttatttagacgatacaaacaaggtccgaataagtgtgagctgtcccaagtaagaccacgtaatactcacctcaacaagatagtgttcttaaagtgtgtcaaacacaatcacacacacacaaatcataaaacacaaagacgataatccatcgatccacagaatagacgccacgtggtagataggattctcactaaaaagttctcaccttttaatctttctccacgccatttccacaagccataatcctcaaaaatctcaactttatctcccaaaacacaaaacaaaaaaaa

SEQ ID NO: 104 - DNA, 2892 bp, Unknown
  misc_feature (1)..( 2892): cDNA_ID_2781998_gDNA_ID_2618_Annot_ID_145819 3000 nt of promoter + ATG
  misc_feature (2704)..(2704): n is a, c, g, or t
  misc_feature (2727)..(2727): n is a, c, g, or t
  misc_feature (2791)..(2791): n is a, c, g, or t
  misc_feature (2807)..(2807): n is a, c, g, or t
acgtcctctaaaataaatttgttgatatatcatttttattatttttatgttgaatcatgaattacggggatatattaagttatattaaccagtataaattaagaaatatatttctaattttatcaaaatctcatataatggaatcttatttcaaattttcaaaatttaatttttcatgtccataatggttgttgttatggttatgctataatttggtcaattggacatatgtgaagtgaaagagtcaagcttttggttcaggtcaataaaaattgatatctatcaattaacagttataatatcaaagatgttttctaatggaataattaagttctagttgcctcaaaggtttgagtcatcatctcgtgtgaataaatacattatacatacaaaacaaaaagctctttgtgatagtagtagtaatacatgtcgcaaacctatatgatgaaatgaaatacgtggtaagccgtatagaaacccctatggtaccaaatattgaaagcttttttgtagtattttcaatcttgataaataaaaaggtaaaagaaatttgttattcacgaaaaaaagttgttcttttatagcttgccaagtggccagatagacgctatatgctaattgttactaaactactaatccaagtggacgaatgaaataataacacaataggtacacataatttatagacaaaactattaaaagaaaaacaaaattatccaaaaaaagaaaaagatctggtgacgtaatcgtttggaatagactaaggttccttccttcaacgtaaacaacgctcattgatacacgcagctgacgtggacggatcattctgccgacgatggcctctggtggctcacacttggccttacctttttgtttctcgtgtctctctgaattttctttccacctgagtttacagtttttttggttgttattttgtgcatttcgttttccttatcaaacataaatctgatgttgacacaaataatatcaaatttgaatctgatagaagatctttccccaatttaccggtcgttgagctttaagcactagaggcgtatgtacataatcgtgaaacttgatatccattgagccttaatttattactgttatgtttttcaagaaattttttgttgattgatgatactataagtttagcaagaattatccataaagaccataacatacatgcttctcgtgagttcacatataagaagtttcttttagtatcagtcaaccccgcagccctatggtttattatttgtactcgtttaaaatgggatgctaaaattctctaaatggtcatacaatattctcaattattcaaatcgtacctaagatataattttggtgtattcagttattattgcacttataatacaaaaaacatatgttgcatgaagctagttatattatttttttgtcaatgacatgtattattttgatttaaatccagatgattacagagtaacaaaacaagtacaaacactagactatatttctgattagctaatctaattttcataattagtaatttgaaaatgaatatagatctcggatgcgaaatcatttgacaattcgctaagtgttctatgtaggttaggttttttcccccactttcgtaataagacgcataacatcagcatatgctttaacatgttctgtaacagagtccaaaaaaaaaagttatgtaactatttacgaaaacgtaacggttattattttaattcaaacttatatagatggttaacatgttctgaattcatcgatggtaaatttgctaattatcttttaaaaaaactaatacaatacaattggcggtatgcgagtgctcacatggttaaaatcggtcggttcctctatatccgcctttaatttgtactgtttaccaagcatatctcatttttatagaaaaaatgtctggaaataacactatttgattagtccgatttctgacgaaaaataaataaataaatattagtccgattgctttctccaaactactgttgcctttattttttgttcaaactaaatacagatgttctttgaacatagttctcaatttgattaatacatatacaagtagactgaatggaatttagagagagtaatgtgcatcacacttgacaaaaattaaataaagacaagagagtactgtgtttgacgcaatttaggtaacaccgttattctagggagactagagctgaacatggattgttgattaagctctcacatatgagataaagtttaattgctgtcctgtatacaaaatttgatttaggagtccatgtagcaaatatttaatggttgcaaagggcaaaactcttgtagacaaatatggataatttgcaatcataatcattcataaatgttttgctcacagtagtacagataaaaataaaaagtctattacggacttattgcaaaccgataaaccaaatgttgaaaaaatttccggtaaaccaagaaaagttcagaaaatcatgagactaaacaaaaggaaaatacagaatgtattaaaacttttgaaactcttgtggattatttcctataaggctatataatgcaccaaaaatcaaactgatcatatattatgttctagaataattattccttggaaaagacgtccaaaacaacatcatctcaaatgttaaaattcaacaagaaaaaaaaaagagtcattatcaatgatagatattatttattngttaaaaaattacacatcagctntatcgtcagcatcgtcaaatttttgttttcgacgacccttttaaaaccctcaaaaataagtctntaccaaaaaacctctntctccagaaaccaaatcacacttacatcataaatcctctgtacataacccaaaaaaaaccctagaaacgaagaaagatcaagatg

SEQ ID NO: 105 - DNA, 1612 bp, Unknown
  misc_feature (1)..( 1612): cDNA_ID_1684224_gDNA_ID_2637_Annot_ID_145834 3000 nt of promoter + ATG
tagtgtactttagatatttgtttaacttttgctttaatttttgaggaatgatgttttcgtttaatcattatcctctagcataatcattgacatagaattattctttgaatggaagctcaaagctgcatttgttaccaaacaggcaatcacagctgttaacctaaacacaactgacggattataaaattctagcactgaaatacttattcaaaactttcactcatttttacgcaagaagtttttttttaataaaaaatcaggtagatatttcgggtaaaataaatactcccatttgtatcaaaataaatgatgtttaactttttcacacaaagattaaaagttattatattttttccgaaataaaaacgtaatttatttatttatacatggttcaataaatgataaaataaaatataaatagtcataaggaaaaaatataaaaattttgcatagaaaaaaaagaacaccggtcaatttcaaaccaccaattattttgatatcacagatgtcaatacgcgtcagagtgtgatatatgttagttatatgcgattttagtaacatttttggaagtttcagtgttgaatatcacatgtatatcgttgatcaaattattttagtaaacatgttttcaccagttttttgaatttgtagtcatttcaccaattgattctagaatatatttaaaattcttaaatgatgtaaaggtagttgaaattagataacctaacattttttatgttaaccaaactttttaattaaaaatagtatttttataggcacagcctattgtaaaaattttaatttacatagttttaagtaaactagataaaagaatcagctggtgatcctcaaatcggataaagtgttatgagtgtataggagattttgatacaaattgaattctttttggagtcatatattttgtctatgctcaccacagcatcggaagatcttccatcacaaaacagttcacatttgtggtggacacgagagatgaagaatctgtctccaggtttaatcactgtggtattatatagtaaaaattttatgatgatattaaatcatgattttggctatggtaaaatttgaggtttttggttctaaggattttttttgctagatttatgttaatatctaaagtttaagaaatttgataataattatagttacgtgacataattcaaatttatgatgaactacatttactatatatagccctcgagataataatgttatacatttatttagtagatatattattagataattcaaaacttaaattacattattttgtttatatatttcatattatgttaaagtttaattgctaaatgatatttttacgaaaaatttgtataatactaaagagttaaactaaaagataaattttaaagacatcaatttcgttttatgttattaatagtacataaagaaaaataaataaattaaattaaatttgtgactattttggtatatgatcaatgctcgtctttttaagtagtaatcgtgtctgttacaggtgaatgaacccaacaaaaatcttcgacgagaatcttctgctttcttcatctctgaatgatcaatttctagaatcagatcggatatttcgatg

SEQ ID NO: 106 - DNA, 123 bp, Unknown
  misc_feature (1)..( 123): cDNA_ID_1009520_gDNA_ID_2689_Annot_ID_145859 3000 nt of promoter + ATG
catttttagtttctatcatataaatagcttcttgtgtttttcacgcccttcttctttgtatttccgcctcccccgagaaaacgaaaaccctagtttcagaggcatctccagacaccgaaaatg

SEQ ID NO: 107 - DNA, 63 bp, Unknown
  misc_feature (1)..( 63): cDNA_ID_1684386_gDNA_ID_2693_Annot_ID_145865 3000 nt of promoter + ATG
atcatcttcttcatcttcatcagtttccagattcagattctccgaagcttaacgaaaacaatg

SEQ ID NO: 108 - DNA, 1359 bp, Unknown
  misc_feature (1)..( 1359): cDNA_ID_3013398_gDNA_ID_2695_Annot_ID_145867 3000 nt of promoter + ATG
ttccattgtatcagtgccagaaggtcgaaactcttgggagagttacacaattcacatgtgctgtagagattggaggcataaagtacacaggagctgcaacaagaactaaaaaagatgctgagattagcgctgggagaactgctcttttagcgatccagtcagacactaaaaacaaccttgccaactacaacactcagcttactgtacttccttgtgagaagaagacaatacaggcagctatcccacttaaagaaaccgtcaagactcttaaagccaggaaggctcagttcaagaagaaagctcagaaaggaaaacgcacagtagctaaaaatcctgaagatattatcatccctcctcaacctactgatcattgtcaaaacgatcagtcagagaaaattgagacaacgccaaatctggaaccttcttcatgcatgaacgggttaaaggaggcagcatttgggagtgtggagacagagaaaattgagacaacgccaaatctggaacctccttcatgcatgaacgggttaaaggaggcagcatttgggagtgtggagacagagaaaattgagacaacgccaaatctggaaccttcttcatgcatgaacgggttaaaggaggcagcatttgggagtgtggagacagagaaaattgagccaacgccaaatttccaaccttcttcatgcataaacgggttaaaggaggcagcatttgggagtgtggagacagagaaaattgagacaacgccaaatctggaatcttcttcatgcatgagcgggttaaaggaggcagcatttgggagtgtggagacagaagcaagccacgcataacagtgtcaagatggagtcttgtgagtttgtcatagttactatatggttacgtagccattttgtgattcctatctagtctagtagtaattcacagattgaagagaagtaatatttgagcggaaaatcaaaactaatatgattggtacaatttggtggtcgattgagtcattcgaataaagtaatgtggggttgcaaaacagaagcttcatatctacatataaatgaaaattactctcaaacttcattatttgtgggccggttataaaaacacaaacccaacagaaggtccattaccctcactcttcattatttgtgggctggttctaaaaaacaaaagtccaatagaaggttcattaccctcactcttgattatttgtgggctggttctaaaaaacagaagcccaacttgctgacccaacaggtccgtttacgaaaccctaatctcaaaacagagatataaatacactctgccttcctcatttcatttcttcggcgatctagggttttagttgtcgcacgaggaggaaaaatg

SEQ ID NO: 109 - DNA, 2630 bp, Unknown
  misc_feature (1)..( 2630): cDNA_ID_21148_gDNA_ID_2698_Annot_ID_145871 3000 nt of promoter + ATG
  misc_feature (2289)..(2289): n is a, c, g, or t
gataatcatcacctggtacaatcattctgtcaccgaactgcctttcgttgggatcagtgtcatcagttccatcgctcatatcatttgtcccattaaaatctaacccataacccataggcttttggccaaatgcccttctcttatattcacaatatcttccatcttctagacgattacggtgcatttttctcttccgtgcagatcttcttggaagagtccggaagtttctttttcccttgtgctgccagttggaaaccgtactagcctcattatcaggattttgggaataaaggtaggaagagtcgccagaaatagatgactcataatgatcttcctcactgcttgtactttcatcttctcctgacgtatgtctactaaaagtattgcgtcgctcggaatgacgcccagctcctgaaaggagaaatttcaaactctagttagggaataactaatacctatgcgacacatagaaaattgtggtctacgtaatcaaaaacattaattggttttagtgcagaggcatgatacaaattccagtcaaagaagaatcagatatgaatatagtgttgacacaactgaaaaccaattttcgcaaaagtagaaaacatttagatgataagaaaaactagcttttagctgtccagaaatactttacctgacagcaagggaatgtcatcatcagtatcctcctccatatcagaagaatcagtttcagattcagaataatctgattccatatcttccaaaaaattaggagggtcataatctgaataacgagtatcaccaccggcaaaggaggaatgcattgcgtccctgtggcttagcaaattctcatgtaggtctgaaacatcattagattcacttggtgtaaacatatatttagtccttttagcctccgccctactcttagttttctcctttcctgaaacagagccaaaaatgcatatgaatttcatgtcaaaaagagccagaagccttaagtatccaaccatctaggaacaaaaacttggaagtttaaaagtacatcttaccgagggtataaatgggcctctccatgctatgatccccactggaagaagctgaagaattgcttctggcaagatacttaaaggaagtatcaggaccattggaacatgaaatctttcgctttgaagaggcggttctaagtccaaagtcctgcaagcctctcattcgaggcacagcctcatcctcacaacttggttgatcttcctctttatctctcagcaaatgcataacatcaccaacatggttggtccttagataatctgtggattcccgtgtcccattagaggtatcctgaaccctaactatagccattctctcattggttgcatcaagagagtcatctctagccttttcagggactagtttcccttctcttttcagcatttccttttcaagttcaagggcatggagaatggcatcttctctccgagcatacttctctctcttttttattatcatcgcttgcgaagattctaccctctcaatgcattcatcaaaatcgccacaccgaaatggcttgacccgcttggatttctctaaattgtaccaatccctaagcacattaaaataagaatgctttcagtaatcaatccaaaagaaaagagagaagttcacacagataaagaagagacttacacacttgcatcttctctcccgaggagcttcaccggagttccagatcgtggcgacgtgatatgcgtagagtcaagatcttcttgtccaagtatcctccccggccaccacgagccattcctcctcctcacccacacaatcgatcccacagtccaatcaaccgcacctgatcctggacttgccatccttgtctctccctctctacactcaagatcacactttctctacgggtttcttctacgtcactaaccacacacaagcctcaaaagtccaccattctccaagaaaaatctttctacggttgtgtattgatctacctgaaaatcagctccgccgccggtagtacagacgaatcccggcggatccaaaaccacaactgaaacagacggaagagaaggaagtgaatccggcgagaactaagctttccattcagatttggaaaactcccataaccctacgctctttaacgccggttaggttaaaacctttcctctctactttttccaccgtccctctataagctagctacgtaagcgagttctcgtcgtcctcgtctctctcgttctctctgaaacctccgcgtcctcgtctctctctcgttctctctgaaacctccgtgactctttcgcnttctctctctctctctcctccggatgatggtgattgcgagcttcgcagttcaattaatttacacgcgctcctcaagagcgcgtgctttctacgttaccgaatcataggcccatcttacgatccaaaatatgggcttttatattttaggcccatttaattcaaaatttacgctgcaacggtcacttgtgcgcaagggagttagggtttatgttcgcctaatggtataaatatccttcatcttcggatctttagagacatagcagaaacgtcttgtttttcaactgtcattttctcaaccagattaaactttttgttttcattttctctaattcgtcgccatg

SEQ ID NO: 110 - DNA, 633 bp, Unknown
  misc_feature (1)..( 633): cDNA_ID_3033331_gDNA_ID_2720_Annot_ID_145895 3000 nt of promoter + ATG
tgatctaattacgtttgttgttgcctcgttggatgttcaaataaaaagcacattttatattgcgttgttcctaaacaaatattttgttgtcttttgtactaaagtttattggcgagttaagaaaagctttgtggtgtgtgggaattattattattatttattatttattgttctttagtttgctatgcaattcgagcccactaaagaggcttcctatgggcccaaaaaacgcagcccactattgtagtgcaaaacgtgctgagttttctacattgcatgcccaacaatggccaccagtgtagttaaagactcaagaacttgctgacctctatttgtttgactttcttttttgtgtgaacaaaatcacatattgttgatgtcatttgttctgctataattcttaacttcagattacagataacgaattttctcttgatgatttaaacaaacatatataattatcaatatcagaaaatgaaaaggagatataaataatttttttttgcgcctaatcgaaacttcacctaccattttttagcgtataaaaacgttaaaaataccaaaatttagaaatccaataaaagttgtgaaaaaaagccgcaaagggtcgttgttgtttgtcgcctctcaatg

SEQ ID NO: 111 - DNA, 257 bp, Unknown
  misc_feature (1)..( 257): cDNA_ID_1020543_gDNA_ID_2745_Annot_ID_145914 3000 nt of promoter + ATG
tatggtaaagctgacgtggtatcctaagtggggtggatttgaattggagttgattccaacggtggagattcaaagattctttgattgatagtgagcgactctcgttttccaatcacgtgtaactcggctccactctaaagcacgaaatcaacacgtccacgtaacgatcatatattcatgcagtgatatagtcgtttaacagaaagatcactccgtcaatctttccaccactgtgactaaatctaaacaatttcatg

SEQ ID NO: 112 - DNA, 94 bp, Unknown
  misc_feature (1)..( 94): cDNA_ID_21263_gDNA_ID_2750_Annot_ID_145922 3000 nt of promoter + ATG
tttttttttaataaaaaaaaaaaaataaataaatatggaatacacaaatgtgtccattttattaggcatgttggtgatctttgtttcaccaatg

SEQ ID NO: 113 - DNA, 188 bp, Unknown
  misc_feature (1)..( 188): cDNA_ID_3014198_gDNA_ID_2756_Annot_ID_145927 3000 nt of promoter + ATG
ggctcgtttagtctggctcacggtttagtacatgcacacaaagcaaaaacgctggtttgtctttttttttaaaaagaacttcgtttctcttcaattccgttaccgtcactgtcaccgttcacctccgtttatctcatcctcaccgttcatcttcttcgatctaactcgccgtcgttcaccttataatg

SEQ ID NO: 114 - DNA, 2989 bp, Unknown
  misc_feature (1)..( 2989): cDNA_ID_2730377_gDNA_ID_2790_Annot_ID_145930 3000 nt of promoter + ATG
  misc_feature (2398)..(2398): n is a, c, g, or t
cacggttcctcgttcgtcctctcccgtcgtctctccggtgagtccttaattttccggcggtctttttccctttctcgtctgtttggtgctttctttatgtctgaggcgaatacagcaaaacgtatctgttttggttgttgagttcgaggctggtcctgaaaattcggtgacaaaaagagtcaataactctcgtgatcgagttggatgcgttgttttgagggttgattcagtttatgactatgtattttggtacttgcaagattttctgattttatgaagattcgtgtttgacttttatagcgtataatctacggggcaaacagattcgagcaacttgtttttttctagcgcttgttttgtgtttactctgtcatgtgtttgtattttttgagcttccactagtgattaatcatctcagctcaatttgaacataggagatgtagtttttatctgtcggtggatttctagggattttgcaaaatgttttgggctttcctgaattagtatgtgatttggtcgtaaagtattttagggatttatgtgttccttggggtgaatctgacattgacattatcttggtgtctgcagcactaaattgatgggcacatcatctgggtccaatcttcctcaccagatgctacctccacgtcagcaactacaaacatctctttcgcttgtatcttcagatccccacttgtcacggtctaattctggcattgtgcgtgaatcaccagctgaaagtgctagctctcaagaaacttggccaacctcaaaatctattatgggaaggaagacagatagcggaaagacagggcctgactctcatgatcaacatgtgatccgccatgtttccattgctgataaggtatcgctacgggacatagctagagagagacttgacatagtcgctgagagaatgcatcgattaccagaagaatatctcgaggagttaaagaatggtcttaaggctatccttgaaggaaatggtgcgcagcctatagatgagtttatgtttctgcagaagtttgtccagacgagatctgatttaacttcaaagacacttgtcagggctcaccgagtgcagcttgaagttcttgtggttataaacactggtatccaagcattcttgcacccaaacatcaatctctctcagtcatcactcatcgagatctttgtgtacaagagatgcagaaacatagcttgccaaaacgaactcccggctgatggttgtccctgtgagatatgcgctaataggaaaggcttctgcaacctgtgcatgtgtgtgatatgtaacaagtttgactttgcagtcaacacatgccgctggattggctgcgacgtgtgttctcattggactcatacggattgtgctattagggatggggagatttcgatgggagtttctcccaagagcgtatctgggatgggagaaatgctgttcaagtgtcgagcgtgcaaccatacttctgaattgctggggtgggtgaaagatgtgtttcagcactgtgcaccaaactgggatagggaatctttaatgaaggaacttgacttcgttagtaggattttccgtggaagcgaagatacaagaggccggaaactcttctggaagtgtgaggagcttatggagaagattaaaggtggactggctgaagcaacagcggccaagttgatactcatgtttttccaaggtaagcccactcgctattgttatatgataagggtttactctttatagacctaaccatgttttgtgtatgaagaaattgaattggactctccaaagagccttgaaagcggagaaggtgggggtacgatagcacctcaagatgcatgcaaccgaattgctgaagttgtaaaggaaacactgaggaaaatggagatagtgggtgaggaaaagacgaggatgtacaagaaagcgcgaatggggcttgaggaatgcgagagagaggtagaagagaaagcaaagcaagtggcggaactgcagatggagaggcagaagaagaaacaacagatagaagaggtggagaggatagtgaggctgaagcaagcagaggcagagatgtttcagttaaaagcaaacgaggcaaaagtggaagcagagagattggaaaggattgtgaaagcgaaaaaggagaaaacagaagaggaatacgcaagtaactatttgaaactgaggctgagcgaggcggaggcagagaaagagtatctgtttgaaaagataaaagagcaggaaagtggtgggaatggtggtgaagcgtcacaagcagtgatgtactcaaagatcagagaaatgctgcatggatacaatgcatcgtcgccaagggtagatccaagatcaaaccagcgaaatcctttcagatccaatccttagatgtttggattgtctctctttgtttgnattaaaaaaaaaaatccgaatcaattaaggttggatttgtgtgtgaagtattgtggtctttgtattcaaattttgcacatgatcgtctatgttgggccataatgttatgcaagctttgacacagagtgttgccaaaatctcgatacttattcactcggatttagagaattgtggatttcgctaatggagggagatccatgttaccttaaatagtttatatttgagccaacatgagagccaaagaacatcgccaccgactttaaaaagaaaatattttgcccaaatggatattacagagtagttatttgcaataacgtcctcatgtttgggttataataacgatttgatttcttacggggtataaagcaaaaggaatcaaaacgtttggggaaataatgtaatattctggaaacaaaacgcgtataatcggattgataaggaatattatatcatcgccgatgcaatcatcgaccatcgttttgttttcctgtctacccaaaaacaaaccctagtgtccgaattctcgacaaaattcatcggctccaaattccattcgtgctttttgaattcgcgttcttctgattcaagatg

SEQ ID NO: 115 - DNA, 3000 bp, Unknown
  misc_feature (1)..( 3000): cDNA_ID_3014384_gDNA_ID_2804_Annot_ID_145941 3000 nt of promoter + ATG
gagataactaaaccaacgaattgttatcggcaaaacaacaaattaataaaatcgaacgaagtgttagaacgaaatgttgtgatcataactccgacacctacaaatggaccgccatactttttatactttcactttaaaacctaccaaaacccctaaattaaatttatacgtgtctatatatacgatctctcgtcgagacaccaattaattttgaataaagattacaattctcacaaaacatgaaaactcccatgagttcttctatcacgtttgcactcgtcttctttctcctttctctcaacccaacttcatcattaccgtccaaacgcgaaagctacgttcaaaacgcgtgtagtgttacacgctaccaagacctctgcgctaaaacgctattgccgtttgcatcagtcgccaagaacagtcccagcaaatgggcacgtgccggcgtttccgttgccataaccgacaacaaagacgtccttagacaccttctcaaaacgaggctttcaacgattgggaaacgagaccgaatcgctttgtcggattgtcgcgaacttctccaagactctcttgatagtctccacaagtccttggccgtcctccggacactcagagccagcgagtttcagcagcagatgagtgatcttgctacgtggcttagctcttccctcactgacaaggacacgtgtcttgatgggtttgaaaagacatcgacgaggtcatcatcaacggtcaggatgattcggaagagagtcacgacgtctatgtacttgtccagcaattctctcgcactcctcaacaagctagcggctaatggtttgtaatctcttaaatcataaacttttacaaaagctttaattttccatgaaagtgtaagatcatattattaataaggtggttcatggctgatcactacgataactgtatctctctcattataatggaattatttacaggcgaaataataatgggcctaatgtcctatattgggccaatgttattagtcaagtattgtcatttttattcgaccgtcacaagcccatgccacctaacgagtaacgaacctctctctcatcaagtcaaaacgtgagaagaagtcggtgataaaaacctaataaaaatcactcgaaagatatttttttcttggttaaacactcaaaaagattttgtctaactactataactcgttttagtcctttccataaaccattttaattccttttacgataataacttgaaattttcttactcttaacgccacaacattgctaaacgaatttcatacaaatatagcgcaattattactttgatagcatattattgttgcttcaaatcatatgtttaggtagttgcaacttttgttttgtctacatgtatatatcaccgtgttaattatatattttgtttcatattgtcaagatcagtatataactttttaaaacaagatgctttgattttgtcacttacatatacatagtttcatataagagatccttcctaacattgtagttagctagtcttattccattagttttaaatgggtataaaattcaattgttatttataagaaaacaaagaagttgattagagaaagaaaaaaacaattatttataagaaattcaattattagccatcgcgaatctaaaaagttaggcaagaaagtgaaggagatgtggggtgacataactagctaaccgccaggttagcatcacaagtcaacgtaaacataaaacaccaatgctcttccatttttcaaaaaaattgtattcacatccgagtctgaagttttttgtgatttgtttagatcacaagttaggaattttgtagttttgcgcagggagggagacgccgagggaggtgtttagggagggagggaggtagacgccgtcgctacttagtgtaaattatcttttcagatcgtaaagctagtaaaatattgatagtataattcatatgtagctattaaaggtagatccaaaccatcatggtttaaccatgtgttattgtgtcgtaataagcaaaggctttatcttatataatcagaaacacttaaggacgtaactcaaaatatacaagtttcattaactataatcaaataattgtgtttgagcaaatgtttcaaatatatggttagtttcaatcaaaacgggttttcttttattctagaccattccatttttttctaaactacttagacaatcgtaatcactcggtaaaaaacactgttacaaaatggggtcgtagagatctaccactaattaaattggatttaccttttactctttggctcctttttgaaaaaatttgaagttaacaaaataaccaaataaaataagaataagtcgtcacatttaatctcataggcaatttttgaatctaatagaaatcacgtttttccaaccctgatggtcaaaagcgttatgaatgtgctttgtaaaaaactgtttagtttgttaagacatgcttttatattattactaattataaattatcatgtttatgctataattgaaaaatacgaacgtcgaaatcactcaaagctcacaccaatctggctttgagtgctaagttagggtttggcattgactttgtttacgtgagattaccatacctaacgaacctatcatttcattaattacaatttgagtattaaaaaaacccatataatatgtgttttcgtgttgttgcaaataatggactaagtaacaatattcattggtccgattttgaaggaaagttcaatgaaataaataaaagggtaatctcgtaataagagtgaaaaacaagccttaacctgtaaacgcttacgctagttaaatacacaacaaagaccgattcgcttttcactctctcgttcaaggtccgactcagttcccggcgagttcgactcggtgattgatttttttctagaaaataaaaattcttcttaacgattgatcgattttggttttctatctttcgattctagatctagaactcaatttgtgaggtttggagatg

SEQ ID NO: 116 - DNA, 746 bp, Unknown
  misc_feature (1)..( 746): cDNA_ID_1026618_gDNA_ID_2804_Annot_ID_145943 3000 nt of promoter + ATG
ctggaaagtctgtccacagaatgtaacattacatctaaatctaggagcatgaggaggcccttctctctcattcgcatacactggtagctccagattatgttgcagggcatacgcttgcagttgacctttgtatacatgatccatctctatctaaactggcaggaattaaccaaacataaagagatcaacgtgtatcagaatttctcaaacataaatggcaaacgaagagacgaatttcagatttcagaattggtcaaccaaacataaagagatcaacatgacaacatgtatcagaatttctcaaacataaatggcaaacgaagagacgaatttcagaattggtcagactcaatgatctagggtttcgtacagatcgataacatcaaaacagcgaaaggaatctacgattataaacacaaaatcgtacctctttgaaatggtgaagacacttcgagggaggaagtgaacaatcagacaaagcattcgctgattgaaactcatcgagaaaccataataagtatacacatgtaaattgtctcaaggatacgaaagattcgggttaacccagcttgaacgggtatgatccgaaataatccattaatgggccaaaattgggcttattcatgaaagttgtaaaggcccaatgaaactcgaagttgatcagaaggttgtcggcgaccaaatttctaaatccaattttgggagggagacgacggcggaggttgaaaggggaaagagcagaaatg

SEQ ID NO: 117 - DNA, 208 bp, Unknown
  misc_feature (1)..( 208): cDNA_ID_3014187_gDNA_ID_2810_Annot_ID_145949 3000 nt of promoter + ATG
  misc_feature (16)..(16): n is a, c, g, or t
  misc_feature (57)..(57): n is a, c, g, or t
acaaaaaaaaaatccnattcccttagagagagagagagagagcctttttaaaaaagnacaaaaaaaaaatgaaaaactagagagagaaacaagtggctagctagctcgccaaacttcttcaacaatggcggtttcctagggtttgatgtttatatgatcgggaaactctctcatctagatcgcgataactctcttttccatggaaatg

SEQ ID NO: 118 - DNA, 536 bp, Unknown
  misc_feature (1)..( 536): cDNA_ID_1688282_gDNA_ID_2815_Annot_ID_145957 3000 nt of promoter + ATG
agatagatatgactgaatttggttgctttcaagattggcatttgttggtttgctgtctgaaatttgcgagagtgagacaggtattgcttatgttattgtctgacacaattggttgggctaagaagttctaaatcatacacatgacacttgatatactgattatgtaattttcttttgcaagttttgctgcttgaaataatggaaatttggagctgatcttagtctcttatcccacgacaagtttgtaccttcttctcctcagtcttgtacattactgtgggttttgtctgcttggtgttatttatttttgtttgatttgttagaattatggtgattgtgtttggcggagttcattgatctattcgcagatcaatttatatatgttgtttgagttcatatatgagtttgttttatatatttgctaataggtattaatataaatggcttttttgatgtctaaagagtattttattaaatctcaaatagtttttatggtactatataaaggttttaaaacacagttacaatgtataatg

SEQ ID NO: 119 - DNA, 1008 bp, Unknown
  misc_feature (1)..( 1008): cDNA_ID_1665314_gDNA_ID_2825_Annot_ID_145966 3000 nt of promoter + ATG
cctcaattccttaatcttgttgtatccagtatccatactttgttttcttactgcggaagttacttggtagtgtagtctggatttcggattgcagactttgcagtccacgatttttcatatgttggtgacaacgaacaagtgttaagttgacggaagtgttcgtaacaaacgacgtcgtgacggtgatcttcatcaactttgattggaaatcaagttttgagggacaattaacccaaaaaaataatcataatgataagaaagagatttggcgtgttgctaataatgtaggacaagtgagcatgtgagagtctgtgaccgatgaacctgctcagaccaacctgcacatgattgtatcacaaacaaaaaactctcatttgtctttctttcgtcttactttattcattttaagcaaaaattaaatatccaccgcgttgcacaacaaatcatttacccatatgattattctcttagttttgaatttttgatgaccatgctgatttaaaatttgcaatcttacaataactttaacttatgtataaaaaaaaatgctgcatcaaccaataaaacaaaactttaggattacaaatgtttggctatgagtaaatcaagatataatctgcttcaagtctctttttctcatataataacagaggaaagtgtttatatatagttcaaagcaatattagtgtaaccaaaggtaaattttgtatgaacttttttgggggaaagaaatccatctgcagcattattacaaacagagtatgcagatctactgtctttttttggacttatactgttactaacaaaaatacacatgtaagagatttgcccaaataaataaattaaagatacacacaggctagataaagataagaccacatgtaaggtttttgttgctatactacattagtttacactcacttcccacctttatttaaacaactctcacctccttcactcgatcatcatcatcatcatctctttcttcttccaaaagtcataatcatg

SEQ ID NO: 120 - DNA, 555 bp, Unknown
  misc_feature (1)..( 555): cDNA_ID_3013183_gDNA_ID_2838_Annot_ID_145981 3000 nt of promoter + ATG
ttagtggtgaggtggtggaggatccgggtctcaaggcgtaaatttatcgagaatctgtcctaaatgttgtagaaaatcttggtttcagagcgtaaaaaagagagtaaattagataaagagaatatagtgtgatgcagcgcatcttaaagtctccttttacttctctcttttgaattgggctttgttttaatttcttttacttgggctttatgtttcagttttgtttagataatccttagtcggttaggattagggtctttgtttcttgtataaataggacatctcctccatcaaggagctgacgttttattgaataataattagaagctttagctttcttcattctcttgactatcggctattcgtttcgaatcaacgatcttcaagctcagtctttgttcggctatttcgaggaatcaacgaacaagtgacgcccccttctctcggctattccacggaatcaacgagcttaggattctctattggttacgctgcgccagttttggtatcagagccaaagacgatctctttcacgttgttgaatattcaatcatg

SEQ ID NO: 121 - DNA, 463 bp, Unknown
  misc_feature (1)..( 463): cDNA_ID_3014342_gDNA_ID_2850_Annot_ID_145983 3000 nt of promoter + ATG
  misc_feature (38)..(39): n is a, c, g, or t
  misc_feature (80)..(80): n is a, c, g, or t
taagcgagtctgtctagtttagcgaatctaggataatnnccggaagacacttttgaatcatcactgattttgatctctgnttctttctctaattgtgttgttgtattactgttgatgtagaagaagaagaagaagaatgtctcacaggaagtttgagcacccaagacatggttctcttggtttccttccaaggaagagagctaaccgtcacagaggaaagggtgagtctttttatcaaatgtagattccttgttagtgaaatgattactagggtttttataaagcttctctctttttgctcactcaccaatattgaattgagaatcagtgaatgaaatggttgattagattcaaaaggttattcatttattgtttgttttgcttacacgttattgttggtttatcagtgaaggctttccctaaggatgaccaaaccaagccttgcaagttcacagctttcatg

SEQ ID NO: 122 - DNA, 480 bp, Unknown
  misc_feature (1)..( 480): cDNA_ID_3017335_gDNA_ID_2862_Annot_ID_145993 3000 nt of promoter + ATG
cacatgattgttttgtatgtagactctcaaataaaataaaaattaatttaaaaatatttcgagttacgccaggtatattttttaaattttatcaatttaaatataatttaataaatataaaatttatggtttaacataaaacttatttgaaataattaatatgaacttgaattagggttttattttttgagtgacgttaattattaaagaaagaaacaggaatatcataaaaatagtttctagtaacctttaaaaaacgttgtaattcagaaaaacgtgaaaccaaacgggctacaaaatatattaaaacacagagtacaacaggcttttggtttgagcccaaacaagcccatttaaatctatttagtctgtaacataagtcacgtgcacctatcacgtgatcatcttctttcttccttttttcttgtcatctgttacacatcggttagggttttagtttctcttaccgagattcaaatg

SEQ ID NO: 123 - DNA, 2086 bp, Unknown
  misc_feature (1)..( 2086): cDNA_ID_3014360_gDNA_ID_2866_Annot_ID_146003 3000 nt of promoter + ATG
  misc_feature (127)..(127): n is a, c, g, or t
tagtttttttttgtaccaagcaatttataacaattgtggtttaagaacattggttgaggtttggtttggtgtacaatcatcaccggtaaaccgaaattgtcttcttctttttccatttttcttttanaaaattcatagtattaaagtacaatattcctcttgcatttactatttggcacacatatatacaaaatccagtatcccactcttgtgagccagccatcaaaagaagaaagagagagagaaaaaatgaatatgaaaacatcaaagatgaagttcacaaaagagatgatagagtctatcaaagacaagctcccgaggctcagcttcctccgacaatgctacggtggttgcggcgaccggacgcatttactcccttgctccatcgccaccacttccacccgcttttggaacctctccgaccgtcccgtggagctccagattcgggtcggttcaattctaaaacgggtccacactctcaaacctggccgttccaagaagcttagacacagaagcattcacagagcttacgttgatgaccaggaaggacgtagatggctgtactacgacgacacttgtctaccgtacgtatgggttcacgagactggtacggacttgtcgaagatggtgaagcaacagtacgtgagtctcgaggatctgagggattactcggagattagggttttaaaggatttacagagaggttgtgtcgcagttgagaaaagagacagagcttctgctttgtgttgattctccttttctcatgcttcgaatgtcttgattttctcttttgaaacttatcgttattggttagttcatctaaattatttccaagttatattatgtgatacatgatgcatgtataactccgtctgactcttcttgaatttggatttattgggattaaacaacgtgatcacaagttgatctctttccaaaaggggtaactagatctctgaattccaaactaatcacaaaattttatttatcttcgtcggttgatatttgtggtagttgaggattatatgtagtggaaaaagcaaatattatatttactaatttagattcagtcagaagatgacattattaagttaacacaacttggttagtggtgttgttacttatagtataagtgatctttgctatgatgatctgcgaatgatttatatccaaaaattagtggttttctattattgtttcccaaaatggtgatgcaatatttaaataaagtttcttataattaagactatccatcctgaagtaaattttgatctcttatttggtcgagaaacaaatactatttagagagatcttatctttacacatttatcgatgatcaataatgtgtatttattttgatttttttcgttggagaaaggcaacaaaatccagtgaggtgccttgatggcaggcaaaataatgacctttcttctgatcctctcccactttgatagtccattaatcaattcattcaattgtgtcatatatccaatatccaatattcaacatttgatgcaaataatatacttactggttcaaactcaactaattagtgcaactttaatggctgacatgatatatagtaatagcattagatacgaagtttttagaaatcgatttcccgcatgagaggtaaggtatattgtagactcatagaaaaacatgtctctaatctctatagtctatagttgtagagttgacttttgagtagcataatttaattattacacacggtaagttgtgattaggtggtaaaaactatacaaagtcaaagttacgaagaaaactgaacaactaaccaattattttatgtaaacattaacatattaattaattttctacaacaaaagtctaaaaccacatattaaaccgaactcaataccaaaaccaaaccggaaaagagaagttttgttactcggtttaaaaagtaaaaaagagaaaagtcaaaaaagcattaacgaatcttgaacaagacatcttctagttcttcttctaccaaatcttgtttttcttcagtctctctgcttctcactgttgtgctttctgtcttgtctctgtctttcccattgtcattctctcaccaatg

SEQ ID NO: 124 - DNA, 2557 bp, Unknown
  misc_feature (1)..( 2557): cDNA_ID_1688573_gDNA_ID_2871_Annot_ID_146016 3000 nt of promoter + ATG
  misc_feature (1874)..(1874): n is a, c, g, or t
gctagtagatctacttgagttttaagagatgtgtcttctttaataccattgtggttccttttttaatttcatggcttaagtgaatgttttttggcttctttggttgctatagcttatctctgatttgattaagtagaatcctttgtactgaagtgactttttttgtatggatctaatgtagaatatagtcattggagatggctccggttggtcctcgatccggtgatgcgatcttctctagcattgatcgtgtggtaagttcagatttcaaagttttcgccttttttatctgttcctctttgactctgatttatagaatttggtatttgatatgctacattaccgatttgcttatctatttcttaggatatgcctttttctatgtatgctttattgcggttggatgtgtttttgtaatttgtaaaggatttgagaagtcaaacttgaagccagttccgagtctttgatagaattttgttatggagatactgtttgatcttgtggaaattgatgatttgtagaatgcggagttgttcacgttgacgtatggtgctattgtgcgtcaattgcttactgacctggaagaagtagaggaagttaacaaacagcttgatcaaatgtattcttcttctacgatttatgtagactctcttccatggttttagttttgtatttttgtcatcttgcatttgtatatttcattcttgtgtttgaattttgtttgcattatgtttctggttcttttgttcatatatctttctaataatatgtcatggatgggatgaataaagcattgtactctcaggttcatactgatgagtgttcgattgtttagacctttatcactaattttctgtttattttgcaggggatacaacattggaatccgacttatcgatgagtttctagccaaatctggtgtttccagatgcgttgactttaaggaaactgctgaaatgattgccaaggtttgccatttccagtgacttgtttagtatcacgacgttacagtttgaagtgtctccgggagtaaaaacaacgaggaattaaactgcaagatatatgaatgtttattccacttgacactatagataaaaccttatatatcaaactagagcataagcttcttaatgtctagtagatatcactcctttggtttcatggtattgagaaagcagtaacagggctttgccttattgcacaggtgggtttcaagatgttcttaggagtcactgcatcagtgacaagctgggactcggacgggacttgctgcagtataatcttagaggacaatcccctagttgatttcgtcgagcttcccgatacttgccaaggtctttactactgcaatgtcttaagtggagtcattagaggagctttggaaatggtcagtctccttctccattatcaagtgcagaacttgtttgtgctcagtgttttatgttcttattttttgtctgcacaatgatcaggtctcaatgaagacagaagtgacatggacgcgtgatgttcttcgaggagatgatgcttatgagttgcaagtaaagctactgaaacaagtcgctgaggaatatccttacaaggatgatgaataaatatcaatctcttatcttccctcttcctcaaagagaaactaattactgttttgtagtctctttctctgcattcttagctttgttttttttatccgcaaacacaaaactataagctatgaaactaaatactgtttaaatccatttcttagtgttctgatgtgacaagagttaatcgtatcatgatgtctcaaatcgtgtaataaatagatcaattcagtgagatcagagtgtttttttctttcgatatctctaataattttgcctcacgaagaaataagncaaagaacaaaaataacattgaggtgtcgtcatatgattggttcagataaatccgacgtggacatcattggttattaaaaatgattataaatctctttgtcttattattttctcaccgtcgagagaacaaaacacaagttgcagactttatccaaatttagggttttctttttcttcttactcagattatcatcagatcttcgaaaccccaaatttacaaatcaggtaataactttctccgtatgtctttctttgatcaccgattgtctcttgcttcgtttgcttttaccgatctgtgattgaattttctagttcgttgattaatttttattacacttcaatttggttttcgattttgattcatagagattgaattgcgaattatgtttcagatccttcgtgtttgtatatgattcaaacaaagagaagatcttggcttttagttttttttcttcttcttgtaataaactcctacaaggcaacgatgattttgatttggtccatcgatgcttttaaccttataggattgtaattgaactggatcagctttacttgaattgtttggatctcgattattcataaaacatcttgttaattaaattgaaacatatttgtgtctgtgttcttgatgatcatgtgaatttggtagcataattttgcttgttgagattattaatgagatg

SEQ ID NO: 125 - DNA, 200 bp, Unknown
  misc_feature (1)..( 200): cDNA_ID_1376494_gDNA_ID_2871_Annot_ID_146017 3000 nt of promoter + ATG
gctagtagatctacttgagttttaagagatgtgtcttctttaataccattgtggttccttttttaatttcatggcttaagtgaatgttttttggcttctttggttgctatagcttatctctgatttgattaagtagaatcctttgtactgaagtgactttttttgtatggatctaatgtagaatatagtcattggagatg

SEQ ID NO: 126 - DNA, 306 bp, Unknown
  misc_feature (1)..( 306): cDNA_ID_1688584_gDNA_ID_2876_Annot_ID_146022 3000 nt of promoter + ATG
  misc_feature (152)..(152): n is a, c, g, or t
aaaaaatattccttctttgattggtgttaaatcagtatctcttaacccacaagagattagggtatatttaaccaacttgtaagaatcaaccttaaaaagaaaagttagggcttttcactaatcttgattctcagtttcttttctattacaanatttttgctttgatttgattctcttcctgaaatgtgtggttctttttctgttctgttctgctctgttctgtttcatcttaatttgtttggggtttggtgaaaaatggatactttgttttttcagatgtggcttcattgatttgagtgagctatg

SEQ ID NO: 127 - DNA, 440 bp, Unknown
  misc_feature (1)..( 440): cDNA_ID_2685721_gDNA_ID_2891_Annot_ID_146029 3000 nt of promoter + ATG
taattattttgtaaatggttctaaaaagataataattataaataaaagaaaacttttttagaaaaaatcttttaaaaattacaaaattagtttaaactctctataaattaatagtacttttctaaattaataaaattttattgtctcgatattattaatttatagaggtttgactgtatgatgaatagttaaatacctttataaattttgttacaaatgttggatacatatatacaaattacaatctatactaaaccaaattaaccgaaaaacaatcctaaccagcattaaaccggagctatacatatgtagtagatcagtttaatttggtctcactcaatcccaagaaaaaggccgttctttgcattttctatcgtttcatgtctgtctgagtgacagaggaaaccccaaaaacctccgtaaaacctcacaaaagaatg

SEQ ID NO: 128 - DNA, 807 bp, Unknown
  misc_feature (1)..( 807): cDNA_ID_1690384_gDNA_ID_2912_Annot_ID_146038 3000 nt of promoter + ATG
gatccacgtcacggacgttacctcacagcctctgctattttcagaggacagatgagcacaaaagaagtcgacgagcaaatcctaaacatacagaacaagaactcgtcttacttcgttgagtggatcccaaacaacgtgaaatccagcgtttgtgatatcccaccaaaggggctcaaaatggcggcgacgtttgtgggtaactcgacgtcgattcaagaaatgttcaggagagtgagtgagcagttcacggctatgtttaggcgtaaagcgtttctgcattggtacacaggagaaggaatggacgaaatggagtttacggaagctgagagcaatatgaatgatttggtcgctgaataccaacagtaccaagatgctactgctgatgaggaaggtgagtatgatgttgaagaagaagaggagggagattatgagacttgatccaccaaatcaaacattttacttaaaagacaaggaaacgactcttggaaatctctctatttaaatttgattgaaaaacattgaaaaaatgggaaatttgtttaaatgtgttttttgtttgagtaatttgttcaaagaaagtttgaagtttccatttattttgggtgtcttgtattttccatttgagataatacgtccttgcttctcaagctactgtgtcgtatataaattttatacttctctcaattgtcccacatcgagtaaattagtataaaggaagctaaacttttgcctctataaataaagatacttcatttcccaccgacttttacatttgggcttcttaaaaaataggcttgacaataaatg

SEQ ID NO: 129 - DNA, 2881 bp, Unknown
  misc_feature (1)..( 2881): cDNA_ID_3014315_gDNA_ID_2921_Annot_ID_146041 3000 nt of promoter + ATG
tatggtagatgaatcacgaaaagctgaaaaagctcagatcgctagtaaatagtaataatagattgagtctagttgatcagaagaaacttgcacaagttatcaagttggtggtcgaaatggaggatgaactcgaggagaaggttcaaaaagtcgagaagataaacagaaaggtagatgagaagatgaagaagaaggcaaagaagagacatttttcgtttttggtttgttgaatgttgattcgtcttcagctatcatatcatgtcggtgttagacttaaaataagtgtttaccaataacttatacaagagaggttctacaccgtttaccaagagaatcaaagaatgcaaagtttgtaacttttgtttgtggtttaaaagaacaccacaatcattgttgaatgcataacatatttcaaccagataaggagttaaagaacttttatatggatctaatacttaaccactaatactaaaaatttgatcttgaagcaacataggagatttgagtagttagaacatatctagcaaattctgatctattgtgaaaagaataactagagacggatgacttaatttctatatagcatttggagggtcataatgacttgtttttatttacgtgttttacgttattttgtttttgtcaaaaggctttcctaaattagtaatactctataaataaataaacacaataaaatactctttcttatcgatttaggtatggccaatgtaaaaaactaaaaattaacaaaattttgaaacttctatacatttttatggttctagtaatattataaatttatacatatatagctaagataatattctaaatatgactataatattgtttgtaatttgaattattgttagcgttattctctaatgttacttattattcaaaaactcttcggtgttttcgatttgtatccaaattttatgataaactagatgatcacccgcgctacgccgcggtttttttggatttttttgtattatttaatttaaatttaattttatttatctaatcattcactcatgcaataagcaattacttagtattaaaaatatttttttctaacaacattctcaacaatgcatcatacatataattcataaacaacatttgtcttaaattaatttaagagagggtagtgttggattctagaaacctaagaatttgatgataaagctccttacgtattcttcagcctcagtaatttattctataaatatcataaaagaatataaatatcaatttaagagaataacttactcaaatcattaagtaatccacgactattatacattcatactttgagtttggattacaaaaaaaaatcttcgagtatgagaaaactattaaaatagttttattaaaaaatcatataaaataaaaataaatttagtaatagtataattaaatatgtaaaataaaattaaataagaaatatatcattaacctataaattagaagttgaagagcttacattaattatttaatagacacatgtcaaatgctaaagtgatgatgtgtcaatcatatggagagagttggccaactttcatatatatgattctaaacacgataattaatttacaaaaataaagtacttatttgagtacccttaaatttatgtttacttgacttcccagttcccagccagtataaatctttttcttatatttaaattaattaattaactttggatatagaattgaattattaggaaaatatatacatatcaatcaaaaatataatatttataagcttaatacaaacatagaaatatctatatctatatatatctagcttaattaattggatagtaaaagcttatctttgcatttttattattttaattaattacttgtatatatatattattttaaatacttattagcatattgacatttaagatacaaggtttaaatttcttttgttattttgaacagaagttttgttaatcagtaaaataaaattattgtaaataaaagaaaagattttgtgcaaaacaaactccaaagtcgtttatttttgtaactttatctttcacgtttaaaaatacaaaacaaaattatgaagtaaaaataatacgtaatgtagtcgattttacaactttacatatattgtaaacgttttcacgatcacatatatttgtttttaaaaattttaaagatatagttgaactcctcatctcaaaggctttgatttgataaattatctatctaaattttaaaattatttatcagaattttaaaatttgacaatagcaaaaaatttgacatatgtataatttttgacttagtattattattctgcattgttaagatgtaaaatgtaaagttgtaaaaagtaataattccgaggattttgtgtaaaaaaccttaaaatgttttagagtttcttgcacaaggataacttttactttttttccaaaccccaaagtctgatttacctgtgagttaacaacaattactactctctttgagtaaaaatcgcatgccaaaaagattatagaaaatataataccgaagaaaattccaaatatacaagcagtaaattaagttgattttgggaatagtctacaatcccatgtacacatctccactacattccatacaccttttttaatctaacggctcacaaacaataaaactctccgaataagtaatcaccacgtgatttatcttgacacaccaaagtttgtatagacgtgcatgtatgtaattaattaaccttttatgtactatgaattaactgtgttgatatataaagggtgactcaataccccaaaagcggtctctctctatactttgcttctctctctaaacttctctctttctttttttctcaaagcttttttccttctccctaaacgatg

SEQ ID NO: 130 - DNA, 376 bp, Unknown
  misc_feature (1)..( 376): cDNA_ID_1690403_gDNA_ID_2922_Annot_ID_146043 3000 nt of promoter + ATG
gcacgaggagtgaggcgactcacgagtttcctcgtagtcgacaagaaagctcctttcaacgcaatactgggaagaccatggctacacgccacgaaagccgtcccatcaacctaccaccaatgcattaaattcccctcgatgaggtcgattggttgctcaagatcggatcgataagagaagtaaaataccctgactagctcgccaacccggtcgtcgttaaaaagaaaaacgggaagtggagagtatgcattgactttacggacatgaataaggcatgtcctaaagatagtttcccactcccacatatcgaggcacctattgttataaagtaatgccctttggtttagaaaacgctggagctacttaacaaagaatg

SEQ ID NO: 131 - DNA, 357 bp, Unknown
  misc_feature (1)..( 357): cDNA_ID_1690518_gDNA_ID_2963_Annot_ID_146062 3000 nt of promoter + ATG
tgaaacttgattctatatattatttctcttgataacagtagctactgcatagctatttagtttgttacttgaagtaccatataaatacactgctgaagtttccttctgattagctttcatttagagcctactgaagctgatgctttattttcttgatcatgcagtgaagtaggccgttggttaatacttctatctttgtgatactctttatcgcaggaaaagtcatcaactggatcacgcactgatgatatatatcgccatgatgaacagcggtctgcagcaagagggtcgtcttttgtccaaagggactccagaatgcgttatgagagcccagacacatatagcaaatcaaaaatg

SEQ ID NO: 132 - DNA, 357 bp, Unknown
  misc_feature (1)..( 357): cDNA_ID_2686240_gDNA_ID_2986_Annot_ID_146081 3000 nt of promoter + ATG
  misc_feature (25)..(25): n is a, c, g, or t
tgagtgagtatgcatgagtaaaacnaatagttccacttaaaccttttccaaaaaaccaaaaaaaaaatccaattaattgaccttaaattatagggagaggtttatatagtattgcctaacgtgagctacgtaaaattaaagacgctaaattcgtaaatgcaaaatcatttctatttggttgataaaccggaaaaattacacttaaccgagtaaaaggtacgtcactgtatcttccccatatttacccacctgacaatatatgatacaagtaaaatcttaaaatcccaaaaaagtgaaaacaatctctcttctttctcaaggataatgagtgagccaaatcgggtacccaaatccatg

SEQ ID NO: 133 - DNA, 929 bp, Unknown
  misc_feature (1)..( 929): cDNA_ID_1690682_gDNA_ID_3004_Annot_ID_146092 3000 nt of promoter + ATG
  misc_feature (115)..(115): n is a, c, g, or t
aatttttcatcaagtatcatgacaaataatcttttttgatgaaagcttggtagttttggagttaaatattttaatttaactattttatagttaaaccgaataaatttaattaaancatcgacatcacaaatgaaattttaacaatatattaatcaaagatacttataatttgtttttggatatttagacaaaattccggttattcagataaaattcggatatttgggtaaaagttttgggtattttgatgaattttcgactattcgcataaattttttgagtgtttgagtaaattacgggaattcgagtatatctgaatttaaaggatacctgatttttaaaagtatttcgtggttttgaatttttatacccggactgatcagaacccgatgagatccgaaccgaaacctaaccaatattttatttttaccttcttagctcttaacttctctagtacccgatcggattttaaccgaacccgacccacaataccgttccaataatcttttcttttgacatacctttaaagctttcaccttctgttgctctttcaaaaccaaagcctattgggatgaccaatttgtcccaaacatgaacacaattccacttataagtcactgcacacccaaatttgaatgcttttatatttttctacactcccaaatttactctgggaaggtccaactaaatcgagaaagctatgtcatttactccacacggaggatgcccacaaggtgttcgacacaattccacaaagaccctgtcacgtggctcgtacgtgacatcttcttcaataccttactcgttgattttttcccgcttctcctctgttttctctcgccaagaacaaaacctctctcgataccaagaaaaagcaaagatcagatcactgagaagcgttactggcttctactctcttccccaacatg

SEQ ID NO: 134 - DNA, 2534 bp, Unknown
  misc_feature (1)..( 2534): cDNA_ID_1690969_gDNA_ID_3113_Annot_ID_146096 3000 nt of promoter + ATG
tttgtcttatacttgcatcgatgcatgcgatgtaaactttgtagaagcaattccaaccatggatatcgcagatactgaagtaactccataatcaatcatttacatatctatcatatacattaatattgaaagtgttttgatattggtatttctctatatgaaaaaacaagacaacccgagacattttaacttcagattatagtgtgatatcgaataccaaattgacctttctatcgaagataaaccttaatattgataaagacatatagttactaaagaagtaagttaatgaatgttgaataaaaacaccaatggtaagctaaatattaaacaatacaaaagagaaaacaaagctaataagtaagaagtaagaagctaaagagatagactgacatccatgctccctcaaccaaaagacaaaacacagtgcatcaatggcccagctgtcaccacaactcttttttttgttgatataggaacttgttttgttttctattctataatatttatttattcttctttcttgttatctttttaaatcaaaacgatcgagactgaagttgttcaatttttttcgtaataaggataagaaattaattaaggatagagagcacatgaaaatacactgtatgtactgtaatggtgcattcagggacccttcaatacgttccaaggccacatgtgattctcacaaaatggttcaatatttatgaaagttatttgtgaatatatgttaagataaaatgtacctggaccattctttctatttgtattagactatcttacacgtgattttcttactcttttgatttgacttcaattagatctatatattgcatcaaactttttaccaaattatgcgtcaagtcacaccaattgatgaggttggccttatcgaagtagtggaaccgtcatatgctaaaccaaatataagaaatgaatgaaagacctttcaacaaaattaataagcaagtagaagtaaatccaatatcaatataacaattggttaaacctaaattatatgcatccaatacgaaaattctttttttggtatcttttaatccgtttattatatttgtggagcctaagttgcggatccacttgtattccttatttgaatcattgttatcatttctcattgtttgtgactcgtgagctagaagaaacaaaaacaaaaggataacgtaattttgatatttaaagtaaaccactataaatcattgtgtgtgtgttttttcttgttttaaaagatcgaattagggagcctaacatgtttttgtctcaagagattattatcattaaaaaaaacaagtggaagtggaagttgtgtaacccacttgttgaattcttaacttcgaagcacaacaaaaagatagacgaaaaacgaaaactcaatctaacttcgacatatgcattagataacatatagaaatttaaacaatctcgttgatgaaattggtctatcaacacacgacagtggttctctctacagtagcatcaaatcggtggatccttatgaacagaaaaaacgaggagggacagaggaaggccaatgaggggtcatgcaaaatggaacttagcaaaagtaccaaaaagatccatcctctttgaaaattcatttcagccccataattatccatgacatgaatttcgatctgaatctcacaacaagtaagagatcagcttttgataacattaaagaaaaaagtaaaaaaaagaaagacgagagactgagaaaagggcaaagacttgtaggggttaagacagctaagagtgttcctcagtcgccccacaaatgtcttctctcctctctcttcagtctttctcagctctcaaatctttaaatggttccaagttcaatgctcccaaaacccacgcccacacatgcatcctatgacctttccttttctatccattttcttcccacaaattaccactttgcaaacacacaaaagccaaaaactcatttacaagatgagttaataaagacactaacacacaaccaatgtgaaaacagacgtttacatgagatatcgttacctctaagaagtcattaatcatataatgagaacattcttgcttcctaagtttttacaagattattaacctctaagaaaggagagacacttttaacgcaataataactacatgatgttataaatataggagagagtagaaaagaatatgacagccctactaagacagagaatcatcatcgaacagtaaagaggagaatctctgaatatccactttaaactactgccctcttgtcttaactctcagaaccatttaatttttcagttattttgacccataccctttttggcctctttccctgctttccaacaccttcacacttactctagggcttccacggctatatatatatggtcccttccttaaacttgtatctcataattcacaaccagcactgctactactagtttatcattattccatcaatttattctatatagagttcttctctgtttatattacgatattgctcgaagattacatacctgagaaagatg

SEQ ID NO: 135 - DNA, 367 bp, Unknown
  misc_feature (1)..( 367): cDNA_ID_1690975_gDNA_ID_3114_Annot_ID_146099 3000 nt of promoter + ATG
ccgatccggactgcctaagtccggacgagttctctcgacccaagccactaagtgactcagccctaaccgtttatgaggttctttcctagtctaatccgttccatatgattccgtgattcaatatatgagacgaatagagtaaacaaacaattggatactttattgattaagcaaaggattcgatacaacctatgagtttgcatataagctattacaagtcatataatcgatccctagactatccgaactatcaccacccatcatcccggtcttgagtctctcgcgcctaagccaagtccttcccacgatcaccattcgttcctgaaagtcatagagccataagtaatctcatttacttagtcatatg

SEQ ID NO: 136 - DNA, 906 bp, Unknown
  misc_feature (1)..( 906): cDNA_ID_3013323_gDNA_ID_3123_Annot_ID_146105 3000 nt of promoter + ATG
  misc_feature (14)..(15): n is a, c, g, or t
aatacaatatgttnnattattttgatgtgttcattaatgtttcattctttacgacttttctctaactataagtgtgagagtcgaaactcgcacaagagaaattgtactaagagtttcttcaaagaatggatctttgtgagtttctcaaagaacaacagaatttttgattaccgcggacggtattcttgattatattattgaaataatgaggattcgatcgtacaagtgtttagaaatatgaaaataagtgttttgtcttcaaaatcagagcgttttagatagcctgaagttgagagcgtttttgtgcctttgctttgtttgtcctcagaggtgctttttatagggcttcagcagatcgcttctcgcgatattcccggaagatttctctttatctttgagttggcgaaggagattgtccttatcttccgatgattctgggaatttctatattaggtgatatcttcggagattctccaatatctcttccggtttttttggaaatggtatgtttgatcctatattagttaagtcctttctcaaaggttttcagacccgatccgaagttcttctgagccgggttgagctgaccctcgggtcgtgattgagcggctcgggccgtgacattcgaaatatgcgctcccgaggcgtcttgaaacccgcctcagattgatttccgggttgacgtccaaggcaatttgagaccgggtcggggaaccatttcggggcgttattgataacgcctcgggatggatcctcgatgtgatctccgaggtgttttgtggcccggctcgggatgattctttgacatgttctccgaggcattaaacatggttgactcgtttacctgggtggaatccaaccccaacagtttgcccctcagctcattgacttagaggaaagacgatg

SEQ ID NO: 137 - DNA, 279 bp, Unknown
  misc_feature (1)..( 279): cDNA_ID_3014307_gDNA_ID_3133_Annot_ID_146110 3000 nt of promoter + ATG
aaaaaaaaaagtattttcttgaaatcgaaatctgatctccattgagagtcttgctacttgatttggattccgatttaaggttttctcgagaattcttttgctgcagttattagattttgacgagccgttgatctggacggagttccagatctccgggtcgtggtaccaaggaattagggttttagcacaaagttctcgtttttctgtgtattcgagggatgaaggagttttcgggtcgatgttcgctgctctaacatttggagtatgaagatgaacatg

SEQ ID NO: 138 - DNA, 74 bp, Unknown
  misc_feature (1)..( 74): cDNA_ID_1685057_gDNA_ID_3142_Annot_ID_146121 3000 nt of promoter + ATG
caataaagaaatgaatatttccaccacagaattatgaattgagtaaaccagaaaatcgaagaagaacggcaatg

SEQ ID NO: 139 - DNA, 762 bp, Unknown
  misc_feature (1)..( 762): cDNA_ID_1017618_gDNA_ID_3159_Annot_ID_146132 3000 nt of promoter + ATG
caaaatcaagatcttcagaaataaaataaaagacgaaagaaagctgtcgcaaagcagattgtgttaaaaaaaagtggattgggctcaaacgcaacttgtccagcccgtgacaattaccctatacgcaagtaagagtaacgtatcactggcaaaagttggtattagttacgatatctttgtcatgggggcatgcatgggcatggcttaagagttaagccttaagaagagtcccacactcgtgactctcatgatcgcttgttgtttcttacgggcaaatacatttaactttattcttcatttattcacctatattcttttggataataacttttctctatataaaataacaaacatcgtacgtttcatttatttacaacaagcgatgagaattaaaaggagaccttaattgatgatactcttcttttctctcggttacaacgggattattacagataatgataatctatatggatgctgacgtggaaaaacaaaatttggtgaaacacgtcaattaagcacgacttttccatggctagtggctaagatcgtttcatcacatggctatatcatataatacttggatgaattcaaaataaacgactgagaaaatgtccacgtcacggcgcaccgctttggacttaagtctcctataataaatacaacaccaaacattgcattccacattaattcgtcttgtgcaaaaaaagacacttcttaagcttcaacaagaaagaaatagtattcgcatagtatcagaagatg

SEQ ID NO: 140 - DNA, 225 bp, Unknown
  misc_feature (1)..( 225): cDNA_ID_1687366_gDNA_ID_3196_Annot_ID_146151 3000 nt of promoter + ATG
tttttaataagtccactgataaagacgagagcccaaaacgtaattgtattattatcttcttaatttgcttttaaattttaaattgacattaagacaagactaacttttgcttgtcaaatccatgtgttgtccagcgggtaatcaacccaaagttccggatccggacccaacagtaagcaacattttacgattcgttgtttttgaatcccaatgaaaaaaaagatg

SEQ ID NO: 141 - DNA, 1118 bp, Unknown
  misc_feature (1)..( 1118): cDNA_ID_2999487_gDNA_ID_3219_Annot_ID_146163 3000 nt of promoter + ATG
  misc_feature (336)..(336): n is a, c, g, or t
tcggtaacataacgatcgttcaagatgtgatcaaaccgggtgattacttcgatcaaatcgagtcattgtcgatcatacaatgtcatcgagacgaagtacttgagcctccagagtcggctagagtcataggattctcagacaaatgcgacgttgagatattctcagtggaagatcacttgctttgctttcaaggtcatcccgagtataacaaagagattctccttgagatcattgatcgtgtccacaagatcaaatttgttgaggttcgttttaaacgtctatctttggttttattaatcctattatgtatagattggtcggtcttctaatgtcccnccccctgggagattattccgctacgtacccaatttaaattccgttgttcaggatatatatatatatatatatatatgtagccagggtgaggaatctctaaaacgattttttaaactaaaaaatatgtaggaggaaattttggagaaagcaaaggattcgatcaagaagtttgaaccagacacgcagcgtttgcacatgctttgcaagaattttctgaaaggacgaagaacccactaattggtttagtttccacgttcatggtctaaataaattctactacgtttgtgtaatttcataactattatatggtcatggtcatcacataatgtaacatatcttcgcttttaactaaattaccgactgctataagaaataataataataaattaccgataaacaaaaagaagaagactggtatttgtaattttaatttagtcatttataagtgggtataggttacgtgtataaatagattatttgatcttcaaaaaatacacgtaaaatcgagctacggtaaacaaataaatgtgattctaaacttagataaattattaggtggagttgtcatcttatagacagctaatctcgatgtgtgattctttttttttcaactaatttttgactattttttttctgttttctttatttaacaaaaatctcacttggcgtgtctgatcttgttccccgtcgtcgtctctaacttacacatttccattctccgaatctctatctctccttttgcttcatcggtgtgatctctgagacgaaagaagaagaagatg

SEQ ID NO: 142 - DNA, 1407 bp, Unknown
  misc_feature (1)..( 1407): cDNA_ID_1687439_gDNA_ID_3242_Annot_ID_146175 3000 nt of promoter + ATG
ttttttttctaatgttatagaattgtatgattgagaattggatgttttttcctgaatttagaattggtcggacgaagagtgttgatattttcttcaactttgtactgctgaggaaaaagggaatagaagaaagacgagattaaatataactggaaaagagtccatcatgagatagtttgaagaaaaatttgggaagagatattcatgggataaacaattcaagaacaagtatgatgtgcgtagaagaacatacacaaaggttaaaaacttgcttcataacagaactgaaattacatatgattctgtgtaaagaataaatataatttttcttttcattacgtttacctaagtatttaagaaagcaagtaaacatacttttaataactaaaggtcgctgaaaattctaaagattgtaacgtgaattctcaaaactgtaaaaactgattctttttattgtaccctatatgttaacgttaattctcataactctaaattcttatttttccatcaaaatcatgacgtcaatcaaactgttaaaaggcgaaatacaaatataaatattgtactaatattgttaatctgaaatatctactattcaaacatatttgtttgaagtatatcatattacatgatacattttttggtgatgaatcaaattgatgaataaacatttcaatatgaaatttacttgtttttgaataattatgtaatacttttttttattagttatattttgtaaaaaaatataatattttattataaatttcatcaattgacacatattcattcatgacaatttttttatcaagcttgagatcctcaaaatggttttatcattagttatatttaaaattttaacattaaatcataataatataaaaatttggtgtttttcagttttctaaaattataaattatattattttggtattttgtatttaccgttatcgcacatgctggttaatcaactataaaacttcaacaaacgtaaaatttaaccgctaaatcaaacatttaaaatatatgataactcttaaaaccgcaactctccgtttccataaatttcagcagtcccaacagcatccgctgcatttgaaccattcaagcctcgtagtttggtcaagaaccgattacgcgaccaaatcttatatccgacgctaagtcgctaaccatgtggaaaccattatttatcaatagaaatcaaaacgacaaaacccgacctaaaccgaaatctcaaattcgaacccaaatccaacttacaaacccgaccttaaccggaaatcagaatccgaaaacattttcccttatagcaaggtttaaagaaagcaataacaaaaccctatctctcgtctcttctcccccaaactctcgccgccgtgataacccaaagttctcgacgaagccatg

SEQ ID NO: 143 - DNA, 2891 bp, Unknown
  misc_feature (1)..( 2891): cDNA_ID_3014900_gDNA_ID_3254_Annot_ID_146185 3000 nt of promoter + ATG
  misc_feature (1888)..(1888): n is a, c, g, or t
gctcaccatctcgcaaagcctcaagggactggacaaaacaggatatgcataatatggcaatgtaagtaaaatgaaatcatgttaatctcattggcgaaatcatatatgtaagagagaaactaatgcaagcttgcctgtaatagtggctggaaaagatcaaaaatggctttgtggatcttctcagattttgtatggaaacactgacccaacaatgtgttacgcatcacacttggggacaaggtagccctaagccagagcttacaacctttcatcatatgaatgtgtcaactaacagaatatatatcttcaagataaactggctagtttataaaacgacaatagttaccataccaagtgttttaaatagctcttttaggcaattaacagccagcgaaaattcaggtgaatcaccacttatgtgattcaacactgtatcgacaaaaatgggataaggctctaatatcccctcttcaaaagcagggccttctaagaactcaagcctttaagaagcaagaaatattaaggaatcagcaactcaagaaaaatattgaaaaacagtaaaaggaagaaaaactataaggggagaattagtcactaactcttacagtgatgtcatcccaagccatatagatgagcggtctaaatatatccttggtctcggttcctgagacgcagaaggcagtccctccatctccagaattccaatgaatttcttgagcaatggctggaggcgctctaactgggttgctgacctgccatgatagcagataatatcatacatggtttcatacgcactacagatagtcttgataacagagttagctattaatttacttagttgctgtatgaaaaaggaaaatacctcaactttcccatggcccttgccaagcgataaccaattacacgcacccttctattgagaaaaaggagtgcatacacaccctaaacagaatgaaatatgagaaaacaccaagtcagatagattcagtttagtaggaaacacaagaagctctcctctggtattaacataccggaaattcttgattctcagcaaacgcaagctcgtgtatgttgtcgattgactcaataaatttctcaaactcagtgcataaggacatatcatcaaagaagaatggaaacatcaaaacctgacaccaaaataaaggctcataagttactatttactagatgccaatcccatgatgcaaagaaatgacatgacatgaggattcaaaatgaatagaaaaatacagatcatcagagtcagtcggtaacgcaaatgattcatcagtgaaaagaacaatccagtaattattttaagtgaaatgaaaaagcacatatactacaatacctcgtacataacactaacaacttcagcatgatgatgatctggatcatatgttcctttttcaattttcaaattgatctcttgcaagtgcctcgtcaccctttcctcatcaagtttccgcaacacaacaagtaatggaccaacagaagagcactcatactctttttcatacatctcttgagtctgatggtgctgacaaatgcattgcgcacaaagccgcatctcttcagagattctcttccacaagaccttgagaggtgaatcaactctatcatctttgaagtaattgtagaaagtctctataagaggtcccattatatccccgtgcccacaccaaatatgagtatctttcggcaacgatatcaataaagtgaatgcatccgtaaacctaaaagaagatgtaaaacaaaaacagtcagctagagctgaaatccgagcaatgtaataactaaattttgtctgatgattttctgatttcaatcgatttaacagtgaactattcagagcaaagagagatatagaaggaaccattgttcttgncgctgattaagacgccgaactgctgaaggatcagaatcgtcattctcctcttcgtcttcctcgattctcctccaccggttcaagagctctccacttggggagactttactcaacattttactctcaattcaacaacgggggaataaaaaaatctaacagaaggcgtagtcaagagttccggcgacgggaattagggtttccgaagtagagaggaaggaaacgaggagaaccaatttgaaatgccttaattcgaattcctgggtctcgctcgttacacaaattcttcgattttgagaggaaaaccaattttcaaagcccttactgtttgttagtggggagaaaaaagcgagcgcagtataaaaggacacgatgtcgttttatactaggggaaaaaaccatattgggccctattgggctttcctagatggaaaaattcaaaatagtcctattactttctctttaaaattgtaaaaaaaaatatcctctctcttgttctttctcgcgttctgctctttcgatttcaggtgattgatttgattagggttcgagttttagctcaattcattgcttctgcgtcaattattaggcttctagatttctgttttttttctctatatggtaatcatgaagtgtatgctttgcaactatcgattttcggttgattattagggtatacatacactatagatctactacgcctcgtttactaattatgtgggttatgtgatggctctttacttttttgattgataagcttgattcgtgttcaagtcctagttctaggatctcttgtcatacacaaaggaaagaaagaaagagttagagattttggaacctttcaatgaatttggattatatgtatactgatgatatgtgctctccgtttgctaagtcggttggtagttttgcttatcagtgtttcgagaaatcaccaattctcaagctttctaacttgaatgtatgttttgtgtggtactttgttctgactagcagccaagagatg

SEQ ID NO: 144 - DNA, 2302 bp, Unknown
  misc_feature (1)..( 2302): cDNA_ID_3594261_gDNA_ID_3265_Annot_ID_146194 3000 nt of promoter + ATG
  misc_feature (1290)..(1290): n is a, c, g, or t
tagacattacaagtctctacaatgttggtttatcattaacaaggactaaacaatatactataatcatacaataaattaagagtcgtaaattaatggtaaactcaactaatgcatgaatagttgtaaaagtatatatatttggacacgttactcaacttgcatcgcggatctgtattccttcccaaccactacgtacacgcatttcccacgagtttgacgatctttctcgtttaatctaatcatatctacttttataggctccatagcccacatttcatatcttatagtacgttccaacttctaaccaataaactcaaaactagttgagttttttaattagtgaaatatatcttgaattttatatatctaatcttgcaccaataaagtttctgtcaattatgtaaaagaaagactcgttgtatcagtatgggacgactttttcttctgaattgtgtcgatcgagtccatattataatactttgtcacgtactttgtttactgattaatttaatataattgtgtcgcattatccaagtctaattaaacattaatgtgtatattatacaccaagttacaattacagatctatctcttagtcgttttattatgtatagcctacaatgaaacatgacatcaacgtataggtgaagctgaagcctatacataaaagtaaggttttggagtttgtttcatgttttaaggttttagatattttgtgatcgatttgcatgtatagggttccaaatatctgagctttggcttggtctactttgagaaagcagctgtagagatcaactttagccgtttaggtgataaaatcacattagaactctataggtcgcgtagcagcgtataagagccctggatactgaaatacaagaatctctccacgcgtagaaaaacgaaccaaccatgataaaacacgtgtcatatcgaataggtacagacaacgtgcacttgccaaccttctttccttgtagtttccttcttctttgcttctttttttcgttaaatattgatattgttcaaaaaacgcataacaacaaaaacgtggtcgacggaacatgtgggtggtggagttgtcttctttaggggaccactcactaacgccgtttactttcccgcttggacgataacacccttgatatatggattagtctctcttttgcttttggatatcttaatatatttaatatgtccatttttatattgacgaccatttaattaggtctcagtttgtattattgatttttaggtgccaagcattactttcgttacgtgtaatctttngattattcaatcaaattatcatatggttcatggcattttatcaattgtgacggtcgacatgtgggttgactttgatgtatgacttttagcttgtgcctcatttttattccaactcgacaactagcagactttatattttaatttatttctttctagatattagacaattcttagcttgtctctctgcatgaatcacgcgttaatatacttataatagtaagttttaaaatgtttcgagtataatatcatattagatttcaattataattgtaagattatttagtctcaatgaagagcatttaaaaatgtgaaagagtttaggctttgactgttgactggttctaacgcgttttgcttcttatttatacaaaaagattttattttattttaattagaaatattaagtactttttagacgtgtttaggttgattaatttcttgttaacatatccgataaaaaaaaacagcaccaaaatcacgacgagaattatgcgtacgttacgttgataataaagattagagataaaatgtaacctctcttctctttacatcattacatgcatcttgtgttttatttgactttattcttaccaacaaacaaccaatggataaattaggctcgtgaaggagggcaaactcgtaatttcaaagaaacggaaagcgtgagaacgtggagaacagtgaaccgagacacattcccgatttttctaaagaaacaaaataaaacacgtgttttttataccataagtaaagtagtagtatttattaaactattaatatatagctttgttatattggaggtaggaagaagaactctgcaaccaaaccaaccaaccccaaagccaaacaaagttttatagagaccttccatttctccctctcgtgacaaacgcaatttgcagagaagcaacaacaacaacaagaagaagaagaaaaagatttgagattactttgtatcgatttagctattcgagaaactcttgccgtttgaaagttttaattgttaaagatg

SEQ ID NO: 145 - DNA, 3000 bp, Unknown
  misc_feature (1)..( 3000): cDNA_ID_3600293_gDNA_ID_3265_Annot_ID_146195 3000 nt of promoter + ATG
  misc_feature (427)..(427): n is a, c, g, or t
  misc_feature (2338)..(2338): n is a, c, g, or t
ggatactgaaatacaagaatctctccacgcgtagaaaaacgaaccaaccatgataaaacacgtgtcatatcgaataggtacagacaacgtgcacttgccaaccttctttccttgtagtttccttcttctttgcttctttttttcgttaaatattgatattgttcaaaaaacgcataacaacaaaaacgtggtcgacggaacatgtgggtggtggagttgtcttctttaggggaccactcactaacgccgtttactttcccgcttggacgataacacccttgatatatggattagtctctcttttgcttttggatatcttaatatatttaatatgtccatttttatattgacgaccatttaattaggtctcagtttgtattattgatttttaggtgccaagcattactttcgttacgtgtaatctttngattattcaatcaaattatcatatggttcatggcattttatcaattgtgacggtcgacatgtgggttgactttgatgtatgacttttagcttgtgcctcatttttattccaactcgacaactagcagactttatattttaatttatttctttctagatattagacaattcttagcttgtctctctgcatgaatcacgcgttaatatacttataatagtaagttttaaaatgtttcgagtataatatcatattagatttcaattataattgtaagattatttagtctcaatgaagagcatttaaaaatgtgaaagagtttaggctttgactgttgactggttctaacgcgttttgcttcttatttatacaaaaagattttattttattttaattagaaatattaagtactttttagacgtgtttaggttgattaatttcttgttaacatatccgataaaaaaaaacagcaccaaaatcacgacgagaattatgcgtacgttacgttgataataaagattagagataaaatgtaacctctcttctctttacatcattacatgcatcttgtgttttatttgactttattcttaccaacaaacaaccaatggataaattaggctcgtgaaggagggcaaactcgtaatttcaaagaaacggaaagcgtgagaacgtggagaacagtgaaccgagacacattcccgatttttctaaagaaacaaaataaaacacgtgttttttataccataagtaaagtagtagtatttattaaactattaatatatagctttgttatattggaggtaggaagaagaactctgcaaccaaaccaaccaaccccaaagccaaacaaagttttatagagaccttccatttctccctctcgtgacaaacgcaatttgcagagaagcaacaacaacaacaagaagaagaagaaaaagatttgagattactttgtatcgatttagctattcgagaaactcttgccgtttgaaagttttaattgttaaagatgtcgagttctatggaatgttctgagttcgtcggtagccggagatttactgggaagaagcctagcttctcacagacgtgtagtcgattgagtcagtatctaaaagagaacggtagctttggagatctgagcttaggaatggcatgcaagcctgatgtcaatggtaagaaaccttctctttctcctagatccacttcttttttcgttttctctgttttttatttcttgaatcttgatcttgaaaacttttcaagaaaattttgaatcgatttcaaagaaattagggagagttagtttgctaaattttgacatagaaaatgattggagagagttctaacttttggatcatatatatttgcaggaactttaggcaactcacgtcagccgacaacaaccatgagtttattcccttgtgaagcttctaacatggattccatggttcaagatgttaaaccgacgaatctgtttcctaggcaaccaagcttttcttcctcatcttcctctcttccaaaggaagatgttttgaaaatgacacagactaccagatctgtgaaaccagagtctcaaactgcaccattgactatattctacgccgggcaagtgattgtattcaatgacttttctgctgagaaagccaaagaagtgatcaacttggcgagcaaaggcaccgctaatagcttagccaagaatcaaaccgatatcagaagcaacatcgctactatcgcaaaccaagttcctcatccaagaaaaaccacaacacaagagccaatccaatcctccccaacaccattgacagaacttcctattgctagaagagcttcacttcaccggttcttggagaagagaaaggacagagttacgtcaaaggcaccataccaattatgcgatccagccaaagcgtnttcaaaccctcaaaccacaggcaacatgtcgtggctcggtttagcagctgaaatatgaatgctaaccaccctcaagccgtaccaagaaattcttttgacgacgttgcttcaagacaagatataaaagctcctatcttcatgctttttgatttaagatacaaactactcaatgattaggaaacttcatatatttgtatgtattgattagtgatcaattattgttagtattcgttatagtctgtttttctactagttattgtcgcctgtctaaatccccttgctatgggttatctcaaaattagtttcgtatgtaactaattttgtaagaacaataatttttgttgacgaaccatactatcaaatactctaaattatatcttgataaatctacctatcaggtaagtaggtgtgttttgttttcatttgtttacttgttacctactaatctcatattttatgattcaaattcaaacccgtgaattatgagttagtaggtaggtttaacaacatgtcaacaactaaagaacaacgtgacatctaaaccaaaccaaaactatagagagttcagagtagtcgtagtctcgtagagatcattcatataaataaatcgcataaacaccaaaatcaactcttaattctttcctaatcatcattaatctcta

SEQ ID NO: 146 - DNA, 3 bp, Unknown
  misc_feature (1)..( 3): cDNA_ID_3440483_gDNA_ID_3274_Annot_ID_146204 3000 nt of promoter + ATG
tat

SEQ ID NO: 147 - DNA, 2667 bp, Unknown
  misc_feature (1)..( 2667): cDNA_ID_1687540_gDNA_ID_3290_Annot_ID_146216 3000 nt of promoter + ATG
  misc_feature (301)..(301): n is a, c, g, or t
tggatgaggtgtcatttaattctctgcgataaagttactctcttttggatacatataattagatttacgtgcattgtaattgggttattctgttggttggaaatcttctctttgttttcttattttatacttgatttcttgcctagagaaattggaactcaaatatagtaagcaaaggtctgtccggaagtagaaattgatttcttttgttatttctacattttttatgtagattctggatgtggctgtttccttagccaaagttgcggatatagacaggactctacaaaatgaagttgcngcgacagatgggttcaaggaaggcatgagactgctggaatctttgaaactggactctgaagattctgctctcgagcaacgggtaagattcttgcacgactccctttttatttgtatcttatccaaagctgctgaatgtcagtaaaactttatctgacaaatgtaattttaacatgcatgcagcggctctctgtactggagttccttaagaagcaagtagaaaccgatgctgaaactgcactctaaaccgatgcaggcttaagtacgtatatagaaattatacctaagttctcgtctgtggcattttgctgaataaagaaagcaaaaatcaaaaatgttgtatttgcgctcaagggacaaagaaacagagttgtctgtatgttgtgaattgtgatggttttcaactttcaatgcactaatcttgcaatgttaaattgttaagcatgattgtactctatgcacttgtgaaatttaaaaattaagatatcttaagcggctacagctgtgaactgctttctatttcttttcagtgcaaaatgagaaagaacccaacagagattgagagatgatatggaaggaaaatgcaagtatttgcaaactcaatcagctacaaagagtataaattgcgacaacaaaaatttgtctttgttgttttgttgcatgaagtttttcttgtaactactcttacaaaaataaaaacataaacatagtcaatccctaaagccgatgatactatgcaaacgacaaagatatactaactccaacgcacgaatcaacaaaattaggtcacttttacgaaaataaatctacataatcaacaaaattaggtcaacttcgttctatttgtaaagcttttttcagtatttttttctttaatatgttcacgtcttttaactgttcatataattacgtaactaaatctttaacttcgtatgtaaaactatgtttttacgtattagatatagagaaattgttaagaatgtttttccaaaaatatttttttttagtactatcctcccatgtaatcatttttattgatattatcttttaattattaatgactattttgcttctatttgaaaatacttaaatcaacaaaatgagaaaatgattttttccgccaaaaaatgtacttcacatcaactgctatgaaacaatgtactgattttatcaattcacaaaaattcttacctctaatcaatcgtgattcaagcaatcatgcaaaatcttgagtaaccaagcctaaaaaacctaaaaacctaatcaattcttgagagatacggaaattaaagtcaaagattactatcaactctcgcctcttatccatcttaattagttcttcaaagatttcacacgagtaacctaaaatccattgaaattaagtcaactatatacctctcttcgcggtttatagttgaaatctggaggcatcgccaagtagccgccagcttcgccgattttacgttgaagatcagcgttttcttccaatatgaaatttctggcgtaaagcgataagtgcacttttccggcatagattgagttgaactgaacaagaataatacgacgacagatcagatttttatggataaagaaaccattatcgagaatttgagaaaaagatgaaagtcgagaaatgattattgattatctaaggatttataaaaatatataaaaaatatttaaagttcaaattttattaatcctactaatattagtttagaagtacatttaaaaaatatgaactaatatctatcatctaaaagagtataaattacaacaacaaacgaaatgtgttgaaagaggctgtttttccgggaaataagcatttgaagtttagtttcagaaaaaggagttaaaagaagagcaaagtaaaaaaatcacatatatccaaaacggtgtcgttccattctcaaacgtgctttatcttcttctttacacactctcgcctccggacgacggagacagtcagatataaattagggtttcagattttttagattttatctcttcaattcgagccagtgaattgccgcctcctcctcctcctcttcttccctcaagttagttactttcgtcttgagttttctaaattctctatctataaattgtgatatcaacttgtgagaatttcgaaaaaattgtatgtgcgtcttctttggagcttgagaatttaacgagagtattgattttttacctacagtacataaccaaagcaatgaaattctacttgtatcctgtaatggctgactaaatcaactgcgaatcgtggttcgtcactttcttaattaactatttttttttcgatctttgtctaatttcaataatttatccaaatcctgatacttgttgttccagttttgtgacatg

SEQ ID NO: 148 - DNA, 3 bp, Unknown
  misc_feature (1)..( 3): cDNA_ID_1687628_gDNA_ID_3315_Annot_ID_146231 3000 nt of promoter + ATG
aaa

SEQ ID NO: 149 - DNA, 1687 bp, Unknown
  misc_feature (1)..( 1687): cDNA_ID_1687639_gDNA_ID_3320_Annot_ID_146239 3000 nt of promoter + ATG
  misc_feature (466)..(466): n is a, c, g, or t
aattagatatgagtttttaggtaagcgatctctttcttccccatagatctggttaattttccaaaaccgatggtgtaaatccgttggaaaatttggcacaagactaactgcacatcaaaaatgagaagtgaggcccatattttcaatgttagaataaccacttacctctatgcatttgatgacaactttgatatcatccatgatgcatatattcatgaaggatgggtgttagtgagaatgactgtcagatcccttactatttcgggtgttgcctttgccaatacgatctaacggagttttaggtcacaatataataatatatacacacaacatatttactgctcagttcacaagtattctctcttgtttccttacaaattaagtaatagtcatgtttcatgtggttcatacaactacaacgaatgagatttgcatagtctaataattatcgtagctgttacagaangaaattctgttacagagagaatcgaaggagaaagagtcgagagaaagtttgttatcttcattaataaatgtagactcaattacagacattataaagactccggttcataccagtttacagactcaattatggttaacacttaaccatatactctaatagtagctttgtttcttatatttttagagttcaaaattgaacaatagtttaactcaagctacatagaaaacaatttcagtacaataaaatgagcatatgaagttgtggtacaaatataattaatagaggtttttcatatgcatttgcatatatctaaaggttgaatatgacgatgtggagaactttttaatggtgaaattgtttatagaacttctagaagatgaactaaacgaaatcatattcttggtgagtgcttctaaccttatgagaaaatcttttaaatcttgtcttctaatgatatgcaaacttgttatgttatctttgttgagaaaatgaatcaagccttgtaaattcattatcacttagtgattatacaaagtggagttgaaatttcatggctattgagatacttagttcccatatataaaaattttggggaaaacatatgttttcttccaaagattaaatgctttaagatatgactatattgtcaaagtttttaaaaaactaaattcagaccacacgttcatagacgtatttgtttggtataacattcattaatccgaaccaggggcggagacaatgctttattaggagggtcaactgaccctataatttttttaaactcctatgttattagtaataattgaaatgaccccaacctaaaacaatttttgaccccaatacgaaaattaatgttagaacatgaaacaaaaaaaagttcaaatacttgaaatttagtttcctagcatgtattaatctgaaacaaaaggaataataaattattaacatgattaaggtgttcttagttttgcacgtgggggttgtcaaagttgaccaaagcgttctgactgtttctttaatgagaaacaaatcaaataacacggcaacgtcagagtaaaactcgtgtcgtttcgattatacaacgatgaacgttgcgctgttttttgtttctcagacacggtgagaaacacaaaaaccatagacgacgaacgattcctcaaacgcagaagtcttctccttctctcgacggattaagcttttacacagaagaggagagatatg

SEQ ID NO: 150 - DNA, 1709 bp, Unknown
  misc_feature (1)..( 1709): cDNA_ID_2686252_gDNA_ID_3324_Annot_ID_146243 3000 nt of promoter + ATG
gctcacgtgtagagtcttattcttgattctcaaagctttgatagtgaagccgaattcttatgagtttttggttttgaacagtttaacaaggaagcaatactttacttttcgggatctggttgaggttctagttttatattcaatcatacacataacatctagtcatatttaactctgaaacgctaacctagattctttttgcttcttaaagtattaaatatatttgctcctaaacactaaacataaaccctacaccctaaatcccaaaccctaaaatctaatccctaaaccctaaaccctaaaccctaacgctaaaccttaaaccctaaaccctaactctaaaccctaaaccgtacaccctaaaccttaaaacctaaaccctaaacgcaaaaccttaaccttaaaccttaaaccctgaatcctactttaacttccaggttcttattgcgtttatagtttttgtactgaatgataaacaaaacatcaagtcaatttgtactacaaaaacacaaacccagcttcttcatgattctcaaagatttgatggtgaacccaaagttcttaacagtttttggttttgaattgtataacaaggaagcactactactacaagaaaacacggattttacgaccacatctggcgagtgtacaagtagtcgtaatatttagcgactattaaatgactatgtagcgacaaatctacgactaaaataaaagggacgttccgtagtcgctaaatgacgactgtttttaatagtcgttcaagtagtcgttagataacgactaagttgcgactataagtaagtcggagaattaagagtcgctaataagtcgttaaaattgtaacaataatcaaagaatttttatagtgttatagttttgtgtatactaagtaaaattagatatgctaaaattagactattagttttgtaattgttaagatataagttagaattataacatatttcagttcaaagctttattttaaaaatgcattctttaaacaattgtacaaagtatatatatatatagtgattgaacattattttgatatgaagggttaatcaccaaaataacctataattttgtataaaacctatgattttgtttaaaaatgcactatctttaattaaaaaattgtacaaagtatatatatcactctaattaataaattaaaaagggatatatattaatggatatatagtgattgaacattgtttttggtatgaagggttaatcacataaataactttgttttggatatagaccaaagttataaaaacctatgattatttaaaaaattaataaacactgcgactgaataacgactaataagcgactacaatcaaaacattgggctgaattaaaacccaagaaaactatcgcgggccaaaattaacgaggcccaaacaaagcccaaacattgtgtcgattagcgagggatgaagaacgagaatgaggaaccctaattcatttctcttctacctctctcactctctctcttgtttcttcgattcaccctgaatcttcatctctctctttcgtttcttcaatccttcctctaaatcttcatcaattgttctccttctgctatctttttcttcgaatctctcggatctctctcactttcagaagaagtgtctcctctagggtttgcaaacaaggtcgattcgatgcctctagctaagcgaggaaggaagagaaaaatg

SEQ ID NO: 151 - DNA, 34 bp, Unknown
  misc_feature (1)..( 34): cDNA_ID_3014874_gDNA_ID_3328_Annot_ID_146249 3000 nt of promoter + ATG
tactctgtattagtaggtcacagaacaggacatg

SEQ ID NO: 152 - DNA, 559 bp, Unknown
  misc_feature (1)..( 559): cDNA_ID_3014282_gDNA_ID_3334_Annot_ID_146253 3000 nt of promoter + ATG
  misc_feature (10)..(10): n is a, c, g, or t
  misc_feature (47)..(47): n is a, c, g, or t
  misc_feature (75)..(75): n is a, c, g, or t
  misc_feature (168)..(168): n is a, c, g, or t
  misc_feature (183)..(183): n is a, c, g, or t
tagtcactanctattttactaaaatcacaatttctacttttagctancatactattcataatcgtaacaactaanacacttacatgaccaaaaatagatttttgtaccatttaatcttaactattaatttgtaaacgatctcactactattgtaacgtttagtccgtncttactagtgtgctncacgttctttctcaggtctatggactcatccctgtccgacgatcggtccgccaaatctaagaggttttaaagacttgttaacgatcctacaaatcactatacgatatttcatcatgttttatcctcatttacatggttctgataatcatttctcggaaggtcacctatcttaaaactacttcgactcaaacacgtttaactgtggagttctccgcataaattaattattttattctctataaaagttatagaaatggtctcgtcattgtactgattgacatcatcaactggagagacatcaactttgggagctgccaatctcagaagaagtttatctcctttacatgccgaggtggaagctctcctctgggcgatg

SEQ ID NO: 153 - DNA, 36 bp, Unknown
  misc_feature (1)..( 36): cDNA_ID_1687697_gDNA_ID_3347_Annot_ID_146256 3000 nt of promoter + ATG
taaaaatctctgaaccgctgagaaacgacaaagatg

SEQ ID NO: 154 - DNA, 552 bp, Unknown
  misc_feature (1)..( 552): cDNA_ID_1687739_gDNA_ID_3397_Annot_ID_146273 3000 nt of promoter + ATG
caataagggcatactttggaggaaaaagacaaaatattactaagtaaaacttagaagatcttacattcgaagggaaaggaataacaaatcgtttataagtctaaaggcaccctctcccccacaagctagctttttggggtgagttctacctctggacttagtgtttgttaggtccaaacctaacaggcacacacaagaacattattactcactagtttataagaagaacaagaagaactagggggattggtttcgttcaaatttatatcacctagcttcttagggccttaccttacacattagccatcaaacaaacaatcttttgagatacgtttgagatgtttcttctcttttctcttctttcctcttattttacgtggtactctgtcatctcagttgatgataagctcatggtgctagctttgcttagctatttttaacttcacttcttggtgcaatattttaatatacactgttccttcatttctcctttgctcgtcccaagtattgatatctatatatgctgttttatactttatgttaggtataatg

SEQ ID NO: 155 - DNA, 185 bp, Unknown
  misc_feature (1)..( 185): cDNA_ID_1836205_gDNA_ID_3404_Annot_ID_146278 3000 nt of promoter + ATG
ctcaacccagccctgagtatctgttgttagtaagaaattgccgtctggaatgttttggaaagtccccaaaggatcgcatggcacgtcgaagattttcgaaagtgatagatatctctgtggatcccatcttcatggattcattccccagactgaaacagtggtaccggcagcatcaggaatgtatg

SEQ ID NO: 156 - DNA, 159 bp, Unknown
  misc_feature (1)..( 159): cDNA_ID_22476_gDNA_ID_3406_Annot_ID_146280 3000 nt of promoter + ATG
aaaaaaaaaaatgaccactgattaatatccgcagcagacaaaggcactcatagagttgaaatataacttttgtggcttataaaatgcatacatccacattcatgtcggtatttacaatttcatatcaatagttacgtataaacatataatcagaaaatg

SEQ ID NO: 157 - DNA, 1991 bp, Unknown
  misc_feature (1)..( 1991): cDNA_ID_3014266_gDNA_ID_3413_Annot_ID_146281 3000 nt of promoter + ATG
  misc_feature (523)..(523): n is a, c, g, or t
  misc_feature (1597)..(1597): n is a, c, g, or t
cacaagtgaaattatcaccgcttcacattgataaaagactaacctggatttcagtctaaaaatatcatctaagaaaaccatatagaattaaataaaatattgaaaaagtcatacttattttttaatcatgcatgcaattgggaatattatatggtctccgttagcttccttgtaagaaagagtctcacagagagaatatgaatagagatgcaagaaaaggaaaaatcaaggaaactacatctcatctcaagtaaaccaaaatgtaatttttatgacaatataataatagataagttaacgtcaactccagcatctcaactctcaagctgagtccgtgtaaaattgaaccgatcgtccactatgactcacggaatctacaactagagatcattaaaacaaatgggtaaaacacattagattatcggactcgtctcaccatgttgattcttcgaaataacaacacaagtactccattctttcacataaacataataatgttagtatttatttagttgtatactgngttgtgtctttatgaattgttttatctttgtttggtgtatcaaaagtgacgtgtgtaagtaaacctttaaggggctaaatgaagaaaaaaaagcctaaagcgttagatcatgtggatcctaccagtgcgatctccgtgatggctcgcgcctcccagcctcacaccacgtacgagtgcaaattgtgcaaaatcaattatacgctttttataagaaaacataaaaggggtctctttttgttaattaataattatatatggtgacttgtaaactgaataatggtgatactactagtaagcaccgataagaaatacgaacatctttaataatgtggtcatttccaaataaaatgattcgaatatgccacccttgcatttgttgatctcatcatcactattgattttctgatcttctcgatctacgttgattttgtacatatgaataataccatgaatgaatacctaaaagttgattatgtgtctgatttcaagcatacgaaatattagtgttgttagtttatccagaataaataaataaatatatatgccttgcatggcaatctttggtaaaaaacccaacatatataacaaagaaaataagcaatattattcttctaagaacatttcatttataaatatgcatggaaaagggaaataatgtataaaaatgtggtcatatgtatttccaatgggtcatggacctcatggtgaccatatataatgtagatgaataattgtgaggtgaagaagaataatgatggtgactttgtaatcttctcctcccacttaaattattgagcgacaacgtggctttttgttggcccatattcattcgtatctcccatctctccactccttatccaccacgtgtccccacctgcaagaccaactgtgtatatctttgtcacatccaagtcgttacaatgacagtgtttcacattcataaaggttaattatcatctacagtttatgacagttctatgattatatctgttataacatcatatcatcatatacatgcagtcccctgtgactatagatgactataacataattttctctgaacaattgtactgntcatttaattgtttctgattttttccctaacatgttaacttctactattaaataaaactttaaaataaaatttgagtttaaaattaagttttgttaaaagattagtatttggtgcctttgatggatcacattaccaattttagtcatctacttaatttcaagatacatatttactttttgacaattataccctaattgtcggggctcactaattttaaaacgacattagtcacgcgagaagatgccaacccatcacatcatcatcatcatacatcgcggcttttataagtaaacaaatcgactcttatgtatttctcccgacacaacacaaagttcatataataagaaaaacagagagaaacacacagagagctagaggagagtgagtgtcatg

SEQ ID NO: 158 - DNA, 1015 bp, Unknown
  misc_feature (1)..( 1015): cDNA_ID_3014269_gDNA_ID_3416_Annot_ID_146286 3000 nt of promoter + ATG
atatttgttaatatgttaatttgggaagagtttgttctttgcagctactgaaagctagtttccaggttagtagatgtcttatctccattgaagaagatgacttctttaacctgtcttgatatcttcgctaacggcgttatttcatggtgaggaatgcattgcaaataggattcattagtcacaaaataaaacttttatctcaatgcaagttgtctaatttacttgcaaaatcctgctgtttaccgttgaatggaagctcctaaccatctgtttcgacttgcatgtgcttacttgatcttcacatctgccatttctacagtctgcacgagatatttgtgaggacatcacacatttgcgaattctcatggttctggctaactttcccctctacagatgcagattaatctccctgaacacatactgttactctcaataccctgacttgagatcgttcattctattccaaggttttgtaacaatccatttcttgtacagatagtaattatttcttactcagtaaagctttttgtaacaagaggcacattacaatctttaggtaaatgaaaaaagcagaattctcttatttctccagactcaaatgagccttaatctactgtttcacttactgatcaggttctttatacacgatggttccactaatatccatatcatcatgctaccaaacatttgatatcagaatgtgattagagatttaacagaggatgatgttgttgagtcagaaatatgaggtgcattgtttttttcagtctgacacaacatgtgaaggaagaagtccttaccactcctttaagtcctctgtagtctagctttattcccacctttttttggttatctgtgcatgtgaccattattggtcgtatcccttgacccattccctcacacgcacatacacaaacgcacgtgtatacatgtttttgtgtcactgtgtctgtgtatatattactcagctctggagtatgatgcttctgtagttcagtttacttgtgtccaaatg

SEQ ID NO: 159 - DNA, 662 bp, Unknown
  misc_feature (1)..( 662): cDNA_ID_1687807_gDNA_ID_3425_Annot_ID_146295 3000 nt of promoter + ATG
  misc_feature (41)..(41): n is a, c, g, or t
ctggtccgtttgatcgagtgctaagagtgaagtactttccnccgtccgatcgagtgaagaaaccaaagagactaccttgcggactccgacggctcgtgacccgcctccattgaaatccatgatgtctctttgtcttcttgtcccctcataatcactttggtccccccccatcgcaattcccgaactcaacaacctcatatctccacctcccataccaaagcattctcaaattcttataactctctctctttccttcacttccccttcttatcaaaaacattgcaaaattcatttgttatctccatcattcgatttcctaacctactgaattttggttttgagtctctcccattcttgttctcaatgacaaacaagtgcacgctcttgtcaaggatccggaacagagctctctcaccatcgaagagatatccaacaccttcttcgcatgcagcagctcgaggactctctgaaccatcatccatgtggtcgagcaggagagaacaagcaagtttcgagatcgatcacaacgaatcaagccaagaggaggaagcgatgcaagaagaagaaactttcaactctcttgccaaaaacactcgatcccgaggaaagaagcccgtgggagaaggttgtaacttgtagatgaagactctgaggaagaaatg

SEQ ID NO: 160 - DNA, 593 bp, Unknown
  misc_feature (1)..( 593): cDNA_ID_3013944_gDNA_ID_3448_Annot_ID_146306 3000 nt of promoter + ATG
gttaatggaaagaataaaagacccaaacatgtggcctatatacccatgggacttatacatgattaagattggcatatacatcaatgtttttcttggtaaaacatatatatcaatgttataccatcaacactaatttatttttaatatttgaaatagaatttttaaaaatatatgatattaatttcttccaagctaagtgaaaaaaatcaaagcagccgtacagttacagaatcaaacaagaacttgacagcgtaagaagacataactcatcatactttcttctttttttcaaacaaaaactacattcacatatttacgtaatttttcatcactattataaattttgtctaggctcataaggattttaataaaagagaaatctgcaaagaagaaaactagtgtattaatttatgtatatgtttgcatttgaatgataagaaaatatctcgcatgactacaaatctttggatatcattatcttactatttatacactaacttctatatatcattttatcgttttatagccaaaatcagaaatattgcaaatcttattttttaatatggtttttaatatttgagaggcgggaaatg

SEQ ID NO: 161 - DNA, 3 bp, Unknown
  misc_feature (1)..( 3): cDNA_ID_1687846_gDNA_ID_3451_Annot_ID_146312 3000 nt of promoter + ATG
atc

SEQ ID NO: 162 - DNA, 85 bp, Unknown
  misc_feature (1)..( 85): cDNA_ID_1687850_gDNA_ID_3452_Annot_ID_146313 3000 nt of promoter + ATG
taactttttaggttgtgttaaataatatttgcttttgtaataaaggaacaaaattaaatagagagatcggagaggatcaaagatg

SEQ ID NO: 163 - DNA, 44 bp, Unknown
  misc_feature (1)..( 44): cDNA_ID_1687889_gDNA_ID_3471_Annot_ID_146325 3000 nt of promoter + ATG
tatcctagccccccccccctccaccctcattagaaaccagaatg

SEQ ID NO: 164 - DNA, 517 bp, Unknown
  misc_feature (1)..( 517): cDNA_ID_1378446_gDNA_ID_3474_Annot_ID_146327 3000 nt of promoter + ATG
  misc_feature (162)..(162): n is a, c, g, or t
agtcaacgaaactggctgctattgactttgttttccaatcagaaatcaaaactttctttaggggtcgttatagaaatagactaaagtaatggattatctgggaaaatatagaaacatgaagggggtacggctgtgaagacacgtgtatataggagaaggaangaaaaaatctgaggacagataaaatgacgatggtgaccataagaagaagaacccagaggatctagggcttcacaatcgattccttctctctatctcgacggatttagcttgcagatgtttcgtctcctctctggattcattaattcatcatcttctcttcttaaattctctatcttttcctgacaaagttagggtttttcgataactcgggatgagaataattggttcaatctaaagagctggctttgataaattattgagatttaaaagggtaattggaccttcctgaatcaattttcctggaaaaagaattgatttttagattgaaaaagaagtgagagtttctgtaactatg

SEQ ID NO: 165 - DNA, 16 bp, Unknown
  misc_feature (1)..( 16): cDNA_ID_3013635_gDNA_ID_3560_Annot_ID_146348 3000 nt of promoter + ATG
aaagctgcaacaaatg

SEQ ID NO: 166 - DNA, 606 bp, Unknown
  misc_feature (1)..( 606): cDNA_ID_3014242_gDNA_ID_3572_Annot_ID_146353 3000 nt of promoter + ATG
tttcttatagtatgtaacaacaacaaagggtttgatgatttaaacataaaaacacaggtgagagatgcaggacacatggttccaatggaccagcctaaagctgcattgaaaatgctgaagcgatggatggagaattcacttatcgaagatgctactgtgactgttgctgctcagggaggagaggaactggttgctcagatgtgatcacatcttcttttgcgttgcatgaaaacaaaaggcagcaaacataaaacaatgtgtgagcaattgacgttttcttctgtaatttgatctcataagtcataagaaagatacagtatatgtaggggttgcccaatttcgttataaaatcaaactctgctgacaccaaaaacataataattactacgaaatgtgttatctatgtttgtttccgaaataacgaaatgtataaaacaaaacttaaaacgttgtttatacaaaataaagccgaggtaggcttgcaagagtaatgaacaggttttgatgcggtttatgtacatgacacatggcaaaacatgattggctacatgaacgattttatctaacaagcaagatagagatgagattaggagacaaggagcaatg

SEQ ID NO: 167 - DNA, 2353 bp, Unknown
  misc_feature (1)..( 2353): cDNA_ID_3014240_gDNA_ID_3572_Annot_ID_146354 3000 nt of promoter + ATG
accgaggagatgggtttgtttaactggcatcttgctaacttggagtatgcaaatgcgggcctagtatcaaagctttctcttgcattctgggatcaagatgacccatatgatatgggtggagatcactgctttctgcctggaggaaatggaaggctggttcaggctttggctgaaaatgtaccaatattatatgagaagaccgtccaaacaatcagatatggttcaaatggtgtcaaggtaactgctggaaatcaagtgtatgagggtgatatggtgctgtgtacagttccccttggtgtccttaagaacggatccatcaaatttgttcccgaattacctcagagaaagcttgattgtataaagagattaggttttgggttactgaataaagttgcaatgctctttccgtatgtattttggagcacagatctcgatacctttgggcatcttactgaggatccgaactatcgaggtgaattctttctgttctatagctacgcaccggttgctggtggtgctctcttgatcgcgttggttgcgggagaagctgctcataagtttgagacaatgccacccactgacgcagtgactcgtgttcttcatattcttaggggtaatagatttcactatctattgattgtcatttaattgaatttcaatttttacctgtcaatatcaatcttcaagaattattagttgaggatttgtattccagatttgttaaagttgatgctagcgtctgacgcaagttccattttaatgaatatcaggtatttatgaacctcaaggaataaatgtccctgatccacttcaaacggtctgcaccagatggggtggggatccattcagtttaggatcttactctaatgttgcagtgggagcttcaggcgatgattacgatatattagcagaaagtgtgggagatggaaggcttttctttgccggagaagccacaacaaggcgataccctgcaaccatgcatggagcttttgttactggtctgcgagaagctgcaaacatggctcaatctgcaaaggcccgaggcataaggaaaagaatcgataggaacccatcaaggaatgctcattcctgtgccattcttcttgcagatttatttagggaccctgatctggaatttgggagtttttgcataatctttagtaggaggaatccagacccaaaatctcctgctattttgagggtaactctaagcgagcctcgtaagagaaacgaggacccaaaagcagatcagcactcaaacaagatactgtttcagcagcttcagtctcatttcaaccagcagcaacagattcaggtgtatacattattaactagacaacaggctcttgacctgagagaagtcagaggtggtgatgaaaagagactatactatctctgtgagacacttggagtgaaactggtggggagaaaaggtcttggtgttggagctgattcagtcattgcttctattaaagccgagcgaactggtcgcaagctaccatcatcatctacctcaggcacaaaatctggttaggctccgtaatttcctgatttgattactccttacttaccggatagaaccagtagcaacatctctaacttcttctatattgagtaggtatattaaaatcaaaatccggtgcattgaagcggaagatgatcaggtttgctacgaaatcatatgtgcaataatttctctcacttatcaaaaacaacattacagagaacctttctgttgcacagaaggattaaaggaccgttgccgctgaagcaaagtaataacaatggcgtctcagagagtataaaatcagagtctttaggtaatggcaaatccttagagcaacaacaacaacctagaatagtagagtcgataggaggaggtagcagcatgcaaggggaaagcaagtctttgagcacaggagttgcatctagttctggtattcatttttcgtaacttctttgttccttttgaaattctgatcatttacatcgataataactcacacgtaggtggttccttacatgttggtggtgagacgatgaaaaagattgaacaatgacttttggagaatccctgtttgatacaacatctgtagttcacaaaatttgtacttcataatccatttttattgtaacaactgacaaatttaagttataaattttttcctaatgataatttgtctggtatgtttccagactttttatttgcaaatgtaaaaagaaaatatttgattttttcttgcttcattacatcgaattttttttgtttgttctttaccaatataaatacaaataccctttgaaagctcagctttcaaaactggaacacaaaaattgaaattaagtggaaatg

SEQ ID NO: 168 - DNA, 337 bp, Unknown
  misc_feature (1)..( 337): cDNA_ID_1686449_gDNA_ID_3581_Annot_ID_146362 3000 nt of promoter + ATG
aatcttatttgggacatccagaaattaaacttttgaaacatagaaacaaaacattgtgatgagaagagtaaaagaaaacataaaaagataccaacctacacttaggttccaacccacaaagagaaacatatactttccctctaagctttgaagctttagtttcaccaaactgacgaagcacaagaacccaacatttgcatctttataaggcaatgatcatgaatcattttcgaatcacaaaaccaagagagaaagttgagaaatcatcagtagaagatcaaaagaggaaaagtcatagtatacatttaaagacacatcaaaagcttcaagggaaatg

SEQ ID NO: 169 - DNA, 640 bp, Unknown
  misc_feature (1)..( 640): cDNA_ID_1686532_gDNA_ID_3616_Annot_ID_146397 3000 nt of promoter + ATG
ttagtggttggatttgaatcttttaatggttatgacttcaactaaaaaaacactgtcgagagatgttgtttcttgtcttggtcagtgaaaattttctctggtcttagggtcttctctcagtcaccatcctctctttctatctctctctctctttactctctaatctttatccattctctctcttcttctctatgccaacgaagcaatagctatgaaaagctaaaccctttccttcttcttcttcttcttcttcttcttcttcttcttcttcttcttcgattgtttagattacttgggtttgacccaagtttgcttctttctatgattcatcaatctagatcttgctatctgggtccagaaacgattcacgcgcttcattcatgatataaagttactaccttttttttattttaccttctgggtcatggttttgtctgcttttcgtcttttgcttttgtctggatgattcataatctctcgagatctattatgttcacaagagttgttcttatgcgtggtgagatgatcttaggagtgtttcactatctttcttcaattcgggtttttagtttctgagatctgtttttgaagaatctgatctgagtttgaggaagtttgactaaatagatcgaagaagatg

SEQ ID NO: 170 - DNA, 1798 bp, Unknown
  misc_feature (1)..( 1798): cDNA_ID_23543_gDNA_ID_23471_Annot_ID_146398 3000 nt of promoter + ATG
atcctgagacctttttcatatcctgtgtcgaggaacctcatgggcttccatataaatggagggatcatgaatctaaacagtgtagactctgttgcttcttcaaaagctttagcaaatggaacttggggaagatcaacagctagagtttccgggtcagcacctagacccgcaaggcagatgatgtcaaacgtcaagcgcaggaacacgtcttggagatcgaaagcttcttgtgactttgcgaaactctccatcaccttcaacagcttcttccttaccaaatgttgtgttgtctgaaaggaatgctctacaaacccggttgaatgcatttcggttatgatgatccgtcgttgctccttccaagaatcatcatcagcattaaagataccttcctcgagcagatcattgaaccggcttttaaagaaggtaccttttgggaagttcttgaagttagtcttgagcatgtactcgacatttgcaggaacacaagtcacagctccataagacccatcaagccaaactccccgataaagaaaggtacctcgacattttttcaaactccttgtgacccatccatagacatcatttatatgaaagaaaaactctaaagtaattccgaaaactggccatagcattggtccacgcttgttggttaacttctcacgcaaacagcagaaaacaaagagccccaacaaggaaagaagtagatcgaagagagaaagatgattataaagtcgctctgttaaagacattgtagtctcttctcagtaaactctctgcagttttgtttgtggtgatgtcattgtttcaagagtatttgaagaaagatttgcgatgcatttcatattttggttttggaattacatttgttgtcttcgtgtagaattggtctatatgaagaagatgagggtttcttgttggcgacgaaacgtaattaggctattacaaattgtgtgtttattgagaaaaacccgtgaaagaaaaattccagaaaaaatgcaaatttgcctgtcatgtcttatgtgaatctatctgacataagctgatgacaaactgaaactcttagaatcaattaacaaacaaaagaaagagcaatcgttgttactagcaagtagattacaaggaataaatctgaaaaaatattatagagttttgactttagggggaagaggtccaaaacacagaggacgagatattttagttttagatatgttcagcctagttaagtattaatcaaagaatcctaatctatgatgcttcaatggcgatcccactgattcacactttcacagtctaaagactcgagaacaatcgaaagactcaagtaacaaacatcaagattgtaaaaaaactatcttgtagtgagtagtggtgacaaattcatgatttttgaggtttgatacgttatataatataaccaaaacttgtagcactctgcaaacacaattattattgatttacataaccccctttgtttcaagagtctttcactactgtgagtctctacttctctcctacatgaagcctaaaaacaaagctgttaataaattcgctgttgcattgagacagtaagtatgcaccaagtaaataaactcttcagtattcaacaatcaacacccatctttaagaaaaacataaattacttggtcttaataaccggacagaaccaaagactaatcaaatcctgaaccggtctggttcaatagatctaaacctaaagtataaatcaaacgtctcaattgttttttcctagggtttcaatctctctcccaaaaaccaaaacgcaaaacctccgataatg

SEQ ID NO: 171 - DNA, 2207 bp, Unknown
  misc_feature (1)..( 2207): cDNA_ID_1689063_gDNA_ID_23509_Annot_ID_146409 3000 nt of promoter
cccatgtcattgagcatatttaggaatatgagaagccatatcaaggcaaaagagattttcatctttcgttgatatggtgctagacaagaatgtttgtttatgcactagaattcggtggatgatgaaaagtttaaagtttttctaagctacaagagttgcgcatcaaaagagttaccatcgttagaaagcaagtgtcgataatttaaagacgataagctagaagttttaatgaaaggtcgtctgcttgtatcccgtaaatgcggtggtggtgttcgctaaagttacaagtaagtggtgtatatggaaataaatcaccgccaaaattttgaggacgaatttcatttaagtgggagagattgtaacaccccactcccacatagttgggccaatttgtcttgacattatgatataggctcaataaagcccaatagcttcctaaacaacaaaaagggttttgtgatttctcaatgaacgcgtctttatgtatatgcacatgtatagccgcctacataaaactgcaaaagagtgagagagaaggtgagaaaaatctcgtgagtatcaacctctagctaccgccgtcgtctccgttagggtatcgatctacaatctatgttgtgtttctctccggcaccatgttacgttgatttggagatgaagagcaagtagaaatatcagatcagagagagtaggtggatatgatcgtgagccatggaggaaaaaagaagaagaaagagaaagacgagaagagaaggggtattacggagatgaaggtggagaggtgacgtaagagagatcatcaccaccacgaaggagaagcagtgggaagtgatttctggttcttaaccttgaggagaagtattgagtgaagtagactgatccagatcgaagctaggcaaagcaaagaaagaagaagaaggaaaataagaaggaagaagaatagtttcaagatggggtttttgggagactcattcccgttgaatcagagagaatcaagtgacgtgtaaggtttctttggaaatataatgatgtcaagaatccatagccgccgacatagatagaatcgagattatattcaagaagttatgagtgtttttttctgggcaagtaactgtaaagtctgtcaaatccaggaaatcctaaatgacagtttaagatggcttgttgacgacaacgtttggagcttgtaatgaagtccgctcgggatgaaatttcgtggagttaatcaggatacttatatctaaatattcaacggttggatcatgtttctaacggttagttcctgactttgtagtatgtttacaagacaattttatttgaagtaaatggtgatgactttatgttgttggttgggaaacgagttcggcttgagctgaagctttgcaggagctttcatgactcatgaattcaggtcctggttgaaggagaactaagttagagcttatgaggatatggttccagtaaagatcgtctaataagtgaaaagaaaggagtcttcatcttcactaggctaaggtgagggttgtatttgcgaagcatggtatcattttctttttttatacttcttgacgcatgatatgtaggcttagatctgattgtataggataagattacatgatgatatgactttatgaatgttgagtatgatgtttgataatgtgatgttatgtatgatattataagtatgtgtatgttaagtatgattatgattatgagtatgtatgtatgatgaatgtaagactggggagaatcgagctattggtcgcggtctccctatttatgtggacagtgatggacctacgggttaatagctggtcaagaacagctgacgagcccggaatgggagtgtatgagccacgagggacaacctccactcattaggttctagttatcacgaggatgactggacctaacgatacacatttatatgctattatggataagatgcttgttatgaatgtgctattagaaattaaagcatgttaggttgattgtttgtgtctaagtttatatgttatgatgatgattgtataactttagaaagtgttctatgtttcattgggcagatttgattcccctcactaagtattctttactcacccttttttccctttttcctcaggttagtaagcgtgaggagttatgtgcaatattttgttcgtgtgtgaagtttaaagaaaacattttggcaagatcagatgaataacatg

SEQ ID NO: 172 - DNA, 520 bp, Unknown
  misc_feature (1)..( 520): cDNA_ID_3013051_gDNA_ID_23898_Annot_ID_146422 3000 nt of promoter
catttagctacttttttgtttgaaatagaaaagacattcaaaatagtaaacatataaaaccattgtaagaaaagaaatcaaattttttatttcttaacaaaaacgtgaaacgtttgtttccaaattagtcgcaagtcacggaccgtgtgacgcaaaaaaagtccattcacatcattattacataatttttgtcataaggaaaattaatttgatttttccaaatttttttggttcttcctcttcagaatatctgacgtggcataaatatcgcctttttcacatcgcctgtcttctcttctctctccattttgggaactttcatccataaacttctatttttctcatcgcaaacttgaaccgtcgtaaccctaaatcgccatcttcatcatcggcaaatcgaatctccgattatatatcaaatagcttaccaaatccgacatgacccaggccctcgttttcggaggactataatgatcggactcttcgtgtcccgtctcgattgcatggggtttgagctatg

SEQ ID NO: 173 - DNA, 937 bp, Unknown
  misc_feature (1)..( 937): cDNA_ID_1025443_gDNA_ID_24186_Annot_ID_146430 3000 nt of promoter
  misc_feature (747)..(747): n is a, c, g, or t
gtctctaagcttagtacattgttaatcgaagctaacaatagacaaaattagttttaaattgttgggatttttccccaaattcgtgacctaaagaaactcaaattaaacaacaatcctacggcgaaaactatggaactgacctgtaaaggaggtcgaaggacacggcggcacgagcgtggccaatgtggctataatcgtaagcggtgataccgcatacatagattccgattttgccgggattcatcggcttataaacttccttcagttgagtcattgtgttgtacaatgtcaaatccggtttctccacctccatctccgacatctctccgtcgcttggaagaatttctcaaaaactctgatgatttttcacttctcccgggtaaagctttcacgagctcaatttttaccggcggcasgtcgaattttgtttaggaaaattgaaattgcttaaatagccctagatttttctaagatttccatttttctatataggaaaattatatatgattttctgacccccaaaaaaatatatttgacaaataaaggaaattgctaaataaccttgattttagaaagatttccatttttctatttaggaaataatctatgattttttgtctaccaaaaaatacaaatttatatggctgcgaatattattgactttagttgatctctgagatgtacaaagaaaatctcgtattagcaaatacacactagtaattaagtaacaaaattggacacctcatntatcatcagatcactaaactcccacgtaaacacattaatagtcacagactcacagcaatattcttcatttgtggcccccgttacatttcaatccccaccacacaaccacatgtatgttttgccaaatttataaaaatgtagcacaatttggaatctctttacttggaatttgagtgaaaaccataagatg

SEQ ID NO: 174 - DNA, 2568 bp, Unknown
  misc_feature (1)..( 2568): cDNA_ID_1683704_gDNA_ID_24396_Annot_ID_146434 3000 nt of promoter
ggaatatgtttaatagcttataaagtttagtgtatttttgttttcaaggatatgaagtttaacgttagcacttagctagcctgtattgtttacattaaataaacttcttgaagaaattaaacttagaaacatatctagtaccataatttaagattgtgaacatgcttattagttatctgtatttgacaaaagcttaccacgagtcttatttaacgatagtgatgattcatttattcgcaatagatatatccatatatataaatagaggtttgtgtactcagttacactcacaatttatggttttataataatcacacaaatcaccacaaaacaacttagtacacatatatgccaaccttctagatcgcatctgtgaccccttcttgaagcatggtagatatagaagacatcaagattcgatcaactatatatcttcctgtatctagtcatgtcctaagctagaagacgacgctccaacaatcccatccttacaatcatccatctgcaaaggttgagatattgggataatattaccaaaaggatcaccaacatcgttgatgagcgaattaagaaacgatgagaacttgtcgtcgtagcagaaaccaaagtcttcgtagccgtgttcaccaccaaagacattgatactgttcttgctatctccatccccgccattaacagtggtatcatcagtatgagaactagaaataggctctagagggtacttttgtccaccggaaacttcttcttctggtttatggatgttgtttgcatcaagaggcttgtgggtttgaggatcaattccttgccttaaaagtttcttacgaagatgagtgttccaatagttcttaatttcattatcagtccttcccggtatccttcccgcgatcaatgaccacctgcatcacacattagaatttccatgaagaacaagagcggttaattactaatatggttacaaaacaagcttgcatttttatcctagtaatcataaacaatttgaaaaaagaatgaatgatctctagaactattaatttgctctagaaccagaatcaacttaattaaaattatactctaaagaaactagagaagggattaaccttttgttctatataaatatcgaatcaagaatcaaagtataattgttttatatagctataagaaaaaatgggatcaagctaaaatcagaaccttcatgtttatgtggaagaaataaaaccctagctagcttaaacaaaaaaataactctagtgtatgggtagagagagacacacacatacgtatgcatataaactaaacgatcttgtatagttgaatacttgacgagatttttttttaatatctatatatatacctgttgccgaggaggcggtgaagacggaggatgagatcttcctcgtccgacgtaattcctccacgtttaaccgagggtcggagatagttcatccaccgtagacgacagctctttccacatctgagtaaaccagctctcttaggaagcgatcgccaccgtccttcaccttctttcttaatgaagctcacaagaatctcgtcttcctccaccgtccatggtcctctcttcatccccatcttcgtgcaacacggcgttgttttcttagacactggcttcttcccaccacatgacatcatctccgccgtcttcaacaaagctttctctctttccactagggtttcgtgatctctatgagttcttcgattggttgtttttttcttttctcaaagtttctctctctccattagtctgctgatgttaccaatgaacctaccgaccttttctctcacgcgctagcttcggcgtttggtaataatcttcatttggtttttatttcacctgcgtggtttttttttcctttcattttaaagattttgcagtaacaatcatattgaaatccaaatggctaatgttattacaatgcataggttagttgcttctagttatttatattaaagatttgatactactatgaattataatttgattggctataaacatccgattataccagctcctacaattgagaaagttataacaaaatggttgataatacattaatgaatactaaccaccttaattaaaattgacaccagtgaaaaagcattaaatatttggaccaccttttaaatagatgattaatcagtaattggacaaaatgctagtatttttacaaatcgggaaataaaggggtgaaatcgtaaataaataaaaagtatgggccacataataaagaagaatacaggcgcatgagaaattaacataattacctctcctttattacagttagtcaatttctaacccaaaacttttgttttgttctttcctttttcttaattttgattttattaaaatttggtcatgtattttcactactgtaatagagctggcatctctgatctttcaactccaccaatctcgaaatcttttctttcaattttctcaaaaaattaaaaccctaattcttattggattctgtttccttgaggagcaattgtgttctgttcgctgcattttttttgttctgctgacggaggaagaagaaacgagaagagatg

SEQ ID NO: 175 - DNA, 3000 bp, Unknown
  misc_feature (1)..( 3000): cDNA_ID_30436_gDNA_ID_24396_Annot_ID_146435 3000 nt of promoter + ATG
ttaagatgggatatataatacattttgtaatattcttccaaaaaataaagttaaatacataggttctcacttgatggtgccactatgccgaagtgatgactgcaaagctcgtctagagtttcgtatccaagggtgagagagcastgtctttgcatcaggcctctgcctggaatcctgtaaaacacaagatacaaatcagatgtacatactggatattaaataaatcattgtctaggttctggtacagaggtaggtgaataaaccctatagcagaaaattataccttcttgaagcactgtcgtagaaagtccgtaatatctggagaaagactatcaggaataggagggttgtcatcctgaaacgaaaccataagaaatagtttgtcacttctggctaacagcttttgcatttttcaggagagaagtgtttacgacatggagaaggggacggaagagacacctaaatttgattgacttaaatgcaaactcataaaatgttgtcaaatacctgaacaatacgaaagagggctggcatgggttgcagatcatagtaaggaggtacacatgtcagaagttcgataacagtgcatccaacgctccaaatgtcagaagcagcacaaactcctgacatttcaataacctgaaacagaagttgggcttctgtcaatacgtacataatcaggtaaaagttctctaaaggagcaaacaaaagcatctttcaaacaacaacaaatattttttcaaaactgcgtacgaaagctatacagaatatggagatggaaaatatataatcaaaggtgtacctcaggagccatccagtaaggagttccaaccaccgagtgagtattaacatcagcctcgttaagtttagtggcaactccaaagtcagcaagcttcacaagaccctgaagtgtgatgtagtcaagtatctttctaaggaaaaagcctagaagaatcttatccagcagatctcaaaacaaaaacacactgaagacatgtctgagaatagataatatagaaaacacacctcctttgtcgtcaaaatatttgcacccttaatatcacggtgtataacaccctgctcatgcagatataccaaaccttccaagacctgtattcactagttagtacacaatgcataacgaaacttaactcaacttgaaagatgtatacagacctgagcaatgtaaacagccaccaaagattctgggaaaggtccaaatttatttggtttaataatgtttgcaagagagccattctcaacgtacctgcaaacacataattgaacttgagtttcccgtccatagtccagagtggaccaaaataaacaaaaaaagctacttactccaaaataatgtgaaggtgagtctttgtcttcgacgacccaagatacttcacaatgtttttatggttcaagttctgcaatgaaatattatctcagaatacatagagaagaactgcatcttaaccagcatcataaccattcatgagaagaagccaaaattcagaaggtgattgatttgacataaacttagtatcaggatcccaactctgtaaacagtacaaaattcagaaaactaccttcaaaagatcaatttcttgctggagaaattcatcccaacagcacaagaatcatccacatgtaaaaaccaggattagtcagcatagcagtggtaaggaacaaataaggaagatagatataaggaaaataacaaaccataatggtgttaagatcctcttgaacaatattttccaaagagacttgtttaatggccacaaagtcaccattctccaagtctaatcctttataaactcgaccataagctcctttaccaatttcatctcccagcatctaccctcaacatatcaaggatcaaccattgaaattaatcaaaattgaagagaaaacagcaaaaagcaccakacttaagcttaaaatcaataaaattactaaagctaaaatcttaaggagacccattagaaaacccaaatcccagaaattacggagaagaagaaagctcacatatttgttgtcgagagtctttgatttgtggaactgagatgacgtcatttgccgcgccatctcttctcgtttcttcttcctccgtcagcagaacaaaaaaaatgcagcgaacagaacacaattgctcctcaaggaaacagaatccaataagaattagggttttaattttttgagaaaattgaaagaaaagatttcgagattggtggagttgaaagatcagagatgccagctctattacagtagtgaaaatacatgaccaaattttaataaaatcaaaattaagaaaaaggaaagaacaaaacaaaagttttgggttagaaattgactaactgtaataaaggagaggtaattatgttaatttctcatgcgcctgtattcttctttattatgtggcccatactttttatttatttacgatttcacccctttatttcccgatttgtaaaaatactagcattttgtccaattactgattaatcatctatttaaaaggtggtccaaatatttaatgctttttcactggtgtcaattttaattaaggtggttagtattcattaatgtattatcaaccattttgttataactttctcaattgtaggagctggtataatcggatgtttatagccaatcaaattataattcatagtagtatcaaatctttaatataaataactagaagcaactaacctatgcattgtaataacattagccatttggatttcaatatgattgttactgcaaaatctttaaaatgaaaggaaaaaaaaaccacgcaggtgaaataaaaaccaaatgaagattattaccaaacgccgaagctagcgcgtgagagaaaaggtcggtaggttcattggtaacatcagcagactaatggagagagagaaactttgagaaaagaaaaaaacaaccaatcgaagaactcatagagatcacgaaaccctagtggaaagagagaaagctttgttgaagacggcggag

SEQ ID NO: 176 - DNA, 270 bp, Unknown
  misc_feature (1)..( 270): cDNA_ID_3013948_gDNA_ID_24413_Annot_ID_146442 3000 nt of promoter
tacaattggcccaatatgagtaagcagatgttagttagctgagagtgtggctttaattagagcatatggtttagtgttaacactgctaatctatgcaaaaatttatcttctccgtccgcaaaaattctttaaagcattggatcgagttttaaaaaggtatccgcgccagagcttaatttaatcattttcatttcttcatcattcatcatcttcctcacagtctcgaaaccctagtttttacccaataacaactttctgggttgagaaatg

SEQ ID NO: 177 - DNA, 82 bp, Unknown
  misc_feature (1)..( 82): cDNA_ID_1683740_gDNA_ID_24421_Annot_ID_146444 3000 nt of promoter
tacttgactttttcattcttcttgatgttaccacctcgcagtcgttttggtaaatttgttgaaatccaatttgacaagaatg

SEQ ID NO: 178 - DNA, 1663 bp, Unknown
  misc_feature (1)..( 1663): cDNA_ID_3013897_gDNA_ID_24677_Annot_ID_146450 3000 nt of promoter
acagtcctgaaggaatagaggaactatgctccaatttggaagtgtcacatactgatatcagaatcttgatgcttgcttggtaattatccatcaacacttttattaatgtttttcttccttctttaccggagtcacatatccttaggaatttttaattgttgcaattgcaggaagatgaaagctgagaaacaaggttactttacacatgtaaggaaaaatttgaagaatccataagagctagtgatccttttttctttgatacttgaattaagtttgtgatttgtgttttgatcttaactcactgtccatctgtaggaggagtggagaagaggcctcaaggctttaagagctgatacgatcaataagttgaagaaagcccttccggagcttgagaaagaggttcaaactcttatcctttatattttcattttgattgacatcttctgagtatcagtttagactgaatcattcttatttctgtctcttgaaggtcaggaggccatcaaattttgcagatttctatgcttatgccttctgttattgtttaacaggtaatattaaaatttctgcttctgcatgaggatatatatattgctgttgtttctcttttctacctttcatgtgtatgtgamctatgttttattgttcaatgcagaggaaaaacagaagagcatagacatagagactatatgtcaactcctagagatcgtcatgggatctacatttcgagcccaagttgactactttgttgagtatttaaaggtttggatcactcaaaagtctcacattgtataatttccagaatgttttcacgcaatgttgtcatctcacattggttatatttgtttggcacagatccaaaacgactacaaagtgataaacatggaccaatggatgggactttaccggttctgtaacgaggtatgtttcctaattcttatagttccccagcttggcagtttcatcaactaactctgattgtttgtaatatttacagataagtttcccggacatggggaactacaatccagagcttgcatggccattgattcttgacaattttgttgagtggattcaagaaaaacaagcctgaaatcatttctgagtcccctcaagtcgaagcttcaaatctctgcaggatgatcagtgggctctctcatcaaaacagattcagcacatttttacttcagttttcatctttcaaacattaaaaaaagacacattatatgattcttgttacatgtgattaacttcaatagagggaacacataatgtttgatttattacatcaagttctgttagtagtaaccaatgatttcgaatttgcttgtaaacacgttgttaccaaatttataaccatcagattcattctgaattggacggtgtagatcagcttacaccattactaaacaatcctaaaactcaaaaacgaattctccatctcttaaaccctaagaaaaggctcatctttgcgactgctcccgtgttcttcgtctctctgtcaatggctcgcctcctcagatgtctgagaaaaagtttcatatttagttcatcgacttcgattgcgtacagaaaccctagaatatgtgttcagtcaaatcaaagctatattttcttaagcagccgcaagtttctcagctcgggaagttacgtttcagaaatg

SEQ ID NO: 179 - DNA, 129 bp, Unknown
  misc_feature (1)..( 129): cDNA_ID_1683806_gDNA_ID_24689_Annot_ID_146454 3000 nt of promoter
  misc_feature (1)..(2): n is a, c, g, or t
nnggttttgaagaaaaggttttagtcgccgtcgttcttcgtttcttccttctccgtcttcgtcttctttctcagttctgttgtcaaattagggttttggtttcaggggaaaaagagagagagagagatg

SEQ ID NO: 180 - DNA, 187 bp, Unknown
  misc_feature (1)..( 187): cDNA_ID_2785779_gDNA_ID_24689_Annot_ID_146455 3000 nt of promoter
caaaaaaaaaaaaggcttcaaagagaataaatcccaaaaaatttcaatctttacgcaaaaggaataaacatttctgtgacggtttcaaggtttcatcggaaccctagatctaatactttttcccgatttgaatttgcgatttcagatctgagagaattagtcaaattctgaaatttcaaaattgatg

SEQ ID NO: 181 - DNA, 642 bp, Unknown
  misc_feature (1)..( 642): cDNA_ID_3013039_gDNA_ID_24708_Annot_ID_146459 3000 nt of promoter
cgaagtaagcatctcgttttgcataattatagtcattattattcatatatgaatggaccaaattgttaaagttgcgagcacttcactcacaagccacgtgcactaagccatcacacttacgctagcgtttaggataaaatcataaaaatgttttaccaaaaatcaaaataatttttaaaaacactttaataaatatcttcgtgtctttggttctgatttgaaaagacaataaagagagagattttgaataacagaagaaatttaatatcgttacctttaattttatattttctgtttccattttaatttgaagatccttccctttctttctttctctctctctctcgctcgccgggaaaaatcgctgtccaaatctccggttatttctccgaggatctcttctatcaatccaacggttttgttttcatcttctcagatctcacagaacaatagtcaaagactgatgcagaagaagcgttagtacaaggtttttgttggaaagcaattgaatctgaattcatctttcattttcacgctttgatccaatttgagttctctcttccactgaatccctcatacgtaaaacctagggtttctaaattagggttctcctgaggtctgtttatagtgcgtaaagccatg

SEQ ID NO: 182 - DNA, 836 bp, Unknown
  misc_feature (1)..( 836): cDNA_ID_2026537_gDNA_ID_24979_Annot_ID_146470 3000 nt of promoter
caaatagtttttttgcagcagataataactcgtccccactggcgagtgacgaccgagactctgtgaccctatttttcgagacgataaaagggcaaacaatcgctcttttcaaagctcgcctcttcaccacagagaaaacttcgtctctcttctctgcttcgccctctcatttcctgtgagataaaggcggagtctctctccagttattttgctcatccatcgattcttaggtatgactcgtttctctcagatctgtgattctttataatctcgtcgttcttcaaatcattgttatattcgtttcttcgatctgtgttttttagatctgtaaggtaaatgagacgtttcgatctgtagatctgattgttatattgatagattatgttatctgctttgcttaaagtccgatcggaatgttttgtgctcattgtcgaatatctgatgtatcggtttcatagatctgcttctttttgtgcgtttcgttgatctgataatcttctagtgatcaaaatcgtttggatctgttgactttagtttaaaatgtatccgatctgatgtcgaggcttcattattggaagttgttattgttgtaatcctgatttaagttgctgttcttaaatttatatgatctttgcgttataatatgacatggtagatcttggttcatggttcactgttttccaataaacttggtttgtttggttggatagcgttctgtgatacgaccatgtcttgtgttggataagaattctctgaatttccttggctggtttgtagtatgttattcacgtctggtttctcatcaatgattatgtgattttgcagagttcaaaatg

SEQ ID NO: 183 - DNA, 74 bp, Unknown
  misc_feature (1)..( 74): cDNA_ID_3046401_gDNA_ID_25024_Annot_ID_146486 3000 nt of promoter
ttccggatctgaattgtgttggaacaattggttctgatttcagatttcgaatttttttaatttgaatccaaatg

SEQ ID NO: 184 - DNA, 8 bp, Unknown
  misc_feature (1)..( 8): cDNA_ID_25828_gDNA_ID_25704_Annot_ID_146507 3000 nt of promoter + ATG
agctcatg

SEQ ID NO: 185 - DNA, 412 bp, Unknown
  misc_feature (1)..( 412): cDNA_ID_1019158_gDNA_ID_25709_Annot_ID_146520 3000 nt of promoter
aacaagagccagcgacttaatcgagtgtggcttattagttgacgtagagagacgacaaagagacgatatagtttataccatgagtacatgtgtgatgtgtggatcagtcgctctcgtgcgaggacattctttaaacagctgtaataataagctcaattacttagattttcatatatagatttgtttgttaaaatgttaaataaactttttatagaattagatgtcgaaacacttaacatgcactttgccacgtttgaacaaaactcaaatcaataacatcgcttaaacaagatttaaccggaattaaccggaccggtagaaactgtgtttgaaatttaaaagcacactctctctatcgccacacccacaccttctctgcaaaaacaaaagatttccacttttcttaaaaatg

SEQ ID NO: 186 - DNA, 1626 bp, Unknown
  misc_feature (1)..( 1626): cDNA_ID_3013044_gDNA_ID_26036_Annot_ID_146529 3000 nt of promoter
  misc_feature (1)..(1): n is a, c, g, or t
ncaaaattttcatttctagtttatttttgcagttttggtttctgtgtattcttttacattgccgtggcgatttgcggctacagtatgtttggtgaggccattcaatcgcagtttacgctaaacatgccacaacagtacatatcatctaaaatcgcagtttggacagcggtgagttataactttaaaattctatacaaacatgttttttgggtaaatattatgtttgtctctatatattactaaaattcgattacttctttttctgtcactgaattaggtgataacaccgatgaccaaatacgcgttatgtctcacaccgatcgtgctaagcttagaagaagttatgccgtcatcagggaagatcagatcctacggagtatctatgcttcttaggacgattttggttctctcaactttggttgttgcacttacattcccattcttcggtaaaaataccctaactagcttctttttgcatgaaattaatacaaataaaaccccatttttatcatcatttgttcttaatctttgcagcgatcatgggggctttggtgggatcattcctcgcaatgcttgttgtaagtcaacgttaacaaaattccagctattatcaattattaggcatatcacatatgtaaaaaaggattcatatatattttgtttatcgkgcaggcttttatctttccttgtctttgttatctgagtatcttgaagggtagattgagtaagacgcaagtaagagatatattaatttattttattttatgccataaagtaaagtggttattgttcgattcagtatttgattttcccataatttcatttataattttttgtaaactatttgatattttggcagattggaatatgcgttttcatcataatctctggcattgtaagcggttgctgcgggacgtactccgccattggaagattagtaggaaaactggattgatggtagaatagtgaacaatgaaacaacatagaattgtgaaacaataagagattttctttaataaaagttctatcaaatacgtaatcaagttttgtgaaactttaaacactaattttagtacagttttacagtttattaacttgcaatcttcttttttttattaaatgaatttatatatgagcaactaaaaatgctcattaagagatatcatcatgaaagtctttgcaagccatgattctagttccaattacaaacctgaacgttacatagctaaattattggagacgaagcgaattatcgaaaatgctctgacatttttaaatggaggtaaataatttcggttatacggataatcagaaactgcattttaggaattaagaaatgtgtcagcaaaattttgaaaacaataatagaggaccttaataataaaattaaaacaaaaggggcaaatacgaaataatataataaagaaggggtcatttcaattaggtggggagcttcgagttcaagagatctccaaaatcgtcgacaacttcagacgtactccaacaacaaagtacaacaacaacatcaatcgagagaaagcgaataaataaaacaaataatttaaattaaaaatccactcgccggagacgccgtcgtttcgacgccggtgctccaaaaaaaatatg

SEQ ID NO: 187 - DNA, 1261 bp, Unknown
  misc_feature (1)..( 1261): cDNA_ID_1684123_gDNA_ID_26042_Annot_ID_146532 3000 nt of promoter
caaaggcaattgaattcataattacgaaagaacctatcaacgttattttcgtcgctaattatagtaacctgaattttttgatgacgttattatgatcacgtggagctcggaggaactcaataaataatgtacaataactgatttatacttgtctcagtatacggatagttttccaaaacaatgaaagtacacgttgccttgccagttgcctgcatatatataaatatatatacatcgtctagtagataccattacagtatattgttgttgaggttttataaattgtgtaatgattttgtataaattaaagaaacatatctccaggcatctcataattacgaaatcacgtttaaccttcttaaaatatttataataccacaagatttgaaagtatttttaacaaatcataatttgaatcatatatgaaattttgctgccaagagcattcatatttgatccaccagaatgtcataattgatcaaatttcatatttgatccgccaagaccctgagcattcatttgatccaccaaattaaaaagtcctagtggattataacttagaattatttacttttattaaatcaactaatctatgaaccactcaaccacatactacattataagaaaacgtaagtagccaaactaatactctatacatttattatatacgacgaaacaagatatatccattctcgaccacgacattggattagcttaaagttaattttagtatcctataaacaccgttcacgtttatgaaaatatataaacggagcaatctttcaaatcatttgcttcaagttcaaaaacctatctagggttctcgggaggagatgtgctaactgattttctaacttgagtttagtccatagtaatttttgttttttttacgtattttaagatttgaactgaaggatttagaaaataaatgattccaatcttgagtatagagagagaccttcatacggagtatattacaatgaattatagtctagattgtagtggagtgatcaatattttgctttttagcggggagttatcattttcgaaggctttaaatgtttttttttgcttgggaaatgtgaggagtgtcatgaatatcgaaattaaatgcattcaccaaccctaacgatccaacacttcctttgagttaatgtcacacattaaaatcatatccacttgtttataaccacattttctctcagaatccataaaaagagagagagataaataaagagaaaactgaagaagctagaagatg

SEQ ID NO: 188 - DNA, 734 bp, Unknown
  misc_feature (1)..( 734): cDNA_ID_3013704_gDNA_ID_26049_Annot_ID_146539 3000 nt of promoter
aaatttatatccactaaacactttttaatatcaatgataaaatatattaaactttcaaaaatttccaaaaataatggcgtataaggctatatattggagagatgctcgaaaagattatcgattgttgtgcagaatctaacacctccgacaatatcgacctgaatcaaactttatttcaagaacataaaaagatcaaatctttttcttttgtgcaaatgggaggcaaaaggaacttactttccatcaagatagggaggagggttgaggcaagtaggcacgtatagcacgttcaatgaacattgacaaagctgtagtatctaaaattgtttatattttcacagagttataccctacgtacaaatcagtggttccaattgaaaaattatgttgtaccaatttcacaatttaattgcatcaaagtaacaattctgatgtaccaattaaactactcgtattaaataaactaattgtgtatttacaaacgaacaattgtcacatttaaactagctgtttaaatgtttttatagtttcatattactttgcttttttttccatttgtttttaattcatcgaagccattgattcgaatttagttgggtataatcttgatcagtaatttaaaccgttgcagactagggtgttgttgaaccggatttttcctttgctgggggaatcaactatacaaacaaaaaacccattttcctaaaaccctcgtcgtccctacaaagcctatg

SEQ ID NO: 189 - DNA, 623 bp, Unknown
  misc_feature (1)..( 623): cDNA_ID_3446743_gDNA_ID_26053_Annot_ID_146542 3000 nt of promoter
tggtgttggtattatgggctacattggtaacaaggtcttgatttctcttactagttgctttaaatagttatttgtagcctagcttataacttacggtttcttgcggtcttacaggggtctgtatctgtgagcatgtcaatctatcaaacaccattttgtttcttgtgcacgcatctgtcatctggagaaaaggatacagatcaagagaaaagaaacgatgatgtacgtgaaatccacagaagaacgcagtttcttcctcattctttaaatgccaatgagcttccaagaagcatctgtaatcatgagtacgttttatttctcagttgatccattcaactacatctcttaatttttttaacataacaagataaccttgtgtagaagaataatctggctgggagatctgaactatcggattaacttgtcgtatgagaagacacatgaacttattgcaagaaaggaatggcaaaggttggtagagtacgaccaggtacctttactgcagcattgttttggtttaatactaaattgtgaagttctaatgtttatgttttttaagttacatatgaatctatcaagattgaaattagatgtttattctctgatagctttcaagagaaatg

SEQ ID NO: 190 - DNA, 1504 bp, Unknown
  misc_feature (1)..( 1504): cDNA_ID_3012105_gDNA_ID_26053_Annot_ID_146543 3000 nt of promoter
tggtgttggtattatgggctacattggtaacaaggtcttgatttctcttactagttgctttaaatagttatttgtagcctagcttataacttacggtttcttgcggtcttacaggggtctgtatctgtgagcatgtcaatctatcaaacaccattttgtttcttgtgcacgcatctgtcatctggagaaaaggatacagatcaagagaaaagaaacgatgatgtacgtgaaatccacagaagaacgcagtttcttcctcattctttaaatgccaatgagcttccaagaagcatctgtaatcatgagtacgttttatttctcagttgatccattcaactacatctcttaatttttttaacataacaagataaccttgtgtagaagaataatctggctgggagatctgaactatcggattaacttgtcgtatgagaagacacatgaacttattgcaagaaaggaatggcaaaggttggtagagtacgaccaggtacctttactgcagcattgttttggtttaatactaaattgtgaagttctaatgtttatgttttttaagttacatatgaatctatcaagattgaaattagatgtttattctctgatagctttcaagagaaatgacaaaagggaacctattcgagggatggtcagagggaactttagattttgcaccaacatataaatacgaaatcgattcagaaaattacatcggagatgacccggaatccgggaaacgtagaccggcctggtattgtcttcatacactgtgatacaacatttttacttgatatgataaaaaggcaaaaacgatgagtttggagtgactatgattgatcaggtgtgaccgcatcatttggaacggaaagggaatgaagctcttcaattacagaagaaacgagattaaactatcggatcaccggcctgtcacagccacgttcttggccgaggttgaggttttgtctccacggaaacttcaacatgcgcttacacttacatatgctgagattcaaggccttgacgcctaaacaaccacttccgtcagatcccatttgtgtatagtaatttaacgatttgtatgcccttcatgtataatagtgttcacgtacacagaaatattgtagatagaaatactgactgaaaacaaagaccgtatctttgatgatataaacattggcaattgagttgagatgtaaactatagtgttagtgtatgcacaaatataagaattagctcagacttacataaaagttaattaatgggctttgttatactccaataatgggctcaataaagcccaaacaacctgccactcacttcacttcccagttcccactgactttgatcactgatttttttttcctgtctcattttccattttcccccaaaataaaaaaatatcacaaatcccatgaaaaatcacagagcttaraactctccacactctcaaactccgacgacttgactttaaratcatccctgaggagatcggtacttagcaatg

SEQ ID NO: 191 - DNA, 3 bp, Unknown
  misc_feature (1)..( 3): cDNA_ID_1684200_gDNA_ID_26300_Annot_ID_146545 3000 nt of promoter
acg

SEQ ID NO: 192 - DNA, 145 bp, Unknown
  misc_feature (1)..( 145): cDNA_ID_30530_gDNA_ID_26503_Annot_ID_146560 3000 nt of promoter + ATG
gtatgacgagttatatttgtgtaactgggcattttatcgatgaaggttggcatttacacagttatattctagatttttgtgagttgaagtctccgcacactggtgaacatattgctaataggattcttgattgtttaaaggaatg

SEQ ID NO: 193 - DNA, 373 bp, Unknown
  misc_feature (1)..( 373): cDNA_ID_3013024_gDNA_ID_26737_Annot_ID_146564 3000 nt of promoter
  misc_feature (238)..(238): n is a, c, g, or t
acaaattttctccattaaaagtgtcttcttttttagctgtattaaatttataggtctmtctatctgtactggtatagggttcatgattgagtctacaaaaacataatgaatgacctaaaagctattaactttcgtttctagatctgcttgcttctctttaatatcttcacctcattgctctaatagacattaatctccatttgaagttagtattcttttaccagttttactgattttnctttttcattcaggtaactgtgattgttgcaggatcttgtgtagaaacagatcacaagaagatgaatgataactcggtggtgcggctttgattatcttcagagattttagattctgtatccactctgttgcgatg

SEQ ID NO: 194 - DNA, 765 bp, Unknown
  misc_feature (1)..( 765): cDNA_ID_1684405_gDNA_ID_26964_Annot_ID_146572 3000 nt of promoter
gacttcgtcattaaagttccaacggccatattttcatttattgttgcgatttctttacttttttagagcatatgaatgttgtatgagcctctatataagctcaccttagttttcatttgtattcaagccttttacgaaataaacaagtatttttttcaaagtgtgtctttgagttttatgcattagaagttagtgtggattcaataaagtcttgtgtgtttgcggatcaattatcttgtggcttcaagttaatttgttcgtggtttgattgtggattcaatcaagcacgttgagtgtggattcattcaataaaacctccatctttcatctctaccatcattcatcgaatcattcaagatttaggtcgagaaatagagaagcgtaaaccctaggtagattccgaggtttgcatcattggtatcagagctaaaagctcctatcccacaaggtgaactcgttcccttttatccctttcaatttctgtttttgttattttcagatttaaatcgaaaaaccaaaataaaacttgtttcttgcaatttgttttgttttgattccgcaaccttaatagaaaaacaaaataaaatttttccttgtttagtttgttatttgtttcatttttgctattttcgttaaaaaaaataaatcaaatgttgttatttttgacttatttgttgacttacttcctgagttaagttctgattcattgtcttctttgttttactctcttttacgaggtaccacaaataaaatctgagaacgatg

SEQ ID NO: 195 - DNA, 3000 bp, Unknown
  misc_feature (1)..( 3000): cDNA_ID_1989477_gDNA_ID_26992_Annot_ID_146586 3000 nt of promoter
aaaaatgggaaacaatgcgctattctcttctgacgccgccatctttggagcctttaaactgagagattctattctgctgaaaggaaaagctctgttataatctcacaacatccaaaaagcttcaaggatacaaaattatcaataacatgaaaagctggatctgaggccactgaaattaattagggattctacatgacggagatcaacactaatagatctcggctaatctagtctaaaggtatatgaatccctggactcactttgagatcgacacaaaaccttagaaaacaaacaaacgaaactacgggaaggaagcaaaaccaataattggtgaaagaagatgaaatcgaacttgaaaggatattgtagaagaggaaatcgaagaagaagctcacctaggatgatagctctctataatcagagagatcgcgctgctgcagatcggcaacaaacggcgttgcagtttttttttctttatgcttctcttctcttctaatttctgatttctgattggtgagttctttcttctttacttgcttattcacttttctttaccttctcaattaaaatatttcgcaattcatttctctctttacatttttacgagttatttattttccattaaattagagtaattattaatagcaaagtttttatggtgaacgaaaacgaatttcccaaaaaaaatcacattttttataaattagaaaggaaaaagagaaaaggatatggatcaaagagggattatatgctctagagatttaatgtgatccagatattgtaatagggattgcaacaaatctcttatatgttctagagatttaatgtgatctagagattgtaaatagttacaacaaaatagagatttaaacaaaacaaatatttaatgattttaagaaaactgttttgttgtaactatttatatttcgaccagaaataaattgttctacttgcaaaatacatcaatcttcgttattattatcgatttaatcataaactgtctaattcaattaaatttataagagcatggttaccaatacttttttatctactgtaacgaaagctaataatgattttgaatgagtttggtatgatttggttattcgattcactaaaatagtcgttttaaatctagccaaatatcgtataattttacttgttttgattatattaaataatcagttatttgaaaactttgttgacatgttaatattatatataactaaaacaaaatatagatattaaaaacaaagaaaatgttattatatagctattatcgtttttcataccatttaaattttattactggctttcatattatgatattgttgtacatagacaccactgctaaaatgcttattaacttgagattttgcttgtgagatttggaggctaatttttttctcggttaagcatttctcgcatcatatgccttccacatagtttgagcttttgttcaccaaatgttcttaccactctcaagaaactggcagcacacgaatatgctttccacatggtttgagcttttctcttggacaaaaactcgttcaccaaatgttcctaccactctcaagaaactggcagcacacgcatatgccttccacatagtttgagcttctctcttggacaaaaactcgttcaccaaatgttccttccactctcaaaaaaatggcagcacacggtggagtttaccacatttgaaaacaagtaaataatgtcttacataattcacagtcactgctttcttcgatcattttcaagaattttgaccgtgaaatttgcaataccatatcttcaagaagacatctaaaaggttttcgcaatctggtgattaggttaatgctcttttgtaatacatttctttcattttatatatgatattaacatttataacaaaagaaaacaatcatagcatattgcatgtcattgcaagtttgctatatacagtagttttaaaccgagtaaacttaagatcaggtaggaaagatgcaaataaagaagcaagtgataccaaaaatatatgtaaacatttaatatagttcttcaatctaattgacgattagaaagtactgtactagatgattacgatccaagatttttgtccacactaagaatatttcacaaaataaggtttgcaacagtaggattgaaatgccagtaaacagtgacattatctcgaaaaaatccaactcagaaatcatttactagctaataatatttttcaaatagtttagaattattattgttgtttatcattaacgcatacaaagttagttgtataatctttcaacttataaataatttggttttggacggaagagctttacgcaaatgtattaatttggttttgataatttttatttgtagactcgatttgtttacgtaaattatgaaagagaggckaaaataaatatcataagatatagmattagaagaaaaggycataaaagtagtaattaaaaaaaaaaaggaaaagaaagtgtgaaaagaaaaaaggaaaagtagagaggaacgcaaccctgggggcttcttaataaacccctctcgctctcttgtctcttccttacgacaacctctcctgctcttcgttttctctctacgacgataaaacccagatttgggttcaagcttccataactttaaacccctctcgcgatccaggtatgtttcccaatctttattcccagatcttccagatctgaagctcctcttctattttttcgtagatttgatttttaggtttgatctatttgtatgaatggctcgcgtgttctcccgtattggtgattgtaatctaaaatgttgatttgatttaggttcagtaataagactagttatctgacctgtgttaacaccaattagtcttctcctagtctgctttcattgatattccatccttgttcatctgatacttattttttttgcttttattgatctgagaaggttgctatcaaatacttgggagcccccagtattattgaataacacagcctgacaatg

SEQ ID NO: 196 - DNA, 3000 bp, Unknown
  misc_feature (1)..( 3000): cDNA_ID_1989476_gDNA_ID_26992_Annot_ID_146587 3000 nt of promoter
aacaaggcaattctcgtttccaaaatcaaacccgactacactcattgtcaggctgtgttattcaataatactgggggctcccaagtatttgatagcaaccttctcagatcaataaaagcaaaaaaaataagtatcagatgaacaaggatggaatatcaatgaaagcagactaggagaagactaattggtgttaacacaggtcagataactagtcttattactgaacctaaatcaaatcaacattttagattacaatcaccaatacgggagaacacgcgagccattcatacaaatagatcaaacctaaaaatcaaatctacgaaaaaatagaagaggagcttcagatctggaagatctgggaataaagattgggaaacatacctggatcgcgagaggggtttaaagttatggaagcttgaacccaaatctgggttttatcgtcgtagagagaaaacgaagagcaggagaggttgtcgtaaggaagagacaagagagcgagaggggtttattaagaagcccccagggttgcgttcctctctacttttccttttttcttttcacactttcttttcctttttttttttaattactacttttatgyccttttcttctaatmctatatcttatgatatttattttkgcctctctttcataatttacgtaaacaaatcgagtctacaaataaaaattatcaaaaccaaattaatacatttgcgtaaagctcttccgtccaaaaccaaattatttataagttgaaagattatacaactaactttgtatgcgttaatgataaacaacaataataattctaaactatttgaaaaatattattagctagtaaatgatttctgagttggattttttcgagataatgtcactgtttactggcatttcaatcctactgttgcaaaccttattttgtgaaatattcttagtgtggacaaaaatcttggatcgtaatcatctagtacagtactttctaatcgtcaattagattgaagaactatattaaatgtttacatatatttttggtatcacttgcttctttatttgcatctttcctacctgatcttaagtttactcggtttaaaactactgtatatagcaaacttgcaatgacatgcaatatgctatgattgttttcttttgttataaatgttaatatcatatataaaatgaaagaaatgtattacaaaagagcattaacctaatcaccagattgcgaaaaccttttagatgtcttcttgaagatatggtattgcaaatttcacggtcaaaattcttgaaaatgatcgaagaaagcagtgactgtgaattatgtaagacattatttacttgttttcaaatgtggtaaactccaccgtgtgctgccatttttttgagagtggaaggaacatttggtgaacgagtttttgtccaagagagaagctcaaactatgtggaaggcatatgcgtgtgctgccagtttcttgagagtggtaggaacatttggtgaacgagtttttgtccaagagaaaagctcaaaccatgtggaaagcatattcgtgtgctgccagtttcttgagagtggtaagaacatttggtgaacaaaagctcaaactatgtggaaggcatatgatgcgagaaatgcttaaccgagaaaaaaattagcctccaaatctcacaagcaaaatctcaagttaataagcattttagcagtggtgtctatgtacaacaatatcataatatgaaagccagtaataaaatttaaatggtatgaaaaacgataatagctatataataacattttctttgtttttaatatctatattttgttttagttatatataatattaacatgtcaacaaagttttcaaataactgattatttaatataatcaaaacaagtaaaattatacgatatttggctagatttaaaacgactattttagtgaatcgaataaccaaatcataccaaactcattcaaaatcattattagctttcgttacagtagataaaaaagtattggtaaccatgctcttataaatttaattgaattagacagtttatgattaaatcgataataataacgaagattgatgtattttgcaagtagaacaatttatttctggtcgaaatataaatagttacaacaaaacagttttcttaaaatcattaaatatttgttttgtttaaatctctattttgttgtaactatttacaatctctagatcacattaaatctctagaacatataagagatttgttgcaatccctattacaatatctggatcacattaaatctctagagcatataatccctctttgatccatatccttttctctttttcctttctaatttataaaaaatgtgattttttttgggaaattcgttttcgttcaccataaaaactttgctattaataattactctaatttaatggaaaataaataactcgtaaaaatgtaaagagagaaatgaattgcgaaatattttaattgagaaggtaaagaaaagtgaataagcaagtaaagaagaaagaactcaccaatcagaaatcagaaattagaagagaagagaagcataaagaaaaaaaaactgcaacgccgtttgttgccgatctgcagcagcgcgatctctctgattatagagagctatcatcctaggtgagcttcttcttcgatttcctcttctacaatatcctttcaagttcgatttcatcttctttcaccaattattggttttgcttccttcccgtagtttcgtttgtttgttttctaaggttttgtgtcgatctcaaagtgagtccagggattcatatacctttagactagattagccgagatctattagtgttgatctccgtcatgtagaatccctaattaatttcagtggcctcagatccagcttttcatgttattgataattttgtatccttgaagctttttggatgttgtgagattataacagagcttttcctttcagcagaatagaatctctcagtttaaaggctccaaag

SEQ ID NO: 197 - DNA, 643 bp, Unknown
  misc_feature (1)..( 643): cDNA_ID_3012997_gDNA_ID_27003_Annot_ID_146592 3000 nt of promoter
agcgtatttgaaaccctccacacaaaaagcccaatataccaaacacatgcttgcaactatttttgttttkgacagctagtttagctacttgtttatgttatgaaacacaatgaaaaattattcaaatttcatagatatagcttcaacaagctgtagatagtagtaataaactagttttcaattttattatttacctagttggtaggagctaatccaactttacacatcgctaaatgaaaaattattattcatcttaaatactcaacaaaattattaattctgtcttaccaaaatgttattaattctaagaaatgataacaactactaagaacagtctacttgatcaatttcttataactttgaaaccacaacggacatacgtagggttatatttcgtattagataaaataataggtaaagattaaaatgattttaaaggacagggaccttaaattaataccagcgtcaatctcaaggagtaaaaaaaaactttaataattacgttcagacaaagaagaaaaatcctcactgaaattcgagcaaaaaacactcacttcgctctttcttcgctagcttcgttaaattcagcaaatctatctctcacgatcgaacagaactgagagagagtgtgagcttagccatg

SEQ ID NO: 198 - DNA, 1407 bp, Unknown
  misc_feature (1)..( 1407): cDNA_ID_1534193_gDNA_ID_27606_Annot_ID_146624 3000 nt of promoter
  misc_feature (22)..(22): n is a, c, g, or t
  misc_feature (732)..(732): n is a, c, g, or t
acatgtcacacacttaccatanatamataattaagsatactcgcataaacctatatatacagtctaagatttctagctggtccatatgcatgtgatctaatcaaaagccaaactctccttgtctttgctatattaacaatcatttaatccacaccaccagagatttcaatcttccttttgctactctcttttagatcgttcttgtgaaaatcgcttgcaaataacaagcccttcgtccaatctttattagctcgtaagmttcaccccattgctccttttagggttttttttttgttttgtttctctactcacttcatgcatgaaccagatgatgatgcatcggcgtttgtgttttgcattttaattattcaaagatacatacatattacatgtagtatcgtttcatatcttgaatagtatacatgtgtgtggtcctgttgagattgacccacaaatattagagtaaactgsggaattgaaatcaatcatggtggggatttcgsaatctatgtgtgtttctaagatattattgtttcttggaaattaattgttgttgcaccataatataatttatattatatagatagtctaggaaaataactcaagacaaagagtgtgtaacacactccaacctcagtgacttccacccgtcaagcttttcggctacatagcctttatatacgattattttacatatagttacagatatatacagtactgcttgtatatttntggtcttataatactaccttatgtcattatatatagtacatattatacaaagtttcaatcttttcatttataagcatcgttcggtatgtagaaggcgaaacaaacccttaaacctaatatttttttctggtccaaaaactttctctatcaagcttttgcattttttcttttaaaatagtaacagctcctccattgttgggtggtcccataaaaatacatcataaccatcatcagcaacatataatagcgatagccttaagcttaaagatccaagcttttggatataatatctagttacatgtatatatatatgtgtttgtatatttataggtatatagtatattatcgtgtgcgtccgtgtgtaacatcactatcattacccaacatacagcttttggaatttcattggacccaagagccattcgatccctdtcttataattaaatataacgaagcttgtaataggctttggttttggtcccaaatacaaaactttaaggttgtgccttgtttgtctaaggttttcgcaatagcttccaaaaagacacgcttatgtttatatacatttcattttccttcatatcattctcttctctgccacttctccatcttgtttcttactcatttctctaacaattttccaaattaaatacgtttataggatcattgtggatg

SEQ ID NO: 199 - DNA, 1414 bp, Unknown
  misc_feature (1)..( 1414): cDNA_ID_3012945_gDNA_ID_27814_Annot_ID_146632 3000 nt of promoter
aaactacctggaccagcaaaaattggagaaggaaaacccgaaaatcagaatcatgctctcatttttacaagaggagaagctctccaggctattgacatgaatcaggtaaaatactttcccccaaccgaaagtttccacaacaaaaacatagtggacttttatttattggaagagttttacttaccaatagtatttaatttataggaccattacttggaagaagcacttaaaatgaggaatctgctggaagagttcaatgaagaccatggtgttcgtgcacccactattcttggtttcagagagcatatttttactggcaggtatttgggaaatatggttattattttcttgttgtgtaaagaacttccttcattttgctagctgattgatatgtgtttcacttcggcatcttattctcagtgtttcttctttagcctggtttatgtcaaatcaggaaacaagttttgtgaccattggtcagcgagtcctggcaagtcctttgaagtatgtcatgttcttctttctttcaatctacacacattgatgcccattttaactaaaagtttagtagctgttaaaaatgtaattccttctcgatatcatttaactcacacaggcaccttcgatttgtgatttcagggtaaggtttcactatggacaccctgatgtcttcgatagaatcttccacatcactcggggtggcatcagcaaagcttcacggggcataaatcttagcgaggatatctttgctggttagattgtgaagtacttcttcaaggaaaatagtgatgttggttccttcatcatttacttatgattgattcatatgtatataggtttcaactcaactctgaggcgtggtaatgtcacccatcatgagtacatccaagtagggaaaggaagagatgttggtttgaaccagatatccctctttgaagccaaggttgcttgtggaaacggagagcaaacattgagtagggatctctaccgacttgggcatcgttttgactttttccgcatgatgtcttgttatttcacaacagtaggcttctacatcagctcgatggtagcttctgatcttccaatgtcaaactaagtttatcgttaactcataatttgcttaaaacattaactcataatttgcttaaaacaaaacataacggactaattatgtgtactacagattgttgtcctcacagtttatgcattcttgtatggaagactttacttgtcattgagtggagtggaagaggcgatagtaaagtttgcagcagcgaaaggagatagttctcttaaggcagcgatggcgtcacagtccgtagtgcaattgggtttgctgatgacactaccaatggtgatggagattgggctagagagaggattcagaacggcgttgtccgatctaatcataatg

SEQ ID NO: 200 - DNA, 2696 bp, Unknown
  misc_feature (1)..( 2696): cDNA_ID_28020_gDNA_ID_27978_Annot_ID_146638 3000 nt of promoter + ATG
gatgaatgggtaaacaattttcctcaatttgttttgcaatttgcagaatatttcgttttccagtgtatccctcacccctaaaatgttgttttcacagggcacccaaatagaagcaacaatcggtcctcgtttctctgccttctactttgacaggatcaaagagaatcaatggaaaacaataactacgtttctcgttcgacctaactgcgaagcaataaaaacaactcctcatcagtttcacattctattcatggatcacaccattgtcacttcttccacaccaagagaaacaggtttactgaacaagttcactccattcgactacattgtggatgatgttgttggcaacgataccttgattggtaagtaaattcttctttataaactkttatagatgttatcggggcactcgttaatgttgggattctgactaataccgcaagtaacgagaatgatatggccggattcaaattgccgttcacgatcatggataaaaagtacatttcttaaaacctcaatttacagtttttttcaaacatatcatgtttatacattattatagtaagtatataaccacatatttttacatattttcagcaaggatacattggtatgtgaggcttatggagaaattgcagtggacttggagaaaagatttcgagcatttcgcaagaacaatgttgttattgctcttgcttggtggaagattattagattttatccaggttgtaactggtttaagattgttagccatgcacctatatcaaccatgtatccagaacctgatgttgaggaagttgaagaaatcaaaatggttgtcgactaatagaaagatgattagaactatctcatcttcttttattttttttcaaagttgtaatatttttataaatgataagatatattaataaaaaaagttatttctttgttcaaaatttctcatttgtaataattttaacaaatattttattaagtagtacaataggaatacggtgtataaattaagtgcaccttactaaggaatggttatatcaagattacaatctttttatcagaaattagcaaattgcttgagttttaaaaggaataaaattggtgatctgaaaatattgtttcccaacatatctaatttctcaacatatatttgtttacatgactgatagggtggattgttgaaacttttagttgaaatccataagaaattactatcgtggattgttgtttatggataggttaataaattactttcctgtcttttataccctaattataaacgatgtattctcttacttttttccgcatctgattttagttccctcctcaacattgagaaactgatttatagcgggacaatttaccacctattataaattgtttaatataaccgcagaaaaactttaaactactctttccttaataatctatataaacacccaacattcattaatgttttttccattacccatttcttcagttaaaaccaaaaaacagagaaattatgcagaagtttacgaagataagcaacaataaaacatcatctgcctcggatgtgaaaatggttgttcgtccaaacccaaagtacttagtattctacagttttaactactactttaataaaaatactaacaatctctttccttttttttccaacaggttgctgctatcccagaagtttacttgccggccccgctgcttgctaaaattgttagctacgttgcagaatctggtgttgattctttgaaatcctttgttaaggctggtccgttatttaaagcggctgtctattccaaggaaacactaagttgtgtccgccttgacagatcttggtattttatgtggtggtcaatgcctcattccatctattatcatttctttacaaaatgtcttgacgccaacaatccacatgctttaactgctgtattatacaaaggaatagcatacgagaatttggttgctgaatgctatagatctagtttatggatggaaccttatggagaggacggaggatgggtacaaatagatggagcttactgggctcaaccccgagttcgagagagtattccacgttgctcccgttgcaaatctcgggcacacaaaagatctaattgtccaaaatattgaaagacaatgttttaatactgtgttatccatcattatctgtctatctacatgtttctatttttctaaaacttgtttttctgtttttaagcttctgctagtctgtctttttaatgttatattctcgtttgctattcaatcttcgtttatatatttgctaaggcttatccatcttattttgtggttggtgtttcatgattacagtctatgtatttattacctgattgtttatggagaacttgttcccccataaatgagtccctgttcgattgcatgttaaaagacatccacgtctatattttatataccataaagttgtgtctatttggacaacaaaatttggacacacaatgatttattttggacatgagaaaacttactcacatgtctaatttttaaaaaattttgtaggacccacgacgtcgccactaacccatctcaccaccacaccccaccctcttcaatgtgacaaagtattagggttcccattctatcacgatctcaaagttacaaaaattttcattaatagatcgctatttgtacaccttcagtactatccgaatcgataatccaaaatg

SEQ ID NO: 201 - DNA, 129 bp, Unknown
  misc_feature (1)..( 129): cDNA_ID_1710974_gDNA_ID_28160_Annot_ID_146657 3000 nt of promoter
attgcggtaagtattttccaatctaacaagtacttgaagagattcaaaatctttaattctgtttttctatagcacaaactataaatatgaatgcaagcctccttttgattcaactcttatttattaatg

SEQ ID NO: 202 - DNA, 244 bp, Unknown
  misc_feature (1)..( 244): cDNA_ID_1688325_gDNA_ID_28291_Annot_ID_146664 3000 nt of promoter
ttggctctttattagttcttcttttgatggttggtaagtgttaatgactaactgagaaacagagtgacgagagaattaaagagacacttgccagaagaacaaatctctcaagtgggacgggacccaccgcatgtccctttcttcattctccttcgtcttcgtcttcgtcttcacttccgccatgagaaaaacctgcacacacgcctgaaaaaccaaatcatcctcatcatcttctgatctaatg

SEQ ID NO: 203 - DNA, 3 bp, Unknown
  misc_feature (1)..( 3): cDNA_ID_1688361_gDNA_ID_28303_Annot_ID_146672 3000 nt of promoter
ctc

SEQ ID NO: 204 - DNA, 996 bp, Unknown
  misc_feature (1)..( 996): cDNA_ID_3012892_gDNA_ID_28580_Annot_ID_146691 3000 nt of promoter
catgttaatggtgtttgatgataatgaggatggttgtagtgttgtgttattgtgtgtatgtaagaattgtagactgtatatttgacggtttgggtttacaagtctaattctagggtatagcgtttaccattgacgtcgttcgttatccctcgccgtcaaagccgtgaaccaccaccaaatctttgtgctaccgtcaaagcttcacgtctaccgtcgaagctgcaaatccactatctaagccatatatctctgaatgtcaaaagaaacttaaaattgaatcagagatggggatgcattttttagaagataaacgcattcttttcacctcattctcaactccagctcatagtttaagggcaaaaatgtccgtaacaatgaaaattggagttattatatgcttttactgttgttgttttttacggcaaaataaggtcatccatttaagctaaaaacgggtcggttttcttcgagagaaaactagttcggagtagaagaacttacatgggaaaaaatagaacctcgtgctcttgccttcttatcaagacaatcagcacggacattgtttagagtgtctgttttgaaagaaatgttttcaaaatgcttgtttagaatataagctctatatagtatacctacacatgttatcgtgggtccaaatagaagagaaaaactatatttaaaaaatdaaaattatatgagatatttattttcaatgaaaaggagaaaaataaaaaataaagaaggaaaaaatataaagtttcctttccctctcgttcgttggctttgccttcccgagagagaaagataagatttggttttgcattcctcttctctctcgccgctctcaatatgcttcgatttctattctcctcttcctcttgattttgtcttcttctctttgctgcggagagattaaggaacccaagggttttaagcaagagacgcggcgaggaagctatccagaactctctgaaacatccattcctttttctcatg

SEQ ID NO: 205 - DNA, 7 bp, Unknown
  misc_feature (1)..( 7): cDNA_ID_28712_gDNA_ID_28590_Annot_ID_146701 3000 nt of promoter + ATG
atatatg

SEQ ID NO: 206 - DNA, 71 bp, Unknown
  misc_feature (1)..( 71): cDNA_ID_2026504_gDNA_ID_28591_Annot_ID_146703 3000 nt of promoter
caaacacacaactaacaaacaaacaaaacacaaatcttggttcattttaaatctctccaagaaacaaaatg

SEQ ID NO: 207 - DNA, 86 bp, Unknown
  misc_feature (1)..( 86): cDNA_ID_2996582_gDNA_ID_28593_Annot_ID_146709 3000 nt of promoter
acctgcctttcttctcccatccatcatcatatctctctctaatttctctccgtataacacaaactactctttaataagtatttatg

SEQ ID NO: 208 - DNA, 1752 bp, Unknown
  misc_feature (1)..( 1752): cDNA_ID_1690464_gDNA_ID_29526_Annot_ID_146727 3000 nt of promoter
aaaaaaaaaaaaagtcatggtgatctgatcagatctctaataatgaggtttaggcttaagtttatatttttgttataattgattttgcgtagaatataagcacctctttagaaaacgcgtagaccatcaacaagtcgaatattttactctttttcttgtttttatgttctaaaaaggcttcatttattttctacctgtactgttctttaattgatttttgaatccccacaatttcacaaaacatttataagtatataaaaacatatgtgcggagaaataaaaagtcagcaaatacaattagtccaaatgttcacacaaacgaacatgtggagcgactcacatgtggctctcctgtcaacgagacaaacagaagtggtgttgtcctcttgcttaaccaatgtgtaaaaattcctttgttatttgaatcatttgattatatactttgacaacgaaggtccatactttagttatatgattctgaatccaaaaaaatgaataataaagtatgcacactttactgctaagtcacagaacaatcactaatattttaataataaaaccagttagttgctgaaccaaaactagatacaataaatataaaaaccagatagttcttgttttataatctcaaatcatattatttacagttctcaaatatttcttatatgctttagttgtcctagtttaaacatttttacatagattaagaaaatatttcaatgtataaatatcatcttatatcattaattaaatgcaaatgaaaataaacttagattttattaaatttaataacctatgtattaactgtaaaataaaattattagataacttaggttccgaactttccataaaacgttggtaagtttttgtgtcattttgttaaataatacaaacactacctttaattacctgtgctactataaattcaacatccaaaaattttagcatatttttaaaaaacataatttatttcagatatttagtaaattctgctatttttaactacttttatagttttatttatggttattaatatctgtttatcacagaaattaaactttaactatttatctttacatataaagttattaaaagaaccaaaaacataataaaggagaatttgagtggatacaagttgtaaacttttttaagatcataaacaccatatatccctataaagataaagaatacgacaaacttagatctttttcctccaacgtgatatctagtagtaatgaaaaaacacatgatagttaataaatagatcttgaccctataaaataagtaaagacttttttaaagatagcaaaagtaaactctgtaagaagtctccaatggagaacaatctaactcttccaatgtggcataggcctaatttggggatccttcttatatttcgggtaaaatcacacactcatgtaaaaataccgacatcactatcattattacaaacagtacttttctttcattattatagtttagaaaaaaaaataactcgtttatttatataatatctttattaggaaaaaagttgtttcccgaccagcaaaatttctctcttcttctttataatcatcagatcgttccttcacttgattttcagggctcgaaatctctctcaaaaccctctcaaaaattccaaaacataatctcatttctcaagtttaacattttcgagcccctttagaacagtggagaaagatccacacagataaaaaaacgggtgagttttatatcaaatagacgaaaatg

SEQ ID NO: 209 - DNA, 882 bp, Unknown
  misc_feature (1)..( 882): cDNA_ID_3012824_gDNA_ID_29585_Annot_ID_146745 3000 nt of promoter
gaagaagctcctggacttactgtgagcaaaaaaagtgagcttctacttgttccagtgaagtatttagaccattgattcacgtgaattagttcttcatcgattgtactatgaataagaacgaaatgataatgagaattttcaatgtaataatttktttctgttttgtttttgcctttcatacttttgttttgtttaataatgtaacttacatgaagcctcctccattagcagcatacagaattagtttacgtgcatcatttgttaggttaccattgccaccgttagaaaactagaaagcaatgataaactaggactacattatttgatttatgtctttggccaaagaattatcttccactcaaaaattttcggtagatttttttcagaatattccgcaaattgagaagatgatttatcgaaggttgctgaatctttttgtccttttctactgtgtgatcacgttctatctaatacatgattcaaatcatattacttcgtactaagaaaaaatactttctttatttgttttttctttctattttgttaaatacatttctttagttttgtacatattcacaggtgtttggtatttctcatatatttttcaacgataattttcctatctacgacttttcaaatttgccacgtattttcttgtaagaaaaatctaggtaaatattttcctatacatgtatattacaaatatacacatcgccatctgttaataaattgcatatatctttgattctaagcatcactatctgagtctttatctcgagcttatcctcactgacggcaataaacggcaataagttcttttgtcttaatgtttctctatatcaaaaaaaaagcagagcacaaaccagaggaacgagaataatg

SEQ ID NO: 210 - DNA, 850 bp, Unknown
  misc_feature (1)..( 850): cDNA_ID_2991917_gDNA_ID_29590_Annot_ID_146748 3000 nt of promoter
ggtctttgataaccaccaagatttccactagtctcggttagatatgctttgaaaatgacgagacgatgtcatcttgaactgaatgctactattggcgatgttgtggatgttcgaaaatcaagacgttcacgtaacaaaaaaaataaactcacgttccttagctatgacagttaaataaaaataatatcaaaattaaaatatttcgcactataaaaaaaggtttataaactaattttttttgtcattaacataatttcatttgaagttattgtcattttgcaaaaaggtttctaaataaatcgatcaacacatgctggtgacatttatgatgagtttcaaatgtatgagttttgaagaagtttcaaactcttataagggtttataatgtgggaattaagttttgttaattcgtacgttcaaatgtaattggaaatgttgtggtaatataaatatttttccagtattcgtacgttcaaatataattggaaatgttgtggtaatataaatatgtttccagtaggggaaaaaaactacaaaagtttcagaaattttcataatgttttgtgactcccacaaattttaacgtgttcgtcatgtagaaaatctttggtaaaagagtgactagggcagtgtcccaagcaacgatgggtcggcacttggtcactccaatggacatgtgttatacagttgttacctatctgagctctaagtactgagtactaaaaaagctgtcatatgttagccacattttacacaacacaaaatccatttttcttctttcataactatcagaaacaaacacaaattaaatcaaagtttcattagttttaaccccccacaaaaaaacatg

SEQ ID NO: 211 - DNA, 319 bp, Unknown
  misc_feature (1)..( 319): cDNA_ID_3017946_gDNA_ID_29597_Annot_ID_146751 3000 nt of promoter
caatccctttcaatgtcaaaaccctaagttccatctctttctcttcgaaacatccgcagccttcttcttcgatttctctcttcctcttcgatttcctctgcgaaaccctagcaaatttctctcttcctcttcgattttcctcttaatctctctaccaaacatctgcagtcttcttcttcttcaatctctctcttcgatttcctctttgaaaccctaccaaatcaatctttcctcttcgtttttctcttaaatctcttcttcttcttcgatttcatcgatttgaacctctgtctcatctagatctctccttaatatcatg

SEQ ID NO: 212 - DNA, 1082 bp, Unknown
  misc_feature (1)..( 1082): cDNA_ID_1387935_gDNA_ID_29778_Annot_ID_146765 3000 nt of promoter
  misc_feature (1)..(2): n is a, c, g, or t
nntttctattactgaataatttgattgagtcaggtaaatttgtctgaattatcttacgcagctttgtcttgtaatgtcagttcgagtttggttggctctaccatggtttcatgttatggtacattatcatcatgtgcatcagtgcatgttgcattatatagaatacaacatagcattttatgagtgttagccttgctcactctctacaaatattattgaaagttgaaactgaggatatgtcggtttggtttagtatggtatcattaattgcgtttttattgggttatggttctgaattccgattgtgtcagatatattatctgtttcttttatagttaaccaaggaatcacgttttacctagataggtataaagaaataaatatgtaaccgactcaaattttactattcagtatttgaacaaattattatatgatcggtctaaccgaaaacctagtgatccaaaaaaatgatttgaatttaggaacgaagacttcatgaaagaggaagaattaaggaccttgtcaaagaaggcaatcaatggttcttcttcgaatggggtccccaaaggaccacttcttcttttgtcacttcattgcgttagataagctctaattcattttcgtcacccacatcttcttcaaatcaatacattactttttataccacacggcacacgcgttatcaaagcatattgtgttgcttcgtttaagaaacgaaattagggtctcaatcttatttctctcaattattattattaatccaaacattctcagaactagtttgaatcttttattaaaggatcttgagaccccttcacatgggagagagaaagaaagagagatagcgagagatgttactccatgagaataccaaacccacttcgctctaataattcaaaagatttcactttctcaaacaaaaaaacttctctctttcttttctaatttctaaaaccctaattgaagttccaacaagatcgatcaaagagaagatggatctcgaggattgggaattagtactccccaagaacagcttcaaggatcttgatcttgatcatgacgaggatcatcatggagccatg

SEQ ID NO: 213 - DNA, 1449 bp, Unknown
  misc_feature (1)..( 1449): cDNA_ID_3012846_gDNA_ID_29783_Annot_ID_146771 3000 nt of promoter
acacctaaaatgatgatattccacaaaaatgcaagtgaaaagtgaaaaggtgtctcataattgtttagttatttaacaatcacgctaccatactcagtcgtggtcagcttatataaactttataagtaacgcatagatctatggattctagatatgccaccaaaaaatcaactgtgtatattcttttgtaattgtaaacgatcaatcggtgacgaacgaacaaaactgtagttaaaagcagtacaaaataaataaataacgaatagagagcgcaataccaaaacaaataataagaatattgctctttgcatcgtttttgctatcaattttgtgagtggtacaagattatactaatcagtaatcacgtccaatatttgtttgattttacaaccgaatttggtttggttcggtacttcggttaaatgttgtcaaatacactattcatgttgatcattgaccaatagaagagaaaataaatgagagaaagcgtaaatacaagtaaagaggaagaagagtccaaatgtaccaatcagctcgtgactactttcagcttacctttttcttctccaagtcccatcttcgtctccgtcatcttcacggcacatcctccaaaaacgcttagcttctctctctgttacgtttactcaagtcttttttagtctcctccttaactctcaagccttttccaagtttcaagcggctccaacggttcaatttcgcactttccgatttgtggcttcactttccggtaacgtactgatctcaatccttgtagctctaaaacgactctcctagtttcgcttattttttttcttgaaatttctactgtagaatgaattaagcatgtcgacgaggttattttagttgactatcgattagaatttttcgtgagcgttactttctccgtacattatcctcagttctgcatctaaatcttgcacttagttcttcatttcttgagatttgttatcattattctctactctacttagttataacgattatgacatcgtcacagtcttctatatgtggggtttctggtactcaattgcgcaaatccttgtaatgattgatgtcacgggtctgaaaattttgacaccgtcactagatttcataacttttaagcggtgttggtgttgcgttaaatattattattaaaattgaagtttctagtagtaaaaaagttcacagagagatcttttctttttgtctgtatctacctacttacttcagaattcagataataatcctttatacatagagaaagagatcatctactatatgattattatatggtttttatatggataatattcaagattactgaaaaatctgttgttttgttttgtttcagatctgttctagagaacttcaatatatatccatatatggtttcattggtctgtgagccatatcctaagaactaaactagctagctctcttactatg

SEQ ID NO: 214 - DNA, 3 bp, Unknown
  misc_feature (1)..( 3): cDNA_ID_3012788_gDNA_ID_30094_Annot_ID_146800 3000 nt of promoter
ttt

SEQ ID NO: 215 - DNA, 975 bp, Unknown
  misc_feature (1)..( 975): cDNA_ID_1690727_gDNA_ID_30110_Annot_ID_146813 3000 nt of promoter
tgaaagtttaagcatatttttataacttaawactggagttccataagtttattgatgaatgtgataagtttgtctcaatgtagaagctatgtcctayagattcactcaatgtaacagctcgagatcckctcaatgtagcagctatgttctccayattcattcgtatttgtaaaaaaatgaaaactayaggtggcttgattgttggaactcgacgagtattgttccaggaagcagccgtcttacttcttttcaataacatatgttaaataaatcgacattgtttgttcaatcatagagagaacttattattattattattttttttttattgtagtagtaatcatgttcattcaaattgagcaattatttgctttctatctacgcccaaaaaccaacttctcaaatgcatcgacatgtaagaaaaattgcttttatgttttaaagttgtgtaacatttctcttggaactattgattgtctcaacgttgcaaataaagtaataaaatccracaagatactaataatatccaaactgggcttataatcctaaaaatgacttccataattaaaacgaatttagtttattaattagtgtaatggaatattttgtcaataaaataaataatcwcgaaggattatataaaggaagaaaaaaaaaggaaggtgggaattttaaaagggaaagacacctgtctctctgacccacccacccattcatttctgtggctactctatcgtcgtcgtctccacaccgtcggtgccctcacggatcaatttctagagagagagagagcgagagagacgattcgtttttctagattctcgtcaaattttttttccctccttcgatctctcctttttccttattcagcatttccccattttttcacgcaagatccgtgattttccagggattgatctgattgggggatcgtgaaattcgtttgtgttttctgctcgattaaccggagaaatg

SEQ ID NO: 216 - DNA, 23 bp, Unknown
  misc_feature (1)..( 23): cDNA_ID_27713_gDNA_ID_30657_Annot_ID_146820 3000 nt of promoter + ATG
cccaaaagactgattggatcatg

SEQ ID NO: 217 - DNA, 520 bp, Unknown
  misc_feature (1)..( 520): cDNA_ID_2686284_gDNA_ID_30662_Annot_ID_146827 3000 nt of promoter
tctgccatgtatctgtggatttttttgtgtgacgaaacatcttgtctttgcaaaaactgcttgctgttcaggatttgtatagctcaactgcttgccattgtttgtgtaatgtattctactatattatcgtcaaatatgctcttattattttcaaaacaaatttgatttgctcttattatacttgatgttggttaactggtttgattaagatgaatcaaatgagagtcttgagacttttataatcaaaatgtgaaatacataaaatgtacttattatatgattaggaaaatatctgaattggtaaatttttattgactcctgtatttatctgtgattataattaaacagttaaatgacttataaattcatttttttagtgacattatagggctttccttataaggccttaaaggcccattgagaagctaattccgataaacattgacattctgaaacacttgagctgcaacaacactttttccttcaccagtctcttcctcgttttggtgagaaaacgatg

SEQ ID NO: 218 - DNA, 418 bp, Unknown
  misc_feature (1)..( 418): cDNA_ID_1690767_gDNA_ID_30663_Annot_ID_146830 3000 nt of promoter
taaaagaaagacagcgttgattcaccacttgaagtggacttttatagcaaaaagagttgagtaacgtcaaaagagtcaaacccaacttttcaaaggttgtgtaaggctttccatgactccacatcttcttcttttccctttttatccttttctcttctctctcttttattttttcttttgaagtaaattaatttcacgaaacaaatcagagaaccttttatatcttcctttttcgtcgttactatcgtcctttacctttttcatttactgttctctctctctctctctctctctatctctatctctatcttctattcatggacatgcaccgaagcgacaaagcttagggcttttctctcatccatggcggatttcttctatcttcattaaatatttccctctttattaaaatctcatg

SEQ ID NO: 219 - DNA, 22 bp, Unknown
  misc_feature (1)..( 22): cDNA_ID_1690771_gDNA_ID_30665_Annot_ID_146831 3000 nt of promoter
tgctctgaatctgtatgtaatg

SEQ ID NO: 220 - DNA, 417 bp, Unknown
  misc_feature (1)..( 417): cDNA_ID_1690779_gDNA_ID_30666_Annot_ID_146833 3000 nt of promoter
ggtccattaaacccaattaactcttatgtatgagaaggaacttaaaaccccattcagtttttgatggacttgtgaacgctgctactaaaccaaggtcacttctcagttctcacaacacatatgttatgtttgcaaattaaatgcagttttataatttttagtattaactgactatcccaaattattttcaaaatatctttgaaatttaaaaagtgattcaattatgaaacctccactcacacttttgtaccatcctttgcttttgcactaatcaaatttatttgtttgttcagttaaattgttcaaaaaaggagaaagttatgtccaacaaaaaagagagaaaaaaatgcaattagccttttaataaaaaaaggagtagtaattacaaaaaaaaatgaagtactgtagattatgatg

SEQ ID NO: 221 - DNA, 3000 bp, Unknown
  misc_feature (1)..( 3000): cDNA_ID_3434222_gDNA_ID_30942_Annot_ID_146843 3000 nt of promoter
tgacgaacaagtcattttgtcctagcaaggagggcggcagtggtgtggatcttgttttgagttgtgtcgataactatgaagcaaggatggctgtcaaccaggtagctgttacttctttctcgaaaaaggcctttttgttacacattccacagttcttacttcaccatcgagcattttttatcttacattctacataattcaattagttgggaatggaaaatatataaaaagttctagattggctctgatttgagtttattcttatgaaatataggcttgcaatgagttacgtcaaacatggatggagtcaggtaaatagtatgttaataattatatgtacttcttattttcatttctcttttggctaacaaaaaaggtgatattttgtgcaggtgtatccgaagatgctgtttcaggtcacatacagctcttggttcccggagaaactgcttgttttgcttgtgcacctcccctggtttgttttttttccttcttatatcactcttacaactctaacctatgatgccctgcattagtgcttgaggaatgtatcagtggaatatgggggattttaaggattctgtgatccagggtattgttaatactactttttggatttgctctaaacaatctctttactttgtggtaggtcgtggcatctggaattgatgaacggacacttaaacgggaaggggtctgtgctgcatctctgccaactactatggtaatttcataccaccttacaatacagttcaaaatttggctatgttgactattaatcaaattttctgctaatgcttttgtttgtttaagcgctatctatatattttaagactcttgtttaattgtcaattcagggtgttgttgcggggcttttggttcaaaactctctcaagttcttactaaattttggtgaagtttctccatacttggtaaaggctttgcttcctccagctctcctcacatttaacacactatagtttatcgcagaatgattataatttaaatcagttaaagcttactagttttatgcctgttacttgatcccatagggttataattcactgaaggattttttcccaaccatgaaaatgagaccaaatccacaatgctcgaatgtagcttgtctagagcggcaggtaacctgattaaatgcaaccacaaaactatctcagctcgtctttgttttgcgccttttgtttccatccatgttctggtaaaaaaattgaaatcccaaaatgcagaaagaatacatgcttgcaaaaccagaaagggatgccgctgctaaagctaagatggaagctgatgcatccacaactatcgatgaaggtccactccatgatgataatgagtggaacataaggtaataactccgtaaattagttataaatcaaaatttgtatttttggatcatattttctcctttccagccatatttgcaacaagaaatctgatgtgtatctcatgtctttttgtcagtgttgtcgatgatgaaaatgagaaggatactacaaaagctgcctcaagttcaggtaattccaacttgggactctatgtgctatccatgtgaaaatgtatcaaatataagtcctcttcttctgactgttatctaaatcctgtgtgatgtgtagatacattgcccgaagggcttactcgggagcttccagttgcagatgagtatgagaaagcaatagccatagcctcaggatcaggagaaccagaggaggaagatgatcttgaagatctgaagaaacagctcgaagctctcaacgctgcttgagtctttatgagggagaaaaaatagatattttagcatatttatacatgaaagaggctacaagtgcaattgtgtatgcaaaaagagtgttaggattggtaaattggatctcatggacatataaacgttttggatgatgacttctcccgtttctctagttgttaccaaagacaaaaagatacaattttgaagatatttcatggttatattgtcataagtcataactatccgaactagaacttagaaattcaaattagaaaaagattctgtccaatgatgatgatccaagtttggtttgtaatgtgtaaaccagctttttttgaggtaagatattaattgcgcggggaaatcaactagatgacgtgtgaatcgcgaattacaattacgtttttggatggagaactgtctttttttttcctttttatatccctaaaatactttttgtacattcatttatatcaggaaaaacagagttgtaaccaaattattacagagatattcaaagatatttcaacctatcaactaaagatgacgtgtatatcgagaataacaattgcgtttatgagtgggaaaccaaattatttcattaacatgatctttaggaataccgctaataagagattactaatcattatttgaggttttaatttaaatctttgtagtcctgattttgaatatttcgttttagctaaatcagctccaatttttcccagttatcgtttgtcgaattcatattactgttaatttagttaacttccgaagacttaaaccaacatttaatctttatgtcgttctctcaaaaattcaacaaaacttggtctcgaccgtgtgagatatttgaaatgtcagaacaccacacgtgtcgacataagcccgtaccacgcttttcgtctggatatatccaaattactttacagaaatcacttgtaattgtattgtttgttaataaaaactttgaacctttttgattactatattattcttttggaatttattctggtgacattaatgttctatcctccacgcggttctcataaaccgacttggcttctttacttttcctttatctttctctatatatttacacacacacgcatttgtacagagatattcaaagattagaaacattcttgatagatacaaaaaacattttttcagacacaaattcataaaatctttgccttgagtagatcaaagttctttacattaatcgttagaagatg

SEQ ID NO: 222 - DNA, 210 bp, Unknown
  misc_feature (1)..( 210): cDNA_ID_1690797_gDNA_ID_30942_Annot_ID_146844 3000 nt of promoter
cagtgtgatccacaatctttaaaacagaccggataaatgtatgttccttccttgttatctcggtcaactttttttgtttttttttgtttggtgaaatcaataacgtctttggctttaaacctttgcgactttgtgtacaaattccggagtgtctttctcccaaatcagcatcgcagattcgatttctcatcctaagagagctgaaaaatg

SEQ ID NO: 223 - DNA, 87 bp, Unknown
  misc_feature (1)..( 87): cDNA_ID_3090710_gDNA_ID_30962_Annot_ID_146872 3000 nt of promoter
gttttttttttttttagtgttgcagaggtttaggaagaaaggaatggttcgatcgtgactttgaattgggatattgtgtgtaaaatg

SEQ ID NO: 224 - DNA, 1618 bp, Unknown
  misc_feature (1)..( 1618): cDNA_ID_1710110_gDNA_ID_30980_Annot_ID_146890 3000 nt of promoter
tgacaaaagacatgataaagaagaaagttgaaaatggaagataatgtagtttaagaagaataattgatctggattaactttacttttctcttcaaaagtgttttacaatatacatgtggttctattttttgtttgtttaccaaataaaagatggaatagtaaaaaattattggtgattttggatcctttgtgattatattcctaaaatggtctaaaatccaatgtggggatgaaagatactattaccaatttactcttatcatatctttttttttgaaatttttttttatcttatctacatcagtaattcagtataatacaatgcctgatagaaaataaaataaaatattacaatgcctgattaagattcatgaaaagtggggcacattaagaaggtaagtgacgaagtggtgttcatgtgtcatgttgtggtcatttttctagtccataatttacttataaatactctcttttagtctatgacttataattaagtttgaatcaaaattgatagtgggatattatttcagtaagactttcttaaattttaaagagaaaaaatataaaaatggaaaagaaaacgaagttatccacaattcttgcttttcgacaagacgtaagaagtgattggtccatttgtcttttatgaactgacagttgtttggttactcgttttggatttcttatattttatccaccttttgtattcacatctatcatttggactaattaattatccgatgaagcaccccataagataaaaatcctttcctctgtatacccttcttaaatagcataacccttttttcttctgaaccctaaattctgctaaacacctcacaagatagataaaccatcttctcttatttttcttgttattacttgagtttatcaagtattattactggtaattcctcgaatttatccaattttgtttgtttttacttttgtttgtgtgtgtgtgtgttttacttttatcacgacgatatgcacgtgaaaatccagaaggtaaaaaatctctttctgctgattcttcttcgctcccaagaggcatttttgttagtattttattaaggcgagattattagaaaatcctttgtttgttttttacacacaatattaatatatatgtagatatagcctatggctatgtgttatataatcattattatttggtgctttgttcaatctatcattaacctgttttcactcaaatcatccatctaccttctctctgtaacaatcctctcttccctctaaggtttctatttgaatttttactttgatcatttgcttgaaaagtttcaagttgctgtcttctctgtgcttgctagttgtgtttggttttaattcaatgatcatggcttttattttgttttatcttgtattactgtatatattcaaatgctgattcttggatttgtagtcaaattggaacactgttgagagtcagaattatgatcttatctctgttttttcaatgtgcaaaatgtgaaacatttcttcctctcactccatatctgatctcttttttttggtgtaaagattcttaaatctcattctttgtttaactgtagagtttctgaaaaatcggtgaaacaacagaggaagcaatatg

SEQ ID NO: 225 - DNA, 2609 bp, Unknown
  misc_feature (1)..( 2609): cDNA_ID_2184016_gDNA_ID_30983_Annot_ID_146894 3000 nt of promoter
tcaacaatatataggttgatataatttcaatcatataggttatcgatataggttgataaatattagccacaaattcattgacaaaaaaaaaatrgccataaatattttgtagaaatttcatacgtattattatccattcgttatagatcagattaattatttgctcaaatctgatggttcatagtgtatacacacaaaaaaaaaaagagaaaaaagaataagagttgaattatagaaactttccaaatatgaaaaagttgggacttctgcattagacacatctaaaagaaatgcaaatggtgtaatcatatcattcgcactctttggctcttttctccgcttcttcgatcccaaacctgaagtggagactcacgcaggtcgcaggaattgtcaattattaaggggtattttggtaattctaataaaatcgtccgtacagtcccaagggtcgctttcgacctacttcactcccacttaaccgtaagtcaagctcccatctgggagaatcttttcgagatccttttaccaaagtatactatttaaaagactccgtacgttttctttatataaaaacaatctcattgaacgagttcaagagtcaagactaatgtttgatacaatcaatacactgttaaaacaacattaatgatacttgcatggcaccacatttaaatccagtagttatgaaaaaaaccaaacattgttcctctgaccaatataggactaacttaggtgagattctgtgttttcgtccattaatgttctcttttattaaatttgtttaaaaatagttaggtatgactccaaggatataccaatctatatttattgttttcatttttattcagttaatcaaatgtgaatgttacatcacaatttcgacaagggatattgatcgatttgttatcattataaatggaaagtaaagaacagccaaaagacaaaaacaatgcacatatatatgtttgattctggattcaattatacactataaattaaaatttatgtgtagctttgagtgaatccgtgagtgagtgataaattcagttttagattgatgtgaaaaaggtgaataataatataagagcagaggggaccataaagatagatatatcacatgatctcttgatcagactctgcgaagatgggcctcaatttctcttcttcccccattatttgtccctgcatatataaaccttctggttctggttaagtttttacttgtaaacgtttaaatcttttctggtatattgaaaattaacactatatagcaactaaacactctaacaataaatgtttaactataacatattattgtgctagaaacatgaatatgtcagtgaaattataggggattaatatgaaaagaattgagagagggtagggaccaagtgaggatgagttatataggctatggactttagaaaccgaaattattgggagatgacaatgagaaatggaggcgattaggtgtaactaattaataaactagactagattagtagataggggctttcgtgttcatgctcccattctcatttgttcattagctatctcttctcctcaagtttccactttttttgttttctaaagagtttttaaaatccaatactggcaaaaatttaatatcaattatggagcatgtgtgccacctacttctccttccactggtttttaagtttcttagttattctattatctcgttaagcaaataaattaaactgattttttcaattaacaagtatatcataaaatttcgttttttaattttagaaatggagctttcctcgaattttatgcagacttttgaaatatttcgtgctatatttagcaagcgtcgtatttcttctataaaataagtaaagaacccttcaaaaatatacaaaccccaagtattatcttcatagtttctgtatgcttgcttcacacaaaatctccaaactattaaatccaactaaattgccaaactgctagttccggtaatccttaatatgatggactccaaattttacaacccatgaagggagatatcaggccttaagtacataaactcaacgagcccacatagtttatctatccttattggttattggcttattgcataactcaaatgctttagagataattctcagtggcctcttagacattttttggctatgtcttgaagccccaccctgcccccaaaaaatatgggctaaagtctcatcaagaatactaaaagtgtacaatggaaacaaaaaaattctaatttaaaggttccaccgagacttgaactcgggttactggattcagagtccaatgtcctgaccactagaccatggaaccaatttgcaccgtctcacccaataatcttatatattccaagctacaaaattagaactccattacttcgtcagtaggaaatggggaataaagtcaataatttggtaatgataaagaaaaagaaagaaaaaacaaagtcgttattacataattaaagtaaactatgtgctttcacacacgagcttcattttgcctttgtatacttttgagtagatagatagacagactatagtctatataagatccatgtgacaatagttaaaatcctcatattttcatttccaatg

SEQ ID NO: 226 - DNA, 511 bp, Unknown
  misc_feature (1)..( 511): cDNA_ID_2686295_gDNA_ID_30985_Annot_ID_146899 3000 nt of promoter
aagttaggacacagaacaatcatttcgaaaatgattttgaaaaacttgcaaaaacatttggcgaggagaagatacaacgatggaaaggagctatgactaaagtcggaaatctctccggtttaatttacgagtatgacttcaatctctcatctctaatcttaattattgaatttataatcttttcatttcaagtaatattatatttttggcatatagattagtaatgatgtagtcatgtaaccatcttttcctttcatttcctactatgagtctatggtactaaaattaaccaagtttaagagtagtagaaagacgagtgaaggaatcgacactacatgtcgttctaattgactgtagatagaactgtgtggcgtttcagcgttcgagaaagaaaccatttattattagtcaacaaaagccaaaaatcgaaaagcttcccaaaatccgaaagcgttcttcgaagagcacagagttcgttgacttattgaaggagatcggaagctttgagatg

SEQ ID NO: 227 - DNA, 1478 bp, Unknown
  misc_feature (1)..( 1478): cDNA_ID_1687302_gDNA_ID_31580_Annot_ID_146935 3000 nt of promoter
ttcaagtgtttggcacatatagccacgtctcgagccatttctacttctgaaaacattcgtgtttatctgttacctgaaaaaaacacaggagattctaagttgaaggatgaatcataaaatccgcaaccagaaatgataaccatcaagccttaataaagattataaagcagtataaacgcaggtcataggtcataggtcatagagaaaacataacgtttaaagcaacgaagcagatataaaatgttttgacggctaaatagattgaagttatatagcattgaaccttatatggtacctgcataagaagaacttagttactgatcagcccactcaattctacatcagagaaaaggaatcaaccaagagacaaaattaagagcaaagtactcaaaactgaaactgctaattttacatcaaacaaacaaaaaaggtactgaaactgcagtaacaagactagaggtcaataatttctgagaaaatcacacaacctgaagtgatctcaacaagatacaagaagatatatgttgcacttctcaaagaaaatcacattaagcttccagagatatgggcattgatccacgattcagacaagaactagctacataaacatatgtaactgtctcagacaagaactagcaacataaacatatgtaactgtctgatctccaaaaacttaaaagaaatatctttttgattagacaaacgaccatttgaaaaatcactaaaccagtaaatgaaacacacacttatgttattactccgccattagaacctcatttacagtgaaacccaacatcgtaaaaatcaaaagtcttaatttttttccctctactttttcaaaaacatgataaacccaaaatcaaaatcgaaacccttaatcaccaaaattctcaaccgttccacgataaaattagacatcagttaattatcgaggtccctgcaagttctaattttacaccgagaagtaaaaaaaaaaggaacttgtaacgaaatcttcaacaacaaaacaaaatgagaatttttgcaaaattttagtagaaagcgaaaaatctaaccttgagaagaaaattcgatatctcatagagcccgaagaatcgtacgggcaaagagaggtcacgcaaaagatatctattttctactctctcttcccttctctgcataagtaactgcttttgactgaaaaattttggatcccgtcacaaggcgtgtgttattgaaatcgttttatttctgacaagatgcgcactataagtgcattttagcgataataagttatgtttctctataatacgctctttgtggtggtcctagttacgataaaccacgtatccaaacaaccctctaatcatctcgaacatcttattctttcccccgccatggataacagagtcaggagcttcgtttgcgtagctgaaggaatcaaaggtcaaatttttttgttgagagtacccaattgagagtattttctgtcggaaatg

SEQ ID NO: 228 - DNA, 1138 bp, Unknown
  misc_feature (1)..( 1138): cDNA_ID_1687315_gDNA_ID_31585_Annot_ID_146941 3000 nt of promoter
attttctgttttactctggctgcgccgcttttgtttctgcaacctgtaattcgagatttttccaagttattcagattccgcatttgatttcatctgtcatattgtttctctagtctttatctctttacttatgcaatatacttgtttacctgcatttatgtctttgagcatgttgtctgagtagtgacatagagttcttaaggatgggataaaatggttgtggaatccttaatctgtagaatggttaaggtttagaattgattgaatcccttcaggactagttgtgtttactgcttatttctttctgatcaactggaattcgatccaaggcattcccgcacccagaaggtgtttgatggaatgcttgatccactagttcctgtgatattcgtctctatcccaagggattggccgtttagagcgtttattgactttatcagtctatccttattgcctgcatagttagattgcgttaatgagaattagtctgggctagctttgcttgaggatttctatcacgagagtgaattgatctgttgttgaacatgttgtctagggatagcctgattgcacttgttaaccattcgaataggctaggataccactctattcgattatcccatccttaggaatttctcgtctatctgatttctctgttttatcgttatcgcttaatcgttctcattgcttgtttcttagtttttgcaattactcgaccaacttactggaccacacccagtgtttggcaacagactgtgcagtcgagtacagttgtctgattactcgacctcttactcgaccacatcctgcttctggcatcagcctgttgtggtcgagttattttagtaattctgttaaagtttttgttttgtgcatattcgtttgggactgttagaaacaccaaaactgttattgcttggcttgacttagtgacttctgatcacatctcatctgtttgcatcatacctgattggaatgacacctaaaatactacaacgacaagatagtgttttaggattaattgatcttaaaaacctattatcaaacacggtcacaaagaaatgagaatctcctattcaacgatatcatcgaccgtattgctcgccaacttagaacacagacaaaaacagatacaatg

SEQ ID NO: 229 - DNA, 988 bp, Unknown
  misc_feature (1)..( 988): cDNA_ID_2991466_gDNA_ID_33017_Annot_ID_146960 3000 nt of promoter
atcttctaatattttgatagtagagagttgtaataccataacatgttggaaatgtattccattttaaaatccaaaacatttttataacaattttatctactgttatcaatgtcttaaaactgtatttaagttcatcacttaaatttttttttggaaattcacagtatttcggaagatattctattaagtattaactatgttttagctttatgtgctgacttattcatgagtcatctaatgttgtggttgattccgttgcaaaattatgtctaagtttgtatggctagaacatcatttgagcaatataattaagtttgtgcacaaaaaaataaattatcacttactattaatttttcattatattatttaatcaagatgcttgcttaaaccgatctagataataaacaaaacttacccagtctgaaactacaagttcctaatagtaaatgttttgacatttacaaagcaattaagtaaaatgttatcaatgaattggttacttttctttttggtaaaaagttatgtcatttttaaatttttcacagaaaatacagaaatcacaggaacaaatgaaaacacgctgtaaaaacaacaatattattcaaagctgaattggttacttgtttagattgggtaacaaaattctaaccaaaactagaatcactaacactcattctttaccaaataatacttcaaattcaaataagagtttgattgtgaaagctgtatagctgtacgtatcatgtccatattacagttgtaagccattgttacaaaactactaaaaacaaaaataaataatagaaaggtccgagaaacttgaataaaaatttagaatttttaaaacattattatcgtaaataaaaagagaacctcccaagaaacaagtcgtccttatataaagccaaccacacccctttagcttctctcaccatcatcatcatcatcatcatcatttctctctatctctttctaaaacacaaccatg

SEQ ID NO: 230 - DNA, 501 bp, Unknown
  misc_feature (1)..( 501): cDNA_ID_75801_gDNA_ID_75757_Annot_ID_146964 3000 nt of promoter + ATG
gatctgactttgttttaatatagagaaatttaactagactataataaaaagacttcataaaatttattacccaaaattagaaaaaaatcaggtttcaatactgaaaatagactatgaatatatggccttatgattgtagttgttatattccatgcacacataagtaatttctttctatttgattttttttataaaaaaaaaatatctaraagtttaaatttaaaggtcttatatttttcagggacacaagttaaatttatcttctttaraaaatagattcttttcgacagacgtttaatccaatatctacatctggaagatttatcattagaccaaccccatggtaacataagtaatttttttctatttgattttgtttatgtgctctttaaaattaaccaagattttaacggccatagttcttataacttttaataatatctccactcacctcattctcatgaaccgaccaaacaaaaaaaagtaaagaaaaaaagaatg

SEQ ID NO: 231 - DNA, 121 bp, Unknown
  misc_feature (1)..( 121): cDNA_ID_1684752_gDNA_ID_75764_Annot_ID_146974 3000 nt of promoter
tacattaaggaccatttccttcacgcattatccaattctttcacacaaggagcaatgttactctccaaacatcaagaacaagaagaaaaaggtttgtgaaaaaaaaacaaaggcaaacatg

SEQ ID NO: 232 - DNA, 3 bp, Unknown
  misc_feature (1)..( 3): cDNA_ID_1686649_gDNA_ID_75765_Annot_ID_146979 3000 nt of promoter
act

SEQ ID NO: 233 - DNA, 1355 bp, Unknown
  misc_feature (1)..( 1355): cDNA_ID_1686700_gDNA_ID_75772_Annot_ID_146994 3000 nt of promoter
atataaagtataaaccaaactaaaccgaagaaattgaccagcttcctacaagtaggtgttggataagtttcttgctctagaattaaaaacaagtacattgtagaattgatgaatgcaatcctagaaaaaagtcaaagaatgttggcttttgatcgatgaaatgcatgtactacaccactaggaaatttattattctggctgatgtgctctgcatcaaaacattagttattcgtttacgttagaagttagataaccagttagtggcagatgtttatctgactttttttatttattactgatttataattagacttgtcagatataatgtatttaggatgaatttcttgagtttccaagttactagttcaaccgaaactataccaatttgtataattttgaagtacaacaagtcatagagctcgtgtgtaaaaacaataatagtaacgcgttgagacaaatacggacgtgaagacatgtattgtaagcacgtcgctttgtttccaagtaacaccctcaccggaaaagtccaataatataatgaaaaagataatccaactaaatcttttacaatacatctaaaacttttgattacgtttgaccaaacattaaaagattaattaagtagtatcatgtagacgatttcaaagaatctgagcaaaagtctcctgtgaccaaaatactaataagctctgaatagtaaaaaaaaagtaaataaaaaaaagtttgaaaatacataatgactcatgttaatatcactgaaagtattttaatctggattaaaaagctctagttcattgaatcgttgattaaccatagcagcaactcgacaatatataaatcatctttcgtatgcaaacttttgtcaacctttgaacacactataattaggtttattttattaacaaaattaaaatttatcggaatcccacgtccaagttgatgacgtttttggtgatttccacaaaatatgcatataaatatcaattagcttacaaatacatcaaaatagaaaaattacagaaaacaagaaaaaaaaattgcaattactatacaaaatgtaatctttactgttgacaaaaaaaatacaattcttactattatagtaacaccatagatagagaatgtcataaagcaaaaaaattaaatagtaaatacaaatcattattttttcaaatattttcaacaaatcattcttgtatatatacacacaacatcccttcaacatatacgcgtcctatttccacgttctcttacattttttcttgaaaacatctcgaggttcaaaatctttaacccctacaaatcaagaaaaggagacagaggagaagagagaaaagaaaaacgcagaaacaatg

SEQ ID NO: 234 - DNA, 3 bp, Unknown
  misc_feature (1)..( 3): cDNA_ID_1686703_gDNA_ID_75776_Annot_ID_146997 3000 nt of promoter
act

SEQ ID NO: 235 - DNA, 496 bp, Unknown
  misc_feature (1)..( 496): cDNA_ID_76034_gDNA_ID_75779_Annot_ID_146999 3000 nt of promoter + ATG
taattttaaaataaaacaaaattacttaaaaaaaaaaattattttcttgtataaaaaatctcgagcttccaagttccaacaccaattgtgttacttttgactttttaatcgagtgttttttttgttttgtagtttgcgtgagagcgagacacgagtctatgttttggtctgagtagtcgtgaaatgttttaaaatgattcagaagcggaaaatagaaaatatgataatatcacctggtttaaacattgtctttttagccctagcaagatcatcacaatctcacatggttcaacattaccaaaaataaataaaacaaaatcaatcaaaaagatttaaatatttagaaaaatcaacattaccattacatctagaaatcaagaaccaacttttctttttcctctttctcaaaaaaatatataaacgaacgttttactttgaagaaaaacaaaaatctcggagagattttactatagaaagtttcattccttctaacatg

SEQ ID NO: 236 - DNA, 36 bp, Unknown
  misc_feature (1)..( 36): cDNA_ID_2994211_gDNA_ID_76056_Annot_ID_147017 3000 nt of promoter
csaaagagattctcacgatcgagcaagagagagatg

SEQ ID NO: 237 - DNA, 10 bp, Unknown
  misc_feature (1)..( 10): cDNA_ID_1686762_gDNA_ID_76061_Annot_ID_147020 3000 nt of promoter
  misc_feature (1)..(1): n is a, c, g, or t
nccattaatg

SEQ ID NO: 238 - DNA, 130 bp, Unknown
  misc_feature (1)..( 130): cDNA_ID_1686778_gDNA_ID_76066_Annot_ID_147024 3000 nt of promoter
ccaataatcacgatccgattcaaaatcctccaccgtttctaatcccgacgacgacgaagatttacagaagtttaccgatccgtcaaagctaagacagattaaggttcagcaacgaaatcacttacctatg

SEQ ID NO: 239 - DNA, 848 bp, Unknown
  misc_feature (1)..( 848): cDNA_ID_3012624_gDNA_ID_76074_Annot_ID_147033 3000 nt of promoter
  misc_feature (1)..(1): n is a, c, g, or t
nccactattctattgagagcccatctcaacaagttgaaccatcttttttgtgtactctcacttcaccttttgacaaaaagtcatggaagccaaactttggaacactactttactttgccaacatcttgttttgttgaatacctttttcaaattggaaaccaaagccatatctaaagggaaaacctgtaggacaataaaacaaagaagtgatatctaaagtctaaactaatctcaatatatgtaaatcaaagagataactaatgaaaaatatgaaatttttcgcgaggattaatgaacaaaggattttttttttttccttctaaatttttttattagacaattggtattacaatgacaactacgaagctaatacaaaatttcggaaaccaacttattacataagcaaaattatgtgtcatatactgaaaattacgaaactgaaaaagtgaatttaacgatttttcctttcgataagctttattcgctaacatgttaacatgttagaacatagaaaatattggaaaaaaaattatgtttaaattgtcaaatggaaatatactttacacttttatttgtattaattattactttgctctcctggttataaagaaataaagtctatgattttgttagttttgttttcttgtaaatctttataaatgtgaaaagcttttgtttccaactctaatcctcaatattttatttttctgtttattggaaaagggctgtaaactaaaattatttacttgaggaacgattatttaggtgataagagtggacaatgatcgttgacacgtggacggtccacaaattctagttttgcctataagtatcaaagctcctgaatg

SEQ ID NO: 240 - DNA, 665 bp, Unknown
  misc_feature (1)..( 665): cDNA_ID_1686824_gDNA_ID_76078_Annot_ID_147046 3000 nt of promoter
agcagaattcaatgaaggattaagcttctgagccttgtttgtcacattatcctggtcttgacaaaacagatccgattttcgcttcacaggaaacgaagaatcctgttgattctcaacatccgccatagatgaatcaatcttcttacttcagagactcgcgattttggtttgaggacgacgattcagagttagggctttgaagctgaatcaaaacactcgagccaatttagtttgtaaccctagaagtttttgtagggttttaccgtctctgttttttattatttggatctctgaacacatttggcccagtattagcccatttacctatcttctcaaaatatttggttcttaacaaattcaagcctaaccattagtacaattttaattttgatttgtacattttcaaaaaccggactcgaaccaagatcaaattcaaccattgtggcaattttaatggtcgagtctccagtgtgtatgtggcagcaggagaacgtgccgggggatattaaaccggctcaatgctacagtagtaccggtttggttttctactcgttggtatataattaaaaccggttatccaatttgacaggcagagaagaagatttgattgaagtacagatccatcggagaagaagacagagagaaagagagattgaagatcaatg

SEQ ID NO: 241 - DNA, 171 bp, Unknown
  misc_feature (1)..( 171): cDNA_ID_3012505_gDNA_ID_76477_Annot_ID_147061 3000 nt of promoter
ggcctcaagaagccttatttttttcattttttaaaaaagctggttctgaagttaaacaagacaaggatgaagatagctttgtatccaaacagtcaccgaaataagcttggacgggaaattgaataacggccacatgaagaataataccaaagccgggagaagaagaaaatg

SEQ ID NO: 242 - DNA, 629 bp, Unknown
  misc_feature (1)..( 629): cDNA_ID_2991921_gDNA_ID_76498_Annot_ID_147067 3000 nt of promoter
tttttttttaatagagaaattgcaaaatgtacaaatcgaatttaggctacaggttaaaaaaagtaggttaaacagtcctcttcctaattaaccgctgccacttttactacttttttattttcactgtgaaaacttaacgacacactgtccttttttttattattcctgagacttaacgaaaactgttaaaaaaaatagatcgtccaccatccttaacggcgcaaaccccacaaaaacctagcgagtaccgttaaactccaacactcgccatctcagaccatccacgtgtccctcatgcgtagccaggttggaaagaatatatcaccggcgcgtgaaattgtcagaacgcgcgtggctttcctcaattggaaatttcacagacaagtagagggtaaaatagtcatttaacatcacccctgagagatcactgtcttcctctttcgctttcctcttcttaaaaaaagagttaaataaagagaagagaagagactctctcctcttcacttcgcgaactcagaaaaatcaaatctttctctctctctctctcgttgaaaacccatttctgtattgtgttgaagctacgttactactaagaagaagtgaagcaaaaacagaggtttttgaaaatg

SEQ ID NO: 243 - DNA, 502 bp, Unknown
  misc_feature (1)..( 502): cDNA_ID_1018625_gDNA_ID_76770_Annot_ID_147085 3000 nt of promoter
catttgccatcgcgcaccacctgatctcagcatgggtaaatcaggctcctgacgatgttcactcaaaacaacaagcgggtgtctctctctcaagtttgtagctagaaagatgaacttagatgcttagaaaccaaacgtttgctatggcttctatgcttattttgaattgctgagtcctaagtgtgtggacttcgctcgaagttatttctttgcaacgacgatttagatcaataaaaattaatcaaagattgacctcaataaatttgagttttatagttcgtttttctttagtggctgtgttcttcgaaatcagatgtttactgcttcttcctaatgttcttgttgtaaaacaaaaaaaaaagttaacaaatgagaattccactgttcttagagtacacatctccatagcgtagcattcactctccttccccagattctaaaaccccctccctagtcctcctccaaaccattttgttctttctcagagatctaaaccatcatg

SEQ ID NO: 244 - DNA, 965 bp, Unknown
  misc_feature (1)..( 965): cDNA_ID_3012465_gDNA_ID_76771_Annot_ID_147088 3000 nt of promoter
ctcgacattgagtttcctgaagattatccttttaaaccacccaaggtttgttacctactacaaatttgaaaggttaattttgttgtttacaatataaatacgttttatgacttattttttaacagtacattcaaaactccgatttaccattcaaatatcaattccagcggatcgatttgcattgacattcttaaagacaagtggactccttctctcactgttgaaaaggttcaaaaaaattgattcgtaaatcaaatatttgttttatgttgtttattttgttctttctcattctatttatttaaaggattttcattcttgttaattaagagttaataaataaatcacaagtgctcttatccataactgtattattagcggatccaaacccaaatgatcctcttgtacctgaaattggacaacttttcaagaacaacaggttccagtttgatcagagagctcgggaattcaccgagcaacacgcttgtttttgaaatttgtcatatcttttaattaatcatcatctccatctagatatatgttattgtagagttcttatatattataaataaaagtcacattctttgttctcctggaaatgaattataaatatttgaaccaaaacgtgaactgaatatgccatgcaaagcaaaatattgaattataaagacttttgaatacgactacaatagattttttttccttccgtgaaacatccatgatttatcatttccccgatcgtcacggactcacaagtctacttgaccaataatctttcaatcaacacagaatgttcaacgaagaacccgtaaacactcttaagggtttggaccttcactatcaaggagacgacctcaagtcaaccactaagtgcacatgaggattattaaatagccagagcttggaaagctttatctacaacaccaagagagaaagatacgagtgagtgagagtaagtgaggatg

SEQ ID NO: 245 - DNA, 270 bp, Unknown
  misc_feature (1)..( 270): cDNA_ID_3012455_gDNA_ID_76786_Annot_ID_147108 3000 nt of promoter
caataaaagataaatcgacgagattgcgaaacagacggtgattaaggtagtagaacaccataatctggtatgagtcattcgtagaggaataaagctctaaaatctaattatcctatccaatatcctctcatagaggtgagagctaagattttcccatcaactccatttgaagcgaaattctctgatctctcttcattttattttccctctacatctctcccaacgatttccaaatctcacttcactttggctcctccacctgaatccatg

SEQ ID NO: 246 - DNA, 34 bp, Unknown
  misc_feature (1)..( 34): cDNA_ID_1686958_gDNA_ID_76789_Annot_ID_147114 3000 nt of promoter
accattgccaaagcatattagccggatgagcatg

SEQ ID NO: 247 - DNA, 2100 bp, Unknown
  misc_feature (1)..( 2100): cDNA_ID_1687007_gDNA_ID_77065_Annot_ID_147134 3000 nt of promoter
agaaccacctctacctccatgaggacagccgcttggaactgtagaggactacgcaatgacctcgcagttcgacgtctcaaggagatcaagaagaaattctctccaaacatcattgttcttatggaaaccaagcagcggaatgacatcgtcaaagatgtgtgtagtgaagttgggtatgatagggttgtaacagttcctccagatggtttaagtggaggaattgctttaatgtgggaaagtaatgtttctgtttctgttctttatcaatccccaaaccttgtagatacttatgttaatattaatggatttgggttctatttaccttgtgtatatggtcacccaaatcaaacctatcgacacttggtttgggaaagattagaaagaacagcgactcaaagaacaggtccttggatggctataggagacttcaatgaaatacgtgggaaccatgaaaaaagaggaggaaacccaagaccagagagctctttcattgacttcaggaaaatgcttcaagtatgtgatttccaagacctcaaacacttaagtgatcccttctcttgggttggaaagcgacattcacatgatgttgcttgctgcttggaccgctccttggtcaatacagaatggttaacccaatttcctgcatcacatatggagtttcttgagcttatcgaatctgaccaccgtccgattataacgacaatcaccagcgattttgaacaacaacataaccaattctgtttcgacggaagagtggtcgaccgggacagatttagtgatgccattcgccggagctggaacaagagatttgacaatcacgatgatactctccgggcacgactcaccgagtgcagaagagcaatttcacaatggaaacggcgttaccggtctaatgcgcaagaagacatagccctcctcaaaaaaagaatagacagagcacatacagacggttcatcagttcaacgcatctgggcacttcgcctccaattatcaaaggcttatgctgatgaagaagaattttggcaactcaaaagccgaaagacttggttggcaagtggtgatcgaaacacgaaatatttctttgcctctacaaaaatcagaaaatccaggaatcgaatgcactctatctttgatgatgatggcgttgaacacagaggcaactctaatataggcaaggtggctcagcacttcttctcaaatcttttccacaatgatctaacaaccaacaacaatcactaccatgtcttaaacggattcacacaccgagttacttcagacatgaatgatgacttaacaaagaggatcacataagaggagattgcagaagctgtattctctattggaggttccaaagccccaggcccggacggattcacaggagatttctatcacaagtattgggctgatatcaaacaaacggtaatgaaggaggtacataatttctttgagaatggcgtctttaataaatccatgaaccacacaaatctatgcttgattccaaagccagaacatccacgacacaggagtgattacaaaccaatcgccttatgcaacgtgagctacaagatcatcttaaaaattcttgttggtcgcttgaagaaacatctatctagcatcatttcggaggaacaaacagctttcatcccagggcgtgtaatcactgacaatgttatcatttcgcatgaaattacacacgctttaaaagtgaagaaacgatgctctacctcttacacggctatcaagacagacatcaccaaagcatatgaccgccttgaatgggacttcctgcaagcaactatgtttaagtttgggtttgatgttcgttggatagaatggatcatgacttgtgtccgaactgccaccttctaagttaatataaatggtgcaccatatggattcattcaaccggaacgaggcatttgtcaaggagaccctctatccccatacctttttattctatgtgcagaagtcctcagtcatatgatgaaaaaagcagaacaacaagggcacatcaaaggaatcaaaataagcaacaagagccctccaattagtcacctcctttttgctgacgactcgctcttcttctgtcaagcaaacatg

SEQ ID NO: 248 - DNA, 1534 bp, Unknown
  misc_feature (1)..( 1534): cDNA_ID_1687027_gDNA_ID_77070_Annot_ID_147139 3000 nt of promoter
gttctgctaccaccaaggcttctcaggtgttctccaagtgtatgttcacaacgcaagaaacatcaacaacatctgcatctacgataaccaagacgtctacgccaaattctctctcacatacaatcctgacgataccatctccaccagaatcatccatagagctggcaaaaaccctgaattcaaccagaagcttatgatcgatgtaactcagatcgatgctcatgctgcagttctcaaatgtgagatctggatgatgagcagagccagacattacatggaagatcagcttcttggtttcgctcttgtcccaatctcagacatcataggtcaagacagtgtaactcaagactacagtctctcctccactgatctcttccattcccctgctggtaccgtgaagctcacgctttccattgttaacccttcttctacttcttcatctaatcccaagattaacaccacttcgatttcttccgaggtcgtgttgcttgaccctcaagtctctgaaacagtagattacacgaggattgagttccctgacatcaatgttgctaacgagaacaaacagatggttacagagtacttcaatgaatccggaaccggttcatttctctgtctcggctcaacacatggaccagaaacggacataacaatggtgtgcttggaagaaaaagagctttatgggaatggaagcttcatggcttcttcttcaacaacaacaagcttaagcgacgaaaagaacacagcagattcaaacgagaaagagaatcgagagataacagaagtatcaagaagaagaagcaaagaaggtgaagaagaagaggaagagaataagatgaatgaagaaacaacaatgcagaaacagatagcagagatgtatatgagaagtatgcaacagttcactgagtctttggcaaagatgaaacttcccatggatcttcataataaaccacacgaggaagatcacagtaacaataacaacaacactgcaacacagattcagaatcagaataataatgctaataataatggtatggagaagaaaaaagaagggtctcgtgtgttttacggtagcagggcattcttttaatggaatcaacaacaacaacattgcaaataagttgtttaacattttagcttcttctatgtttgattcccataatcttccctcaaccaatttttataatttattaaccggaaaaagtcttatttttgtggatgtatgtaatttcaagcataggtttatgtcaaatctaataaaaagtgcatttatgtaaaagaaaaaaacaattaagagcctaaaataatcaaatatctaaataatgtgtcgatgttaacagatcagtctgcaaaacccaagatttgaagttactactgggcccattaaaagcccaataaggaattcaattcattaatttgttaagactccagaatggcagaatctcttgaccgacgttaagggcactaacgactccgtctccggtcataaacccggcgagtggtgaactgagaaaattgatagccgactacaatg

SEQ ID NO: 249 - DNA, 1658 bp, Unknown
  misc_feature (1)..( 1658): cDNA_ID_1687041_gDNA_ID_77075_Annot_ID_147147 3000 nt of promoter
ggttgtcaatccaaatgggtgtgatgctaacaatcaagatgtgatcagaggtcactaagtcaagccaagcaataacaggttttggtgtgttctagcagtcctaagtgaacatgcagaaaacagaaaatcaaacagaaacagtgaaacactcgaccaacacagctctttgcagagcactkggtgaggtcgagtaacagacagaaaataaaacacagatactcgagtgcacagtctgttgccagacaactgggtggtcgagtacgaggtcgagtaagaagaaaaaattgcagaaattaagcgacagataacaggatgcagtaaacaataatagagtaaacaaagaattcaatcagataaagaattcccaaggatggggtaattgagtagtttcgtttcctcagtttacaggtgattgacatgctcaataaattaaccctagacaacaagttcattaaccaaatctaagtgccaccacaacagagactctcaagttaacctagtcccagactcaatcaccattgacgagagctaacctaacaggcattacgaatcaacaagttaaagccaaaacgctccctgcaaccaataccttggtacagggtcacgaatctctggaattagtggttcagacatttcatcgaacaccttttgggcgcggaaatgtctgggctcaaattccagttgattagaaagcaatcacctagcatactgagaattctacactactgtaacccatactcagaaacctattcactactgagacatcataacaatgatcataaacgttgaacaggttgaaaacatgatagcaacagtgtaacagcaggatgataacagaatgaataacagtaaacgaaatcaagaacaaaagctgaatactgaatactgaatagataaagagaaatccggattacaaaaggtctagaacaaaaggtctgcgggataaaactagataaaaacttcttgtctgcgaaaatgtgaagtacatgctacttatagccaaatattccgaaaccctaatactcaaaacgacgaagtattgggacggattaagaactgtactcgaccgaagtggtcgactgggaggtcgagtgaatagctggagtcttcttttcttccttgtgctcgagtgtctggttgagtgcggaatgaagaagactctgaagcttgccatcgagggtgtagtcgagtggtggtgaaagtaatactcgacttccaggtggagtgatgaggtcgagtggtggtctgatgatggagatgagggcactcgacctcgtggtcgagtgatgtgatcgaatgatggtctggtgatggagatgagggcactcgacctcgtggtcgartgggttgaagtgaagtggtgatgtcttctattcgacctgggggtcgagtggtctcttgagatcttgaagctcctactcgacctctaggtcgagtgggtttgtcatgattaggtccgcttcttccagttagctcgttaacagctccaaatcacctgaaatcaacacaaatatgcaaaatgcatgcaaacctatcctaaacatgtaaagtgatgacaaatgatgagaaatggtataaaacagtgatgatatgatgctaatgtgatgacaaatggatgctcaaaacatgcaaaatacacacttatgcaacagccaatg

SEQ ID NO: 250 - DNA, 422 bp, Unknown
  misc_feature (1)..( 422): cDNA_ID_3012422_gDNA_ID_77080_Annot_ID_147150 3000 nt of promoter
gaagaccgattctaagcctagcaactaataatttgaagttatcttattatattgtatgaacagttttttcaatattttttgctctattaatcgaatctcacaatcacattagtcacgttacaacgaccagacaatggtagtaacaaacaaaaaggaccatacatttttttttgtttaacaaaaacgaccatacatgttatcgctacatgattttctctgttatttttattttgtatctcacattgaacatgtggacgaagaccttcgtatatatatattttctaatgacacaccaaaaactgaattactactactagtagaaagtatatataaatgcgaagaagacatataactatcattcagagccaaacataaaaaaaaaatcaatacatatgcaaatatatagcaacaaccgaacgatg

SEQ ID NO: 251 - DNA, 416 bp, Unknown
  misc_feature (1)..( 416): cDNA_ID_3409291_gDNA_ID_77238_Annot_ID_147154 3000 nt of promoter
maatgagatttccctgcattaaatttttacaattagtaatatattaaaaactgtgaactaattccagaaaaagtgataaaaccaaaaataagaaaaaaataataccaaataatattaacattttttagttttgtttttttaataaagagagaaaaaaaaagagagtgttgtgtgattttatttgttctgtcgaaatctgggaatcatctgatactcttcttcttctcctccttcatcgatttgscttcaatcatctatcggcgacgagctccatccggtttgtctcctaatcagaatctctgatttcccgatccggctaattcctcatcgtcggatcaattagattatcttatcccaaggagaggagtgtgtgtgaatcggagagagcgagagacagagagagagagagggaaatg

SEQ ID NO: 252 - DNA, 347 bp, Unknown
  misc_feature (1)..( 347): cDNA_ID_1687073_gDNA_ID_77251_Annot_ID_147160 3000 nt of promoter
aaaaaaaaaaaaatcagtaatctacttgctactaaaacaacattaagacaaattaggtaataaaatattataattccttttgtcacattaaaatcattcacattcacactatataattccatatccgaaattcaaacataattttagccgtaaagtcaaagtaatggcgtgttgactaaataatgttttaacgattttctttccaaaactattcttaaagtatttcactttgagccatacaccgttgaccacttcaataccttcgcgcttctcttcttcttcaccaccacacacagccacaatcttttgaaatttccctcctcatcatcgtctctctccgatccatg

SEQ ID NO: 253 - DNA, 2686 bp, Unknown
  misc_feature (1)..( 2686): cDNA_ID_2026192_gDNA_ID_77261_Annot_ID_147167 3000 nt of promoter
  misc_feature (86)..(86): n is a, c, g, or t
catcgggtctagctcctctcatcgcttatgattgttgtgatcagagagagatcgagcagctgaggaatgttggaagtgaaaattgngggaatttatattccggctcgtccaccacaaaggacaaaaacggttaagacaaaccggtttttacttttcccccaaatatcaaaatcaaaccgggtttagattttccaccaaaaaccaaaccggttttagcttcttctttgaatttttgttgtgacggaggggatttgctttaaaagtttagggcttttaaaatcggcgacggcgagcggagaattcccaaggaagagtcgatgaagttgaaatcggtgttcgatgcttcggaaatcaaatcggaatttgaatcagcgggaataaaccctaaattcgcgattcaaatctggaagtatgtaattcagaatcctgattgcgtttgggacgagattccttcattgccttccgctgcatactctcttctccattccaagttcaagactcttacttcgtctcttcactcgctatttcattcctccgatggcaccacctcaaagcttctcatcaagctccaggtactctatactctgttactgtatacaacacattgcttttatggattctgaaaaacttgtaatgtctctgtttcctgacgaactcatattggattcttgcttttggttttgaaattgaagaatggagcttttgtggaagctgtggtaatgagatacgatactcggttggggatgttaggagggaaaccacgtcctggaggtataagatctacgttatgtatttcatctcaggtattgatttttatcacgcaatgttatcttggttttatcgaatgaaagacatgtgatgtgaaagtatttatcaataggttggttgtaagatgggttgcacattctgtgctactggtaccatgggatttaaaagcaatttaacatctggagaaattgtggagcagcttgttcacgcctctcgcattgctgatatacgcaacatcgttttcatggtatatttctgcttctgttattgcattttatctacactatgtgcaccttgccttatggttatttattttatatactctgcattgatgaattttattcaccagttgttgccttggtttgatgattgtgatcagggaatgggagaacctttaaataactacaatgctgttgttgaagctgttcgtgtcatgttaaaccaaccatttcagctgtcgcccaaaagaattaccatatcaactgtaagtactcagaaagctaccttgaaacattcgtaaaacagagaaacttattcactgaattttgtaggaatactttagattatggaatttgataaagggaactgatagataaacttcaatccattaaacctcgcagtatgcagcttccaagacatctttcagctttttttgtctagttggttacttttaaattttggtgttttgggattttcttctgatttccttgtccttccgtaatgcttgtaccgtatattccaggcataaatctaaatcatgcaatgctgcctgtgttgacacttttttttactagttagcaaataaatttccctgtatcctaatgtcatttgcataggtcggaattgttcacgcaattaacaagctacacaatgatctacccggtgtaagtttagcagtatccctccatgcaccagttcaagaaatccgctgccagatcatgccagcagctagagcctttcctttacaaaagcttatggatgcacttcaaactttccaaaagaacaggtagttcatgtactcttgactggttcgttgctgttaaatattaaaaccacaatcccttcagttacattgacgattataacattatgccacattgtcattggatttaacagtcaacaaaagatcttcattgagtacataatgcttgatggagtaaatgatcaagagcagcacgctcatctactaggcgaattgctaaagacatttcaagtggtaaatcttcgatgtcttaatactcttaaaggttctgcaattatctgatgatattttttatggaaactctgtgctcttttcttgaacaggtcataaatttgataccatttaatccaattggatccacaagccaattcgaaacaagcagcatacaaggcgtgtcaagattccagaaaatcctgagggaaacatacaagatccggactacaattcgcaaagaaatgggtcaggatattagcggcgcttgcggtcagctagtggtgaaccaaccagacatcaaaaagactcctggaactgtggaacttagagacatagaagatctgcttctctaactttaggaccagagacatgaaacagacatttggaatggttgtgtagtatctttgaagccactcttcaaaacccttttcttaaacttcacattttgtcctctcatcactttgtggaaaacacttggctcactcttatatgcaagacaaacagttatggtccttggtccttccacactatcacatggaggtttaacttctcttataaaatattcaccaacaagtgatgttatgtcatcgttaaagttggaagtaaatgttaaactttaattttaatgaagtaaatagtagctaattagcttctcttcccgcctataaaactagctcctcactctgtcttctattccataagagtaaaaaaaacagagagatg

SEQ ID NO: 254 - DNA, 1012 bp, Unknown
  misc_feature (1)..( 1012): cDNA_ID_1687158_gDNA_ID_77498_Annot_ID_147197 3000 nt of promoter
agctacggcaacatattttcccccacgagaaggagaatagatctgtgattgttttcttaatgctttccaatttggttcggtttgtgtttatttagttggaattccagttcaaaatcctgaagcgaagcagcttgtaaatttggatcttcatatcttccctactctctcgacgttgcatctgtacacggtaggtgcggaagctaactgttctcttctgtctctgctgattttatactcctttgaaggtatcttatatcatttttgcgggtacaagtaattatgttcgactgcatataaagttatttgatttgaattgtccggttcgcattaaccaaaccaacttaagctttcagttcttttttcttcccgataaaaagcaaactttcagtttaagaagctgagacatccaaaattcaatagcatcatcagctcatcacgatgcttctctgtttataatcctaatcaattttgcaactgggcgttgggcctcacctccgtaacccaaagtcaaacaattccggtttgtttaccgaattaaaccggtgattaaagtagaaccaacaacatccacacttggttttaaaaaccctcaatttcgtttgtctgctgtcttcttcttcttaaagttggatgtttcggctactccgatgcatttgcatgtattgtcgaactgaaagtctgtgacttttcttctcctctacgatagaaaccagtgacctagcactcccaactctcactcttatcactggacgcattctccaaaattttgatcttcgattaagccattcgtagcgaggtaaatgctcaagttttacctatctcctctgcttccactgattctgtttcttgattcaaagttttctttgtgtgaattcatattttcgtgtgaattgtgaattagggttttctctgttcccgtttctactctctcatcttttggggaaaagttgtcaactttcatgttttacctgtagccgtaataacgtactcttaatctcgtgtacgcaagatg

SEQ ID NO: 255 - DNA, 158 bp, Unknown
  misc_feature (1)..( 158): cDNA_ID_1687163_gDNA_ID_77500_Annot_ID_147199 3000 nt of promoter
tcgcttactcaatcaaagttcttcaaatttgcatatctgattttgcttgcgtctgtttccggcaactcgttatacgtttcttctccgatttgggttctcttattcaaattgattaaacgtgatttcagagaagaagaaacactaaacaaaaaagtatg

SEQ ID NO: 256 - DNA, 2081 bp, Unknown
  misc_feature (1)..( 2081): cDNA_ID_3012350_gDNA_ID_77863_Annot_ID_147222 3000 nt of promoter
aaaaaaaaactaacggaggtagacaatagtttagctggaatgcttgaagaaatggcaagaatatgcttcgagaagttatgatttatgaagaggttacctgcaaattttttcatttctttttgccgacggttggctgttagttaggaaaaagaatttttgttataggattttctcttccgtttcgtacaaacccaatcattattctcgtctttatacttaactttgcctctcattttcatgttatcaatcttttaaattaaatatatcgtcaatgactgttatgaataattagttcttcattctctgccttggttcgaacctcagtcacatggtgcacgttattgtgatttcccatacctcaagagttattcaagatcccttacagaaatatatttatataatcttttatctaatgtagttatttacaaacatgtattatctaccaaaataaaaagggctaaaagcttcttgagtgagaccgcttttggttcgattcattttcctacactccaatagtattacactattgtatataacaagaatcgtgggatttgtttaatccgtacaatgaaacaagaaagatatacaataacttaatatcatttttttttggggacaatcttaatatcatttctaatttctatagaaccaaaaacactcataacaacttaaactttgttttttgtgagaaaaataacaacttaattactagttactacattgacaatttaacatcttcagctaaaaccgaatgtatatgaacatttataatctagttgctattgtatatacgattggataatacgcatatcgacatttaaataattgagcctgaagataattcacaaatatgcaatgtaaatccgtccatacagccaaaagtatgtatgtcccatgcataattgaacaaaaagaaattatattaatattatttttgttgtcttctgcaaatgctaggactgctatcattatcatcattgattttaatattgatgtttccagaaaaataaataaacaaatataaagaaaaaaacaaacacaataagtaaagctacactattaggtaataattaaagctcatttttaagtctaaaattttaattataaaataaaaaacattaaaaagttaagacccaaagaaacataaatgcttttttctttcatcaatgtcaaaaaagaagttttcccaccaaatggtcaaacttggatctttgacaatattgttccaatttcatcatgccctatcttttctatttatacacataccttagatataattattaaacccaaaatttgtgttaagaaaaaaaatagacccaaaatttggaatatatatataagtcaccgctggaaaaaaaattattgcaagtaatttcttatatgaaattggaatgataatattttgttcaagtatccattactaaaattttacaacgctagataacgagattgcttgaagtcgaacttgtgaacaaattataataatgtaaaactaacttgtattgactaatctttgattttttttacaataatgagtgatattacattcattttattaactaaatacaacgaatatgataaatattcagtcctcttataaactttatgatagtgaaaatttgagacattgacaattctagcattctaacattttatgagattacatgaaatgtcaatttagaccttaaaccaaacgaatacatgattcaaatttgaccgacaagtacatgatgccttccctttgatcacgaaatttccacaaagagtccgtgtctgcgtaattaaccagcaatttcaagggtgtttacgtaattgtagcttaacaaataaaaaacacgaaagaagatggcgaagaaaacggaaagtagtagatagataaagaaagagaaagagaagagctggattcacatggtcttgttctttctctctccttcttttctcatcttgcggcttccctttctctctctatcgccacaatgatcattaccaaccaaactgattgaaactcatttgttctctctctctcaaatccactctctctctttcttttctcttctcctctctgtgtctctatcgccatg

SEQ ID NO: 257 - DNA, 1192 bp, Unknown
  misc_feature (1)..( 1192): cDNA_ID_78177_gDNA_ID_78081_Annot_ID_147242 3000 nt of promoter + ATG
tctgtgaggaaggtccgaagaagaatgacaatgatcaggagattggagatcttgtgatatatgttgatgttagtgatattcctctcttggaatctgcaatcactgagacacacaatgatgataatggtatgcaactagtattataaataactagccttaaccatttttcttgtttacatttctaaatcaaatcttctttctttcgcagagtccaagaacgttctagctattgataggtcagtagaccaacaagaaacagaacatgcaattcaggagaatgatgctgagccagagacaaaggtgaaccaaaccgatagtgatgctggtgattcaaaaaccaaacaggcaattcaggagaatgactctgaacctgagaagatcaacaattttgatgaagagacaatggtggaccaaaccgacagtgattccgaaacagaaccggaagaaaatcattctggtgttgactcagacggcactatctctgaagctgattcgaaccaagccgtagtgggatctgatattgcggatgaagagatgactctttcgggatcagaaggctctgctgctactgctccaaattcacctcctcgtcttgaagaggctaaagtcatcaaaacaactctggtatctccatttgcagtagaatcaatctcaactcaattcccaagaccaagcaaatcaacaactccattaaagaactcgcctctgaagctggtcaatgagaacaaggagaacaacatggagatgatgatgatgaatgttaacaacaatgagaatggagagagcaaaggcgaggagggtaagaagaagaagaaggtgacaatcgatgaagagaacttgaaaaatacgagcataaggcaactggagaagatggtgaaggaactttctataaagaccagtaacagaactgcgttgcaggtattgcccgggaataataagactgcagagtagcgagggagactcaaatgtgctttgtttttcttttgttgtctcagacagataaacaaaaagtgttgttccctttggtttgaataaaaaacactcaatttggaaagagatcttttgtttaaatgtgttgcaatgtgttgattttattacaaaataataagctcaaaatactcttttaagttctggttcttggaaattcccaaattgtttttaaagagctgttctagggttttctccgatcatg

SEQ ID NO: 258 - DNA, 152 bp, Unknown
  misc_feature (1)..( 152): cDNA_ID_1019253_gDNA_ID_78089_Annot_ID_147245 3000 nt of promoter
acaaatcatcaaatctggaagacaaatcattaaaaaaggcgacaactttttttggttcagattttgaaaatttgattttttatttttcttatcttggcgatcgaatcctatccgaaagattgaaacttgggaggtgggtaagtgagtgaatg

SEQ ID NO: 259 - DNA, 221 bp, Unknown
  misc_feature (1)..( 221): cDNA_ID_1685680_gDNA_ID_93807_Annot_ID_147266 3000 nt of promoter
aaattagataatcattctaaatatatttttaaaaaatattaattgactctcggttaatccaatgactcgatgagtagtcttgcttgccatccggagccatccggtttgccatccggttcggtttaaaaacattggttttttcacgaattccaaacttaaagtatggttgttcgttcaattatcgtttcacctccaacaactaaacttattaccatccaatg

SEQ ID NO: 260 - DNA, 2274 bp, Unknown
  misc_feature (1)..( 2274): cDNA_ID_94091_gDNA_ID_93827_Annot_ID_147276 3000 nt of promoter + ATG
atcgtcagtttcataacaatgcaatttcagctatgtactgtcttcttcacattttcccttggtacaagaacccattattttggacggacaattctccatggtggtgcaagggtatattctcattctcggttcttaaatctctgtaaattttttggaatgtgataaccattgtttgttaacagtaccaagccactggaagaggcttcgtcgtgaagcatatcaaattttctgaaaactaccgtctttattccagaagtcattttgtcaaagcgtaatctcctcttctttagttcttatgtatatacatttctgatgtatacctgtttagccatagtaaaggattgaaaattcattgatatgctacttctttttcgtttctctagaatggaagttattcttttattggttgtgtaccttgcgtatggcaatgatgaagctggtgcggtttcctacatcctgctgacagttagcagctggtttttggctgtttcttggctgtttgctccgtacctattcaaccctgccggatttgagtggcagaagtaagtggtgctatcttatttatatcatgttgagtgttgagtaacgtgtttctcattgaacaacaataaaattatgctttcagagtcgtggaggacttcaaagaatggacaaattggctcttttacagaggtggaattggtgtgaaaggagctgaaagctgggaagcatggtgggaagaagaactggtaagaactattctcagaaagttttcttgcttgtctgagaactaatttttctaacttagaaaataattattatatctgtgtgtcgacagtctcacattcggaccttgagcgggaggataatggagactattttaagtctacgattctttatcttccagtatggtattgtctacaaactgaagctacaaggatcagatacatcatttgcggtagagcgctccccttcattgactacttgtatctacgcctttgcatatcttagtctgctagtatttgtgcttaataatatcactcatctatctgcaggtgtacggttggtcatgggttgcatttgcaatgattatagttcttttcaaggttagtttattccatcagcatgcttcattttccgataacctttgatcctctgactaaatttgattacatgatctgagatatctcccatgtgaactttgaaataggtctttaccttcagccagaagatttctgtcaatttccagcttttactgaggtttatacaaggtctatccttattgatggctctagctggcataatcgtagcagttgtgctcacacccttgtcagtgacagacatatttgcatgcgtattggcttttataccgacaggatggggaattctttctgtaagttgttcttcttgctcacctcagataccttgatttctttctcatctctgcagattcctcctaattttgacaaacaaatcttctcccgttgtagattgcgtgtgcttggaagccagtcctaaagcgaatggggatgtggaaatcgattcgttccctagcaaggctatatgatgcgttaatgggaatgctcatatttcttcccgttgctctctgctcctggttcccttttgtgtcgaccttccagacacgtatgatgtttaaccaagccttcagccgcggtctcgagatctctcttattcttgcaggagacaatcccaattctggtctttaaacttttggaagctgttatgtttatgtttttcatacatttatttgtgtttagttttccgagtgtagcagtagtaaatgatgggagcctctctgtagctttaggcattttaagacttctgtaacatttgtccccaaaaaagaaaagacttttgtaaaacataacctagaatctttaagatattacgtagaaatgcctttggaaagaaagcgattcaaggaacaaagattaatttattcattaacggtaaaagaataaacctaattactggatccagtcattaacgcgcatgttatgtttgtcgttgttgacgaatccgtgatttggatcctttgaatgtttttggaagtattagtggttagggatcaaataaagcccaattattcgacaggcccatctaacaaaattggggacctaattccaggcgctgaaaggaatcgctggcacaagtagaaggttctagtcggaaggtctcagaagtctgtctacagaggtaccgttggggcagagagcaacatattactagaaaactccagagttcgttattggagcttctaagcagagagagatg

SEQ ID NO: 261 - DNA, 21 bp, Unknown
  misc_feature (1)..( 21): cDNA_ID_4254519_gDNA_ID_93827_Annot_ID_147277 3000 nt of promoter
atcgtcagtttcataacaatg

SEQ ID NO: 262 - DNA, 42 bp, Unknown
  misc_feature (1)..( 42): cDNA_ID_1685745_gDNA_ID_93838_Annot_ID_147290 3000 nt of promoter
cataataacggcgtagtttcagaattagacagtgaggcaatg

SEQ ID NO: 263 - DNA, 3 bp, Unknown
  misc_feature (1)..( 3): cDNA_ID_1685795_gDNA_ID_94265_Annot_ID_147314 3000 nt of promoter
tgg

SEQ ID NO: 264 - DNA, 106 bp, Unknown
  misc_feature (1)..( 106): cDNA_ID_3012143_gDNA_ID_94274_Annot_ID_147324 3000 nt of promoter
tgtctcataattcctgttcgctctctctatatgtatgacattgctttgttcttgacctggtttcttttggggtaggatgcgggaagggaggtgacgggtgaagatg

SEQ ID NO: 265 - DNA, 200 bp, Unknown
  misc_feature (1)..( 200): cDNA_ID_2731470_gDNA_ID_99055_Annot_ID_147327 3000 nt of promoter
actacggccttattatatcagttgactagtattatgtcctaaacgacaccgttcttaattagtaacattaaatgacgtcgttttataatcgcttaaccactggctattagttcgcatctcaagtcgtctctgccatttttggctttttaatcaaaccctagagagattgagagagcgaagagaagccatcatcagccatg

SEQ ID NO: 266 - DNA, 1360 bp, Unknown
  misc_feature (1)..( 1360): cDNA_ID_99140_gDNA_ID_99056_Annot_ID_147329 3000 nt of promoter + ATG
tcaattatgtaacaatcctaggcgagctatttaccgggttttagagatgtatagactctttaccttctgtctgtttagatattatgttgtttggtagtaacaaaagagctggcaatgtaagggagagaaggaaacttactagttgtaaacttaggttctcttacaacgttcacatgttatctcacatacaaaatgttatcaggataagaaaaccacaaaaaaaagaggcaaagaagtgagatgatcctagcagagaatcaatctctagttcatcgtcctaacaaagcaacacgatctgactgtacagcttgagtaaggttgatgtcgaaaagctcgcaacggataggcatttcaatctcatagaaaggattcttcaagacgtaatcagtgtagagttcataaatgtatctaaggaggctctccatgtgaggagtcccaggttcacaaaccacaaagaactttgttcctgagatatgatcagttatagagccaagtcagtaatcaagagaatgtgacggtatcttcttgcaaatggcgatgtatgattacctgggagagactggaaacaatggagatcgaaagtgtcggcttcgagaagctcgatgccagaacagccattgacaggtgaaagctgctgagaaatggcgtgcattgaatgccataaactagctactctcaagctatcattcgtatccattcttccctttgttccacaatcctgaatttttcccaaatccaaacacacacagaacagatcaaaattcaaatccaatttctttagtagctattcacaacccctagattaataccgaaaacactccttctactaaacctagtgatctcaaaaatttcatcttttggtctatccctcgaaattaacatcaattagctcgtcattctctagacatggaaagtccacaagctgcgagatcgagaacaagaggaagatggagagatcgtaccttgtagaatatcaaaccaccagatttgttaattatgtaaagactgtaaatcgctgccatttttttcccccgataatcttcaaagatccaaatccgagaaatcagcgagacgatgaagaacaacagtacagatcttattaatgatttttctttttctcaaaacggcgtcgttattatatcgatggtctctactcgcgccacgtcgcctaattaatttaacgacgtcgtcttttaaagaactagcgtctcttaaagcgccacgtgagctaatgtttaaaaaacttcaccaaaaacggtgtcgttttaataacttttcttcaccaactaccaaaaacgtctgaagaagaaaaaggtataagtaaagcagagagaagagcaagggagaggtactaaaaatg

SEQ ID NO: 267 - DNA, 1784 bp, Unknown
  misc_feature (1)..( 1784): cDNA_ID_1007243_gDNA_ID_99056_Annot_ID_147330 3000 nt of promoter
ttattatgtgttgtttgtaggtagttttagtagaggagcaaaacagagaaatgagattgtgtggttatattacaatgtgtgttggccagtcctctaagccatcgaatatatgagtagcgtagattatggttgctcctcgttcttyacattcctttctcagaaacttcaaaaggtctgctctagcgagaacgtcaagatcaacagttatttcatccaaaaggagaacctatagatgattcaagaaagtaggattcagataaattgttgaagcaagtttcatgattagatactataatgatcttagtccattgttttaagcatcaaaccatttcatcttctgaagcatcaggtttggctaaaacctgtatacttttggttggagataagggtttaccttgaatggcttcaggagtcccatacagatctgtacacgtcttctttggccatcggataccttgtgcagtctccatgagatgtcgatatccaacacctgaaccaaacacaattagaacaaaacagtaaggtggagaatcacattgatttgatgtaaaaaaacagagtaataatactccagacaatgaagtgctcgtaagtttggtatgtgacaaagatcaaagatcagaccatgctctagctgattttttgttttaacattggaattcagaatgaacaaatgagttaagactatagcaaatacttaaaaagtaaatttgaatccttcccaaaacttcaaagaatctcatgtaaagatgcattaacagaacctaacccatcaaatcaaagtcagatttttgaattatctactcaccttgatcaactcatctcttctctgaggatcaataccagccactccaaatatcatcttctccgccgaaatgtccatttgtatcggaacttcaaatcctgcaaatgcaacatcacgcctccactggaaagaagaattgacaatcccaattactttcaattccaaatcaatactcagaattcacactaaatttgttatccaatcacatccacagaaacacaaagaattgaaaattcatcacgaacctcgccaccgagataacagagatcaccagaagaggtcaatccagtatcatgaaacgccgagcgacccagaaccctaaccatatgcggctccaccatgtgtttccctcccaatatcttcagaattgtcgttttccctgatgattcaaatcactcatctaatcaaattgagatctcatacagacacatttcgagctaaatagataacgaatttcaaataccagcgccattagatccgacgaggagacaccgatcgctggaattaagcgtgattgagaaatcttcaataagtggtttcgatcccggtggtggatgaccgtcgattccaggatacgtgaaacgtaatccggagatctcaaccgttgaattccgcttcttctcctcctccgtcaccgccatttttagtacctctcccttgctcttctctctgctttacttatacctttttcttcttcagacgtttttggtagttggtgaagaaaagttattaaaacgacaccgtttttggtgaagttttttaaacattagctcacgtggcgctttaagagacgctagttctttaaaagacgacgtcgttaaattaattaggcgacgtggcgcgagtagagaccatcgatataataacgacgccgttttgagaaaaagaaaaatcattaataagatctgtactgttgttcttcatcgtctcgctgatttctcggatttggatctttgaagattatcgggggaaaaaaatg

SEQ ID NO: 268 - DNA, 603 bp, Unknown
  misc_feature (1)..( 603): cDNA_ID_3012251_gDNA_ID_99069_Annot_ID_147335 3000 nt of promoter
taggmttttttttttttttacttttcgaaaagccgatccagatttttgataattttgaagaagaagatgcaacaaaatcaagtgaagaaggttcgcttcttgctctctatctctctcaatcatgctttgattctaaatgtgggaaacagaggataaagtcttatccttttacaaatttaaagacaaaaaaaaataaaatctttcctttttcaattgcaattaggtttggttttgttgcatgagcataaataagatgtgtggataaagtttgtgttttgtctacttttgtgattcactagggcacgaaagagatggagtttttcacagagtatggtgatgcaaatcagatataggattctggaagttattggtaaaggaagctatggagttgtgtgtgcagctattgatacacatactggagagaaagttgctattaagaagattaatgatgtctttgaacatatttctgatgcgcttcgtattctccgtgaagtgaagcttcttcggcttttacggcatcctgatattgtggagatcaaaagcattatgctgcctccttctaagagagagtttaaagatatctatgttgtgtttgagctcatg

SEQ ID NO: 269 - DNA, 450 bp, Unknown
  misc_feature (1)..( 450): cDNA_ID_3012255_gDNA_ID_99073_Annot_ID_147340 3000 nt of promoter
atgagaagagcgctttagatggaggaaagataagagccacaaatctcgtctatgaattctgagccacgaaaacaagatctacctcacgcgccctttatctcacgcgcttccccttacttgtggttctcttacctcctcggaagttgaaacattacaacaaacacattcgtcttcttctttctctctttctctttggtcttttttttgcttactgttgaagaaaatttaaacaaaggcttctcttgatttttgaaccaatcatctttacttcatctgagggtttctgatttgggtctgattcaaaactctctcatccgttcactacaaagtgagtttctttctctttgtgcttgttagatttgaatccatacatttttcgaattgtttctgaaagtagtgagcttgatttgttcattcatcaggttgatagatcgatcgattgattttatg

SEQ ID NO: 270 - DNA, 817 bp, Unknown
  misc_feature (1)..( 817): cDNA_ID_3012274_gDNA_ID_99284_Annot_ID_147345 3000 nt of promoter
atgtggtgcagctaataagaattctccaggtatggtcgatggcaagtgttcgaaaaattatccaaaaaagtttgaggagataaccaaggttggtagtgatggttttcctgtttatagaagaatgcaatctgataactatgttgagaaaagtggttttagatgtgataataggtatgtagttccttacaataagatattgtcagttcgctatggtgctcatatcaatgtggagtggtgtaatcagaatggttctattaagtacttattcaagtatataaataagggtccagatcgatttgcatttgtggttgagcctgataagccacaaacaacagagcaaaatgagaatgtcaatggcacaacagttggtgaagaacccttaccaactgagaaaaagaaggacgaaatcaaagattattttgactgcagatgcttttctatatagtctttcccttttttgcatttatagaaattgtctgaagtctataatatatagtttctttattttctatattattatttcagatatgtattagcctctgaaacagtttggaggatatttaacttcccaatctagcatagatcaactcctgtgtagcagctatcatttcatgtagaagggaagcaaccagcttaatttaaagggaaagagtctaaaaaagaatttttggaacgtattgccaaccaagattctcaattcatggcttggttgacattaaaaaagaatgatgttgttggtaaaaatggaaaacgtgcacatgatctcttatatgcagatatcccaacatatttaacttgggattgaacaaataaaatg

SEQ ID NO: 271 - DNA, 659 bp, Unknown
  misc_feature (1)..( 659): cDNA_ID_3012301_gDNA_ID_99300_Annot_ID_147360 3000 nt of promoter
aatattatcatcgagcatccaacggtagcgatggagatttctttatggaatatctgatatccaccgttagattaagagacgaggttggctccgaattgcatatagttaaagggtaaaaccctgcgccgcccgcgactctcctctctgtttcgttttttttcctttcattcttcttatctcctcacactcttcgaacaaggaggaaccctaatctcaaggtaaatccattatcagtctaatttccctttctcttactattttatctctccggttctcgggtttctctaatccccgattttgcaaaatgtcagatatctttctttcttgattcatttcgcttctttctgtagataggattagtatttgtcggtgtttgagatttcgtagacgagatttactggtttttcaacttctctgtttgtttaatttggggatttggtatacctaatcgattgaaaagcgaaacttaggttaaaactaatagtaacatcactgtgtctcttcatacgcatctgagtttaaatctgttggcgcttactttcttgtatagtgagaaatttcgtggaagtattattagcagttaatgagttcattgaatcttttggaagtgatttggagattaattgatttagcttcttattatggtttatacacagatg

SEQ ID NO: 272 - DNA, 477 bp, Unknown
  misc_feature (1)..( 477): cDNA_ID_1685961_gDNA_ID_99301_Annot_ID_147365 3000 nt of promoter
tttttttttttttttttttgccaaacaacatcatactaatctatatcttcttttctcttctgttcaaaatttataccagtatattcaaatttagaataaattatgtaagtatttagttcttgcaataaaagaagataaggaaagaagaattatttgaaggatcattgtaagcaaaaaggttttcagttataaaaggatttcaattggtggcagcctaacaatttttctttctaaattatgaagttccagtctcaaacctaatctttaaataattagttgggtagctactaaatctcaatatctgtttttttacaccagtttaaaatttttatcccggcaaagaatatgtaagcgggggtgcgacaatgaccaaacaaacaagacacgtgaccgccaacattgtcctaaaatcccaccgtacactgaaacgtcacgccgacgcgactcctgaacacgcttccttcgcaacaacacatg

SEQ ID NO: 273 - DNA, 1670 bp, Unknown
  misc_feature (1)..( 1670): cDNA_ID_2992029_gDNA_ID_99849_Annot_ID_147373 3000 nt of promoter
tttttttttttcttttcttttatgttaaattgtgcgaatttcagatcttttgaccttatatattttttagtgtctggaatcaattttgagttcattactatttaataaatgtctttccgtcctaaaagaaagtttgaatccggagcgcaaaggaatcaactacttgggctacaactaggttaccaacccattttggtaggtttgttgctattaaatacgagagttctcgttctagttccagatacagatatgggcatcatgccatctttaatcatttattttgtgttttgaaatgcattaccatatacagggccggtattggcctaaaactggtgaagcctttgctttaggcgccaaaaaatatatgtagtacaaagggcatcaatttctgaaaacattttatagtgtagtggttagctctaaatgtagataattgtttttatggtgcatggtttaaatctcaattttgttattttgtgatttttctaaatttatgaatttaaaaatgctttaggcacctaaatcagttggggcggctctgtccacataagatagaaatttaagattatgagtgaaaattttatataaaaatatttgattgtcccgggttcattatcttgatctcgaacatgcctcgacggatccatgattttacaatctaagatccggtcactatagacatcttattttcatgatcgaataagaactcggataattattcaagctctagtgctagtggattattacgtcaactaatcttgcaatatattattgtttaaatatgggaagaacagaaaaatcaactttttatcaaaaaagagaaggaaaaaaacactaaattgaatttattaaacacgttctccacgtgcgttatagctgttcgtaccaacagcaaaatggaccgtccaccaattagattagaaccattcaatgttatacttttcttttttcacgtgtcacaagaagaacttaaaaatgaatacgaaaacgaaaaataattcctccaatccaaaagaaaaaagattttgaaaattagtacacgatagtgaaatgcactttatcaaaaacacaaacttgttttgttttttcttattatgtttaataattaaaaaataatctttacggttcatataatttgagtttggctacttttcttacttcaatttggctacttgtataaaacagtgagataataatttctttgacgttaaaattacacaatttccaaatgcagaaacttcaacaagagacatgtagggaaagaatggtggcttgtttggcttatttacaatttttaagttttaatccaaagaaaagaagatcccatcactcttttcaacaaaaaaaaagttatcaaattaatcattaaatcagtcacgtaaacgaatgttttcttacaaataattttgggattcgaggaaaattaccaaaaaaaaattaaaatagaataaaataaaataaaatgaaagacttcatgagaaaatagagacgaagttaagttgtgtttggctttgagctttggctacttgggatttaaataccacttttttgcttcttgtacccctgcttcatcatcacgcacacctctcttaacttcttcgatctcttctttttctctacacgattcgattgattcaagtatcaatcaatcgaatccgagataagtcatg

SEQ ID NO: 274 - DNA, 1297 bp, Unknown
  misc_feature (1)..( 1297): cDNA_ID_1685987_gDNA_ID_99850_Annot_ID_147376 3000 nt of promoter
aaaaaaaaaaaaaaaaaaaaaaaaaactagaagtttcaagagtatatttggcttaaccggattggtcatcctggtttaatgatgatgcgaaagtattgagaattatgtggacattaggtgaaaaaccagaagattctccctaatgatttatcaattgttacttgctgagaaaacaatatgataatgtgatttttataccagtcaaaataattttgactttatctattcgtaagcatatacaaggagatgattatgggttgatcacccactgtatgacatttagatacctaatggctataaaagatgcatcgattcaatggacgcattgactcgattgttgcatcgactagaaggtcatatttatccttgttataaacccgcaacatagagtttgtgaggttactttcttgattaaagtacaagagtatttcagtgtttatttattataaccattattggatatccgttgggataagtgtttaacattttgaaattcatgttcatacacaaaatggtttagtaacatcgatacgcatcaagccaatgaataattaatagtttcccccattattattggttttgggtcagaaaccaaatagttttcatctaaaatctttgaatgtgataagtgctccaccacagcacgttgagatgaaccctcgaaggaggataagaatacatgttggatatgaatgataactaagccatcctagaaggatttatataccgttttgaagactatcatattatatagtcagctattccaacataagggggagaatgtatacaactggtgaaaaagataaatagaaatgaattatcaatgattctcggagtaaagaatgtatattaagagtccaaaagataattcaattacagaatttagcgttgtaattgccagacgcatttgctgacccaaataaagtgatgaagtcacctataccagttgtaaattaaatgctccagaatataatgaatgtcctgtaaggaccaatttcaaactgctattgagtcttaagatcgcataaagcgtaatagaccttggttccaaatataaatatcctcgtaaaagtgaaggagcacaaaattaaaaatgaccaaattgaggaaataaatattttgatgatctcttgaaaagagagaatgatctctaaaagagacataaccatgacaaatgaaacattcaagtacttgacaatgaagagatctagctagctatgtcatgtcaaaatataatggaatcaaatgcaaatcgacgtcgtaatatatttgcatgctatgagcagttgatattatg

SEQ ID NO: 275 - DNA, 1602 bp, Unknown
  misc_feature (1)..( 1602): cDNA_ID_1686020_gDNA_ID_99880_Annot_ID_147392 3000 nt of promoter
tttaaaaactgaaataaaaatatataaattgagataacttacttgtttcaagaggtgaaataaacataggcaaagatgtaggatcttttgatgttgctttccaaacaacaactacacgaacaggaaatgaaaaattagacgatgatgaataacacgaagcacaaagattagtatacaaatataattacgtgaacattattgaagaaaaaataattgtcttatttttgagttatggagggcacataaattacatgttggtaactatttgttatatgttgattagcacaatagctaggaaaaccaaaacatgtagtcgattaaactaaccttgcgtaaacaactcatcatcaattggcaaagatctatgagattttattttccatggaccataacataaaaaggagaaaagaaaaccgatgacgatgcatcatagaaaggtccaagattgaagtaaaaaaagaactataaaccataattattacatatcatgcataaaaatcaagccgtgatgtttgagtttcaagggagaaatcctatatttatagaaattttcaacataaggttttagggttttagatatgacggcataaattatacggacataatttttttaatagaaaaatataagtccaataggcgaataagagaattaggattgatagacgaattaggggtgattagagttgattagggttaataggcgaattaagattgatacgcaaattagagttgttatttgtaaaacagaaaagattacattacattttttacacattttttttacatattaaaatatggaaatctcattaatgtaaaatataatcttattaattaataattaataattaaagggggcaaaaacgtccgttaatattctgagagcaaacgtgagcactttgatatataagataaagtttatttatttcccaaatgttacgaaaaattaattccgtcatctttttgttaacaaaagtttatcgatatgcttaaaatgatccaatcatcgaaatttaagtatttttttataaagtcaaattaaattttaaaattttaataatatttcaaaattatatactttttcatcttaaatttaaaaatttgtgatttgtttgacattttttcccaataaaatatagtttcaatttttctattttgctaagatagcaatgtctgtttataatacaaatttggatgtataataaatattttgtctcacaactaacacgttgaaaatcgaccactacttggtacgaaaatagcaaaataaattaatttggggcttttcttaaagaaaattattttatatttttctttaattttgtgtttgtgtcgtccttctatctctaagaagcactacccctcccgcaattgaaggttctcttcgtcgctcacatccaatctctatcgatctcagattccaatttctgcgaatattttcttcccagagagattacagattctagggtttcgaatagttctttccaatctagtcttcttccttttgtttctcgggcgaaatttcccttagggtttcgaagatccgaatctgtggacggagacaattcgacgtcttcttgagctgcaaagatgttctggcgaatg

SEQ ID NO: 276 - DNA, 878 bp, Unknown
  misc_feature (1)..( 878): cDNA_ID_4254334_gDNA_ID_99881_Annot_ID_147394 3000 nt of promoter
aatgggaccctttgattcgattcggttctctcggcctatatataaaccactcagactctgacacttgtcataaaacccaatcctcaagttggtggaattgagttttgtgccgtttatgtcacaaacaaactcacgatactctttaaatgagaaaaaaggagagaatctgatatcataattgaagcttatctagtcagtgtgtgaaatatcacgagtgaatatgaagtgacaaactgtaaatctaattttacagtttaacttttaaattttgtcaactatcttaaaatttataactgttgtacacgattttaaaatatcattacgtgcacgagaacaaatatgacttctttaaattccaacaaatttaaatactgacgcaaccaagggaaaaaagatacataaactttttaatttatcgactatttccacaatctataatttaagaatcgttacgtgatttttcgttgtcgacgtcacatgatttatatttagataattcattatgtgtacacataagcatgactacttcttcaaacaaacacaaaggcaaatacaatgtacggacgcaactaacaaaaaataaaataaagatgtgaggttataatttggtcttgagtcttctttaattttattaaatttaaaattaatactacatagtatcattataattatgagttcttcaatgaaataagattactaaggggaaattaaattaaattattaaaaaaaagagtatttaatttggtgaaaaataaaaaataaaaacgtgaaaaagagggactcatgggataaataaaaaggaaggaagagatctccgtcacacacacataaacactccacacgctctgcttcgtccaatcaccaaacacgctttaatg

SEQ ID NO: 277 - DNA, 17 bp, Unknown
  misc_feature (1)..( 17): cDNA_ID_2990236_gDNA_ID_1563305_Annot_ID_147435 3000 nt of promoter + ATG
acttgaaattcgaaatg

SEQ ID NO: 278 - DNA, 341 bp, Unknown
  misc_feature (1)..( 341): cDNA_ID_3051331_gDNA_ID_1563306_Annot_ID_147438 3000 nt of promoter + ATG
atatatatatcattcaggtttgtagcaactgctcatcatgtaaactgtgtttggatatgatacacacaaatagaaattacaagtttcatcttttggttatgtttcgtcttccggtttagtttggtttatctggattaaaccggtctcatcttcatcgtaaagaaagaaagtagaagcaaagcttgaagcttttggatttctaatgtgtgtgaatcgtgatgttgtcatcaggacagatgatgggccatgtcgtggcccgaactcagatgatcttgtctcgaagtaacttcgccgattgtatacggtgtcagggcgtgagagtttcaaaaaccctaaaaatg

SEQ ID NO: 279 - DNA, 3 bp, Unknown
  misc_feature (1)..( 3): cDNA_ID_3051342_gDNA_ID_1563308_Annot_ID_147441 3000 nt of promoter + ATG
gac

SEQ ID NO: 280 - DNA, 3 bp, Unknown
  misc_feature (1)..( 3): cDNA_ID_1816391_gDNA_ID_1563325_Annot_ID_147471 3000 nt of promoter + ATG
gaa

SEQ ID NO: 281 - DNA, 503 bp, Unknown
  misc_feature (1)..( 503): cDNA_ID_1663334_gDNA_ID_1563335_Annot_ID_147489 3000 nt of promoter + ATG
ttatactaagatactaatgaaaaatcctatcaagaaaatgaagaagatcataaaaacaaaattatcggatttgaagagaataaattttgacccaaaaaaaaaaagataattaaaataaaataaaaacaagaattggccaactgtgagaacatcatcaatgaagaccaattgcgagatccgacaacaccgcttcttttgatttcgatcttactttcctgggtatgtctcaattcttcttcctccttcagttcgtgttctgtgtctgattgattactctcacaaaactcatcttttcattgtctaaaggtctaatctttagctataactcaaaatctgtatctaagttctgacaagtttctgttaccaaattcaatttttttgatacatatgttcatttctcagaacaggagatgtcaattttggcgatggttttcgtaacataaacatgagatttgattgttctgtgcagatctcatagttaatctggtttgagtctagaaatg

SEQ ID NO: 282 - DNA, 307 bp, Unknown
  misc_feature (1)..( 307): cDNA_ID_3440503_gDNA_ID_1563342_Annot_ID_147509 3000 nt of promoter + ATG
ctgaatcataaggtctatatataaagaatgtttcatggtacatattgaacaatttggttggctcctatgatttgctataaatttaaagtctcattgcatatatatatattttggttattagtaagaaattacgaatatatacagggatatactaaacgacgccgcttcagcattcatttggaagcaaagcaaatttgaccttttcaataattcgtattcacataagagtgaacttcgtccttcttcaccatcgccactctgctccgttctacatttagaagagactgaccaaaatctcccattaatg

SEQ ID NO: 283 - DNA, 3 bp, Unknown
  misc_feature (1)..( 3): cDNA_ID_3051454_gDNA_ID_1563348_Annot_ID_147518 3000 nt of promoter + ATG
tct

SEQ ID NO: 284 - DNA, 3 bp, Unknown
  misc_feature (1)..( 3): cDNA_ID_3051473_gDNA_ID_1563352_Annot_ID_147524 3000 nt of promoter + ATG
gtc

SEQ ID NO: 285 - DNA, 732 bp, Unknown
  misc_feature (1)..( 732): cDNA_ID_3051510_gDNA_ID_1563361_Annot_ID_147542 3000 nt of promoter + ATG
tatatatatatatatatacggttttaatagttaccgatcacaaaaactattaaaattaatagtatgaaaatattatcaccacgatttttgtattactaattttattgctcttaattattttgtcatcttttatcgttatttttccattaaaaataaatacggctttgtgtcacgaataagaaaacatattttttagtaaaacaaattcgactaaaataaaaaggaaaatgttttgatcacttttttatattgtattacaggaaataaccaatgatagataataatatattattcaattgtcatcatttcttagttgacaaaaaaaaatctatacatgtttccgagacgttaaaagtatttacaaaactactccaacaattcacatttgttttataacaaatagggacaaaaatgatcattttaagcttattgaataactatgatcgtttatttttgtcaaacaaatggatggtttatttaattaagtcaagtcataagaaaaaattaatagtaagtgtgtaagaaaataattaaaaagtcacaaatggtcccatacgtgtgattcggcacgatacttcctaaaagcataccactaggctctctcctatataacttcatctccaccaacgatgcattttcgtcctcagatctcatctcactcacaagagagagatagagagagaaaaaggctctgctttctacattatttacgattatacactttccaacatg

SEQ ID NO: 286 - DNA, 513 bp, Unknown
  misc_feature (1)..( 513): cDNA_ID_2126653_gDNA_ID_1563366_Annot_ID_147550 3000 nt of promoter + ATG
  misc_feature (50)..(50): n is a, c, g, or t
  misc_feature (52)..(52): n is a, c, g, or t
  misc_feature (61)..(61): n is a, c, g, or t
  misc_feature (63)..(63): n is a, c, g, or t
  misc_feature (70)..(70): n is a, c, g, or t
  misc_feature (73)..(73): n is a, c, g, or t
  misc_feature (82)..(82): n is a, c, g, or t
  misc_feature (85)..(85): n is a, c, g, or t
  misc_feature (91)..(91): n is a, c, g, or t
  misc_feature (93)..(93): n is a, c, g, or t
  misc_feature (98)..(98): n is a, c, g, or t
  misc_feature (100)..(100): n is a, c, g, or t
  misc_feature (105)..(105): n is a, c, g, or t
  misc_feature (108)..(108): n is a, c, g, or t
  misc_feature (130)..(130): n is a, c, g, or t
  misc_feature (132)..(132): n is a, c, g, or t
  misc_feature (145)..(145): n is a, c, g, or t
  misc_feature (154)..(154): n is a, c, g, or t
  misc_feature (157)..(157): n is a, c, g, or t
aaaaatgcttaaatttataaatgttctgatcttcgcaatacttaaaaagncnctttttcangnttatgcnacntaaaatttnacngcaaancnatatntntaatntcncaacgggttaatacttaatacngnaacaaatcaaatncaaccattntcncaaattatatcatttttgatcttatgatattagttaccaaaaaaaaaaatagttagtccaacattaattactccatattactctaatatctttaccaatcacacccataagtattcgtaataattcattaccaaaacattatacttacagtaccatactttctatactttatcgttattaaaataacttttctacaaagactatatagaaaagatatctttatctttttatatcttttctacaagtacttttatctttatatacacttcttctatataaaggtcacggagagtattttaagattctcactttctctctaccaccaaacctcccacaccaccgtcaccggagctatg

SEQ ID NO: 287 - DNA, 257 bp, Unknown
  misc_feature (1)..( 257): cDNA_ID_3051561_gDNA_ID_1563381_Annot_ID_147576 3000 nt of promoter + ATG
taattttccctcatctctttgtctataaaaccggaaaccaaacctacggattctctcctactccacataagttacatctctcgtgttttgttttctttgtctccgatttttttcgcgacgaagaagaagacgagagatagagagagaagtagagaaatcgaaggaatctgtaaccgattttaagatctcaatttttagggttgttgatttttcaatttctgggttaattttttttagggttttcatttggaatcatg

SEQ ID NO: 288 - DNA, 3 bp, Unknown
  misc_feature (1)..( 3): cDNA_ID_2034901_gDNA_ID_1563385_Annot_ID_147584 3000 nt of promoter + ATG
gga

SEQ ID NO: 289 - DNA, 1032 bp, Unknown
  misc_feature (1)..( 1032): cDNA_ID_2182651_gDNA_ID_1563395_Annot_ID_147600 3000 nt of promoter + ATG
  misc_feature (9)..(9): n is a, c, g, or t
  misc_feature (385)..(385): n is a, c, g, or t
  misc_feature (395)..(395): n is a, c, g, or t
  misc_feature (760)..(760): n is a, c, g, or t
  misc_feature (785)..(785): n is a, c, g, or t
  misc_feature (843)..(844): n is a, c, g, or t
  misc_feature (981)..(981): n is a, c, g, or t
  misc_feature (996)..(996): n is a, c, g, or t
gatgctccnccggttaagtcagacatatccgtctgaattatacgttgtgtgaatgcgaatctcaaataatttgttcaatcattcagttagtatcttactttattactcggttaattattaaccataaataaaaataatgggagatagtgataatgacacaacgttaaaagatctaagtagttaagtagtttagatttgataatataatgggaagttagagataaccggtaaattagctatagtcggtcggttagcattccggttaacccatcaatggctcgtattcacactagtcgcgcgactaactaatagagaaaaagcttttgcgtgtttgttgttgtctccatcgctcgtttgtttcttcttcagccatatcggaaaaaancgatatccgnacgagccattcggtgtttgttccgagaagctccgatcgatctgtgttagggtttttctttttccgccttatgaatctctctatcgcggtttcattagattcagtttaactcgagtgatgaaaccaatctccgtgctagaggtaaaattctgttaggttttctcttttttgtttttatgcttcgtaccgatcgatatgattcctggttcgttttgtttccaaatctgcagctctttgatcccgtggctggtaggatattacggcgtttgtagctctggtatggcttttgttgttcgtttggttctgattttcgaaaattttcgaatttttaatcggaatctgatactagttcatcgttttattttnacagtcgtcgtggatagagttagancgacgaaatcagccttggtttcctaactggtatttgttctttagcctatgttttcaanntttctcttccggttttttggtggtttgtgaaactacttaatcttcttgattacctaattaatcatatcattgtttacatcatttattttgatatttgtagttatttggcatttcagtatctgaatttttgcaacaantgtctgagctaaaangagcgcctgcttcctccaagacctgcttcagctatg

SEQ ID NO: 290 - DNA, 1036 bp, Unknown
  misc_feature (1)..( 1036): cDNA_ID_3409571_gDNA_ID_1563398_Annot_ID_147606 3000 nt of promoter + ATG
  misc_feature (51)..(51): n is a, c, g, or t
  misc_feature (53)..(53): n is a, c, g, or t
  misc_feature (68)..(68): n is a, c, g, or t
  misc_feature (78)..(78): n is a, c, g, or t
ttgtaagttatagcttttaaataagtatttaataccgatttgatccgacancntctccgggttatacncaataaaacnaatttataaatcttaaatatctggtatcaattatcagttcttatttacggaccaaatttcacgctaaaatgaaaatttactattgataaattcgtggagaagatcaaatcagaagttaagaacaatgacaagactcatttagattcactgctttatgtattttgttagctatgtcttttgaaatcgaaatggaagaagagtctattgagaagatgtatcaaatgatggcggaaattttaatcgttgttgatcctacatcaaaatcctagaatttgattattttttccaattcacaacgacattcttttgttaatctgaaaacacaacacacttaaggtatataaactaaaacgtttgggtaaatctcgatgaagattatgagataaaaatggttatgtacctcctttaaaagcaaagatctaaaaccaacatttactctaataaaaattcagataataattgtaaaagtaacagaatgtactttcctaacatgtatacaaccggatatccatcattgtctgaaatggacacataccctcgaaagtctaaattagttatcactggttacttctctatttgtgtctaacgaataaagtccttagttgacttattatgtgttccaagtttatgggctttatagtggcccatcacatagattccagatttcattttatttcctacctactaagatctgatctgattttaatgctcttgaccagtagtaatctttctcttttcgttgtttccttcttcttcagttcctccttcttcagttcctccttcttcaatctctcgtctcttactaacgttatttcttcaatctcattgatcaaaaaaaccaaaaccctaatctcaatttcctccaaaagtttcagtttttaaaaatgggttttcttcttttgtaacgaaaaatgtgtcaaactttgaattgaccatttttttttatcaggattcgatg

SEQ ID NO: 291 - DNA, 529 bp, Unknown
  misc_feature (1)..( 529): cDNA_ID_1009988_gDNA_ID_1563421_Annot_ID_147652 3000 nt of promoter + ATG
  misc_feature (256)..(256): n is a, c, g, or t
ctcagactatagagttgtttgttttcttgggcgtcaatataacaaacgagaatgacaaatggttttaaagctgttgatgtttcatacacagacaaaatggatcaattatgaagaaccacgataaagtgatgggtataattggggaagcagaagaaattcttgacgaagcatggggttgtcttcagaaaatgaatggatcaagtcaaggtacacatgctccagggataaggcaaggttaggaattaggacacatctncacttactaaaaaagagataaaaaaaaattataaagggaacgttataaatatgttgtaaagtcaacatctgtttccttctagactcttcgcatttacatcacactgccgaccatataaaacggcaaagttcgtcgtcgttttatcacaagaccatcaacaccataaggctataaatccaagctaaaaggtagtgattaactccacaaaaccagaaaaaactacatttctaacatatagaagaaacagagaaaaagagagagagacccctaatg

SEQ ID NO: 292 - DNA, 133 bp, Unknown
  misc_feature (1)..( 133): cDNA_ID_3051713_gDNA_ID_1563432_Annot_ID_147668 3000 nt of promoter + ATG
  misc_feature (127)..(127): n is a, c, g, or t
ctcaattaaatgggccacaaaaagcccatttaaagaacgtcacgtgacgcgatataagcatgatccgaggaacacacttaaaacaatcaggttccacatttggctttgcacaccttccttgatcctntcaatg

SEQ ID NO: 293 - DNA, 587 bp, Unknown
  misc_feature (1)..( 587): cDNA_ID_3013477_gDNA_ID_1563442_Annot_ID_147685 3000 nt of promoter + ATG
caagatatgtagaaaaaatgagcataccaacccaagtgatgaattatatgatttcatcaccataagaaaaaatgttcaaaaacatgaatatgtggattaattcagtaattatacaaatataaaatcttcaaaaatatcactgagctaccgacatggtcactaacatatgtggatctcaaacgttcaaaacctaatcctatcttacgtaactttcaaaacctaattattacgtaaaaacttatcacttttaactttatatatatgcagcttagatatcaatatcatgaagatcttttattttagtcaaaatagccttaaaaataataaaatcaaatatttgcgtcacgacaaaaaaataaacaaaattttcttgtttttcttggtaaacatcaataaactaatcaaatgacaataacacactacccaatagcaaaatcagactgtactgacacgtgtcaaagcatgtgcagagatatgtaaacccattatgtcttcatcacctcttctttaacgcctctggctctgcatttctcagtctttttgcacaagaaacaaagctcaggaaaacctcaaaaccctaagctatg

SEQ ID NO: 294 - DNA, 185 bp, Unknown
  misc_feature (1)..( 185): cDNA_ID_1450557_gDNA_ID_1563471_Annot_ID_147744 3000 nt of promoter + ATG
tcacaaatttcccaagaaaacactcacatatatgatgctatatatagaatgatagtctcatctaattctctctctccctcggattcgttagatgtgatcattttttcttgatttttgatcagattcttgcgtatagctgtatatatacaccaagatacactcatcatcgtcatatatagattatg

SEQ ID NO: 295 - DNA, 3 bp, Unknown
  misc_feature (1)..( 3): cDNA_ID_3051821_gDNA_ID_1563472_Annot_ID_147745 3000 nt of promoter + ATG
gag

SEQ ID NO: 296 - DNA, 17 bp, Unknown
  misc_feature (1)..( 17): cDNA_ID_3051925_gDNA_ID_1563505_Annot_ID_147808 3000 nt of promoter + ATG
aaaaaaaaaaaaaaatg

SEQ ID NO: 297 - DNA, 260 bp, Unknown
  misc_feature (1)..( 260): cDNA_ID_1375747_gDNA_ID_1563531_Annot_ID_147851 3000 nt of promoter + ATG
ttccatacgataaagttgaattaacatgtcaaacaaaagagatgagtggtcctatacatagttaggaattaggaacctctaaattaaatgagtacaaccaccaactactccttccctctataatctatcgcattcacaccacataacatatacgtacctactctatataacactcactccccaaactctcttcatcatccatcactacacacatctcctattgcaaacgaacataaaacactacctaagagatcaatatg

SEQ ID NO: 298 - DNA, 246 bp, Unknown
  misc_feature (1)..( 246): cDNA_ID_3052021_gDNA_ID_1563537_Annot_ID_147861 3000 nt of promoter + ATG
tacaattttgtttttgttgcttagtgaatttacattttagacttttttttttgtcaaatacattttagactaaatggtgttttcttttgaaaaaatcatatagtttaggtcgaaccgcgaactcgagagagagaaaagaaaaaaggaagaaaggataacacaaaacctctctctatctctctcgtcttccaaaaatcgagcactacacattgactctcttctacaaagagtctggtcacactcatg

SEQ ID NO: 299 - DNA, 32 bp, Unknown
  misc_feature (1)..( 32): cDNA_ID_3052024_gDNA_ID_1563538_Annot_ID_147863 3000 nt of promoter + ATG
tcgatctaaccaccgccgatgaatcgccgatg

SEQ ID NO: 300 - DNA, 21 bp, Unknown
  misc_feature (1)..( 21): cDNA_ID_3052036_gDNA_ID_1563541_Annot_ID_147868 3000 nt of promoter + ATG
caaacattaaaaagatagatg

SEQ ID NO: 301 - DNA, 973 bp, Unknown
  misc_feature (1)..( 973): cDNA_ID_3052046_gDNA_ID_1563544_Annot_ID_147874 3000 nt of promoter + ATG
tcaaaaaaatcattaattgtaaaaatagcataaaaagttttaactttatctcgagtaaaataatgtgctaattttcattaactttttattttaatcatatttttaattgacttcgtatttttaatcgcccattttgttgactttacccaatatgtcacgtagttaagttgactaacaaaacaaatttttagagttaaatttccgttgagatgttatgttaaactacacaaaaaaacatcgtttaactaacaagtaaaacttaaaatgaaattcaatcttcttactacttagataaacccatggatacgtcaatggtgacatacaaaaagtgtatagtagagagtaactcaattatattatagtgatttagcctaagtttttaattctagaaaatttaaaaattttaatgattaaaacaactataagtttttaatatattggatgtatattattacaaacaataatatataagataacttgtacatgattcaccaaaatagtctagttgaaacaactataatttgaagttaaataggctaagttgaaacaactataattttgagattcaactattcttgggttacggatttttacattcttattaaaatattgtgttattggtttggggggttttaaatttcctcaaatgaatatcttcttatacgaaaagattagttttctttgtaattttattaaaatgatgattatatttagatgtggtcatgtggatgaaccaccaccagtgcaccaaaaacagaaaacgacgcctaccaacttgatgggcttttaatagatatagttagttaggcccagtttagtgttaatacgataccgtttgacgtagtttaacggccaccgacacgaacgaatccaaaacggcaccgcgtcaatcgcatccaaagctctgatgtaagaaactctacacttgttcgagtttcccacgacggagaaaagaaacgatgaggaagagatg

SEQ ID NO: 302 - DNA, 435 bp, Unknown
  misc_feature (1)..( 435): cDNA_ID_1448005_gDNA_ID_1563549_Annot_ID_147883 3000 nt of promoter + ATG
  misc_feature (5)..(5): n is a, c, g, or t
  misc_feature (11)..(11): n is a, c, g, or t
  misc_feature (60)..(60): n is a, c, g, or t
  misc_feature (64)..(64): n is a, c, g, or t
  misc_feature (119)..(120): n is a, c, g, or t
  misc_feature (134)..(135): n is a, c, g, or t
  misc_feature (146)..(146): n is a, c, g, or t
  misc_feature (152)..(152): n is a, c, g, or t
  misc_feature (243)..(243): n is a, c, g, or t
  misc_feature (396)..(396): n is a, c, g, or t
gaatnggtggngaattgcaagctggattcctaattagagaggattttttgtactaatggngtgntgcagctggattcctattttgaggacttaagtgtctattatcatcaaaaacaaanncaaaagtcttaatnnctactattagnttaatncaaaacttaagtacactcctttcgtccgaacatagccaaaacaaaagttgccactttaagttcctttgaccactgtcggcacgagaatcgnttgacttctttctcatatgggctttaaattagcccatctctataattttacttttgttgagggttttataagcccattaagtttcggcccactcttgacgttaatctgacgtcagcttgatttttccggcggatttctcaaatcgacaaattncgttttcatcggttgtttcagacgtaatttccaaaaatg

SEQ ID NO: 303 - DNA, 735 bp, Unknown
  misc_feature (1)..( 735): cDNA_ID_1397552_gDNA_ID_1563550_Annot_ID_147884 3000 nt of promoter + ATG
tgtaaaaatgattcactcactcgtatgggtgggttgggttttctcttcatgagatgctcatttgagcaagcaatgtttggaagtgggactatttaatatcatgtatgagttttatcttttgttataagaaaaaaagttgggatttcattttcgtgcccacttcacgtgaatctaatgccttcaagtttgtggtctaccttattttctcttatggatacatgtcaatttacgtgtcgtatgagtcaagcctttaatcatcccaacaccatgcacgtcttctagatttgttttcgaccacgattccaccacaaaatttgacattgttattgaattcattaacttttttacgtgttattgtgaaatatttatttaattttgttggtaaaaggagcaaaaaagattagggtacaacacgtcgacttcttccccaattagacccatatgtgatctgtcgtcactcgtcgccaagtttttttatgtgtcgtcttttaaactttgatccaattcattaaaaagtcttaacgcccacaacgaaaaggaacttctctttttgtttggtgactgaatcggtggaaaacaacacaagtttgttcctttttgtctctccagatcccttggcttccttcttcttcttcatcctcctcgtgagactctgtgttgaaatttctctagggttttaattatcggcgttggtttttcgtttttgagaatttgatttcgtttttagaaataatg

SEQ ID NO: 304 - DNA, 3 bp, Unknown
  misc_feature (1)..( 3): cDNA_ID_3052078_gDNA_ID_1563559_Annot_ID_147899 3000 nt of promoter + ATG
aca

SEQ ID NO: 305 - DNA, 370 bp, Unknown
  misc_feature (1)..( 370): cDNA_ID_3052084_gDNA_ID_1563561_Annot_ID_147903 3000 nt of promoter + ATG
  misc_feature (27)..(27): n is a, c, g, or t
aattgtagatccataagatgcattatntctcgaaatatattatttagttttaaaactaataaaaacagataaatatctcccgttatatagtattttgtgcaatatataatgttctttaatgaaaaatttgatgatgttatagataaataatgggaaataaaaagtattcaaatttcggattaaaaaatccatcgaaccgtccaccatcttgcatgtccatcattcccatttatttgtaatagaaaagtataccaacttgaaatattaaataccaaattttttgttataaatagtcccacagttttctcatccctccagaaaaacaaatcatcccaagtaatcctaactatacaaaacacataacaatatg

SEQ ID NO: 306 - DNA, 420 bp, Unknown
  misc_feature (1)..( 420): cDNA_ID_3030375_gDNA_ID_1563583_Annot_ID_147943 3000 nt of promoter + ATG
  misc_feature (197)..(197): n is a, c, g, or t
  misc_feature (258)..(258): n is a, c, g, or t
  misc_feature (264)..(264): n is a, c, g, or t
  misc_feature (268)..(268): n is a, c, g, or t
  misc_feature (275)..(275): n is a, c, g, or t
  misc_feature (286)..(286): n is a, c, g, or t
  misc_feature (304)..(304): n is a, c, g, or t
  misc_feature (307)..(307): n is a, c, g, or t
tttgaattttcaatattgatttctcccatggcgagtagcagttgcagcagatctatctctgtttcaaattctgattctctcggtgttttttgtttgagctagggctaaattagtttccttcttgggtttttattcgtaatccgattcaaagtttgtatctttgggagggatgggtaaaaggcaaatatcccaagatnaagtaggtccgcccataaaaccaaaagctggtttacgaagggaacaagctggaaaaggttnttacanaggnagttagntactttgtatntcatcgaaaacgaatcanaanaagcttctttttttttttattagaggttggggaggagatagtataaaacaactgtttagagttctgatttgtggtttttgagtcgggggttttgaggtttaccctttagaatg

SEQ ID NO: 307 - DNA, 185 bp, Unknown
  misc_feature (1)..( 185): cDNA_ID_3052173_gDNA_ID_1563592_Annot_ID_147957 3000 nt of promoter + ATG
ccagatccatcgtcatcatccatccaatcaaattgactcatcgtgttgtgacctcccagtgattaagccgcgactcctcctaactcgtaatccctcacgtctctgagaattctgagtttcttcagtttcattgcaattcaattcccgatctgatccgttcctgcttagatcggagcaaaacaatg

SEQ ID NO: 308 - DNA, 577 bp, Unknown
  misc_feature (1)..( 577): cDNA_ID_3052265_gDNA_ID_1563621_Annot_ID_148009 3000 nt of promoter + ATG
  misc_feature (14)..(14): n is a, c, g, or t
  misc_feature (107)..(107): n is a, c, g, or t
tatgaaattgattnactttttgaaaacatttttggtgcaattcaacaatatttgtttcacagttcttattttatttttgtagattaaaaagcttaaatttcaaaaancaagaaaatcttgttttcacaaaaattaggcaaagggtttccaatttccagattgtttaacttgattttcaatttccaatttccgaatcttgcaacttgatttctataatgataagttatctccaaatatgttttcttaaaagagaaaactcgatttgacttcaagttgagatcatatccattattattctctatattacgtacaagttatattttttataactctagaggaatgttagagcttgtgttaatggaattccaagtcagatatgaatattctcttataatcatttttgtccttataactgttttttttcccgggaaaacgaatctcagaaaccgaatttcctactttgacattattttatctccctcttgctctttgatttaatgcaactatctgaaactctatgaatttatcattttcagagttcaagatcatatgatattttcactttctggacaaaatg

SEQ ID NO: 309 - DNA, 868 bp, Unknown
  misc_feature (1)..( 868): cDNA_ID_3052285_gDNA_ID_1563627_Annot_ID_148020 3000 nt of promoter + ATG
tcaacaatgtaaacggcaagccaaagatccttcataggtaaggtgagattacaagcgccgttgtaaatcgaatgtcgacaagcatgccggttagccacatccgccggtaacatgagaatagagatcatagcaatggataaaccaaaaacaacaacgaatttggggaaataagcctggtttgcatcatctggatgctgatagttgacgaggaggtagatactggagatgaaaacaatgacgcaaactacgatcgcaacaatcacgagagcgagattgaaatctcccatcgcgtgcaatgtacgagatcccaaacctcagcttagattgagaaaaattagggtttcttgaagcttcgaaatttgaaattcaatttggggattatttatttttgtagatctggttttttttttccgtatgtcgaaaaccagactggaatgagaaacgaagactgcgtccaggtatgtgactcgctacggttatttacggataagccctcacttaaatgtcatatttacgaatataccgtagctgatgacagatgggaatgagggtgttacagtaattgcgtaaaacgagaccagaccagcctgtcctaactccaaaccaaaaagagattcttcgaaaatgttttttatctttaaatttctattaagataagaaaataaatgttttactttttccaaagtcgtcgtctctctccaagttttgtgaatccaccgttcaacgtgacgatgaagaaagagaagaagccgacccgtcgttcaaatcatccttcgttcctcaacaacattaaccccaaacctaaggttagggttttacctttatctcttcaatttcttcattcctctcatcgattcgcgacaacatg

SEQ ID NO: 310 - DNA, 3 bp, Unknown
  misc_feature (1)..( 3): cDNA_ID_1017964_gDNA_ID_1563633_Annot_ID_148028 3000 nt of promoter + ATG
  misc_feature (1)..(1): n is a, c, g, or t
nct

SEQ ID NO: 311 - DNA, 119 bp, Unknown
  misc_feature (1)..( 119): cDNA_ID_1580388_gDNA_ID_1563642_Annot_ID_148043 3000 nt of promoter + ATG
  misc_feature (28)..(29): n is a, c, g, or t
  misc_feature (36)..(40): n is a, c, g, or t
acttagatcagtctcaaagggggaaaannaacttannnnntagaacattaagaggcaacacaaatcacacaaaagatcaaattgaagcctaagaagaaggcaaaaagtgagaagcaatg

SEQ ID NO: 312 - DNA, 400 bp, Unknown
  misc_feature (1)..( 400): cDNA_ID_3052377_gDNA_ID_1563667_Annot_ID_148086 3000 nt of promoter + ATG
  misc_feature (31)..(31): n is a, c, g, or t
  misc_feature (68)..(68): n is a, c, g, or t
ccagaaaccctagagttgcttccgcttcgcntctcgtctcctcttatcagtcttctcttttcacggcnacaaggttagtcctaagtttcggcctctgttcttgcatcagtgattggatctctactgccttttaatcaaatctcattgaattgatctgggttagggtttgggtcaggttatcgaatctttctgtgttattttgattctatgaaatgaatttagggtttgggcaagttttttctggtctatgtagcttccatctttgtctgagatatctgattgggtcttttggattctggtgatctctgtaacgaaatcgattctctgtgttttttttcaggctaattgagagtgtcccttgcgttagagtttcttactagcttttttcgtctgaaacatg

SEQ ID NO: 313 - DNA, 14 bp, Unknown
  misc_feature (1)..( 14): cDNA_ID_2990879_gDNA_ID_1563705_Annot_ID_148157 3000 nt of promoter + ATG
attgaaggcacatg

SEQ ID NO: 314 - DNA, 739 bp, Unknown
  misc_feature (1)..( 739): cDNA_ID_1568384_gDNA_ID_1563707_Annot_ID_148160 3000 nt of promoter + ATG
  misc_feature (310)..(310): n is a, c, g, or t
tacaattttcctttgaaagagccgccagaaatttcaatctcactcccatcggaatcacagatcctccgtttctagtttaaagcaccaggttgcttgatctgcgatacaatcttgaccgtccattttacttgttcgtcaagattttattttaaatgttttaatgggctgggcttttgtagccttgaaatatgcccatatagacgagacggacaaactttttatggataatttaggtttttgttcaccaatcataatttttggtatgcaatgtttttttttctttttttttagcaataattattatttttgngtgaagcaataataatttgtttgcttgaaacgataagatttatatatatattcgctctaaaaatagaataaacttcagcaatcagattaatccgaatcaattccgttggtgttacagttattctacactctctatagatcccaacctctttcttttaaatatttatatacatctctctttttttgggaatttttttactagattccaaagtgaatgagtagcgaatacgacaactctcgttattagacagagatatataataatcgcgtaataattatttcctatttaaatatgataaactcatgtgtgtgcatatttactttttatttacttatgggatactcaccaatatttatttgatacgaaccataaccttcactaagttttctttctctagcctccctcatctttctctctctgtcggcgatg

SEQ ID NO: 315 - DNA, 221 bp, Unknown
  misc_feature (1)..( 221): cDNA_ID_2142375_gDNA_ID_1563722_Annot_ID_148187 3000 nt of promoter + ATG
  misc_feature (6)..(7): n is a, c, g, or t
ccttgnntccagatctctctctcctcttattcttctcattttagatcttcttccatctgaaatcacgtttctcccatttgggatctgcttttttacttcaacatcaaagacattagttttctgctgtttgatctctgtgccctgtgtgtatgatcttactagggtttcaaggaatatgggtctttcccgttagctaaagataattaattttgtgtccgatg

SEQ ID NO: 316 - DNA, 696 bp, Unknown
  misc_feature (1)..( 696): cDNA_ID_3042012_gDNA_ID_1563726_Annot_ID_148193 3000 nt of
  misc_feature (125)..(125): n is a, c, g, or t
  misc_feature (292)..(292): n is a, c, g, or t
  misc_feature (380)..(380): n is a, c, g, or t
  misc_feature (693)..(693): n is a, c, g, or t
tttaccatccttgatctctctctttcaatgcatgtgcatgtgcatcagtatctgtttcacaactagttttctgattattgcagtttaaatggaggaatggttggttttattcactctcagagaangcgattgcggaagggcaaccggatccgtgtcccctccataccgaatggctgaaagagcttaaagtgatatagagccagtctttctaaattgtgagtatctggattaagtatcattcttacatattttaagtagatgatctgaaactagtgtcaactgtgtacacgcntgagaagtgaaaaaaagatgtaattttttaataaagaaagagaatcagttcacgctttgtaaaatgtccagacttttatgtgtaaacnttgtgcattttcaagaatcaaaacttttctgcttctagactcccatcaattagggaagactagaatcttcaataataaacaaattatgacagatacctatgtagactctttggaatcatcaatagttgacaaagtaagaggcaggatcgtccacgcttgtttgaattttcagcctttgcaggcaaggtggtccaagtaggcaactgtggtttcttcggttagttactatataacacataattctatattagctttagctttagcttcacataacataactcagttttctacaaagaaaaaaaaacagagcatnatg

SEQ ID NO: 317 - DNA, 71 bp, Unknown
  misc_feature (1)..( 71): cDNA_ID_3052577_gDNA_ID_1563735_Annot_ID_148207 3000 nt of promoter + ATG
  misc_feature (66)..(66): n is a, c, g, or t
  misc_feature (68)..(68): n is a, c, g, or t
aaatctgaaaatcggaaggaagaaaacaaaaacctttcaattgaagaacggagaaatcatcatccngnatg

SEQ ID NO: 318 - DNA, 60 bp, Unknown
  misc_feature (1)..( 60): cDNA_ID_3443592_gDNA_ID_1563741_Annot_ID_148218 3000 nt of promoter + ATG
taccggtaaaaggccgcgtaaacaaagaaagaagtaagctacctagataaaaccgccatg

SEQ ID NO: 319 - DNA, 323 bp, Unknown
  misc_feature (1)..( 323): cDNA_ID_3052635_gDNA_ID_1563754_Annot_ID_148241 3000 nt of promoter + ATG
tttcagggcgttagtgtttacagttcctctattctctaagtgaagatgaccaatacctgttggttacatcgaagctttacaattaccaaattagttcaaatcttgttacattgtgctcacgacctcacattttttccaagtaaataaagtgtcttactcaagaaaagaatttttcagagctttgaataagttcggtgaattccaagcctacaattcttgtcacacccagggattatgtttccatcctcttgtagtaaaaccattataatttgtctgctgtattcacctcatatttagtgatcaacatttttcttcagaacatg

SEQ ID NO: 320 - DNA, 519 bp, Unknown
  misc_feature (1)..( 519): cDNA_ID_3052666_gDNA_ID_1563768_Annot_ID_148263 3000 nt of promoter + ATG
  misc_feature (457)..(457): n is a, c, g, or t
aaaccgataatcaaagactaaaacagggattttcctcatttgtggtcatcactttttaaattttggtgtcatttctcatcttaatcaatttgtttttgagttttattcttctattagatcttttatacatcaaagaatagatgaagattccaccctaaaaccttatagtatgtcatttattcacaatatgttatacgtgttaattttctctcttttagtatactctttttttttctttcagattccatcccaagttgcttaaattttgttaaaaccaactaaattccatagttcaatttacaaatctgtgatcagatgctatctaaatgaatattaccattttagcccttaccttttctgaaatttaccacgtttacctcaatgaaccgtcatcgcaaaaccaaaaaccctttcctatccctaaaacccgagagagcatcttcttctcctcttaggntagaagaaggacgaaaatcggaggaggaagaagaagatcgattcgatttgtgatcaacgatg

SEQ ID NO: 321 - DNA, 179 bp, Unknown
  misc_feature (1)..( 179): cDNA_ID_3085115_gDNA_ID_1563769_Annot_ID_148265 3000 nt of promoter + ATG
  misc_feature (143)..(143): n is a, c, g, or t
gaagttttaaagaaagactagcaaaagtctgatatgtcaccgacgacttttgagaaaagagagaaagagattttgaaaggagcacatcttgaaatctcagatccaacttatttcttcttttttcttctgcttctttttctttntcttcttcttcttccctttcttcttatacaataatg

SEQ ID NO: 322 - DNA, 216 bp, Unknown
  misc_feature (1)..( 216): cDNA_ID_4362284_gDNA_ID_1563786_Annot_ID_148294 3000 nt of promoter + ATG
ctttgtagattgttttaactatggaatctcgtcgtggagtctaattcattattgagcttgaggattggttcggttgatggtcttttccaccgtttgaaagagttctttcagtttaacatctggtgttggatctagtcacctgtattgaaagtgggaagaaactaacttgtgcagccatagtcgcaaaggctgtgattttttgtctccacactcatg

SEQ ID NO: 323 - DNA, 124 bp, Unknown
  misc_feature (1)..( 124): cDNA_ID_1690084_gDNA_ID_1563797_Annot_ID_148312 3000 nt of promoter + ATG
aaagaagagtcacattcaagaatctctctcttctcctcctctcattctctcagcggcttcttcttcttcctttttctttcacatcacacaacacaaccactgtgatcttgatttgttaccaatg

SEQ ID NO: 324 - DNA, 1188 bp, Unknown
  misc_feature (1)..( 1188): cDNA_ID_2167783_gDNA_ID_1563829_Annot_ID_148366 3000 nt of promoter + ATG
atgtcagtgattagtgaataaggatcgcgggtcacatacataacggatacacaagatcaagctcgacaactaaacaatttctcatttggattaatcatgatcactcgtctctatttattgttgtgcgctgtggctttaaaattttaataatagatctaatacataaaaaatatagtgtcctctataaatcctgagtttcacaaaagtttaatttattaaaactgtatgagtgtgtttaaggggtctgcggaatcaccagtcacccattaatcatcaaatattcgctttgaattcaagtttattttacagtttactggcatctacagaagaaccgatcactcttgaatcatcaaaatttttgctttaaatttgagtctatattagcaataaataatttactgctagtattgaaaaagctaaggggtaaaagaagtatgtgcaaaacaatctgaaactttctaactaataaaaaatcttgaagacttgctatttttggaccatttccaattttcacttctatatttttattttattttaaaggtattgtactctaatggtcacctctaaaatagagttttctcaaaactaaaggaaaaaatagaaatgaattgtacaaatttctatttatagagacaaaaagtaaatatctctatttttttctatatttgagaaaattttatttttgactattgaagtacgatacctctaaaatagagttacttttataaataaaagaaaatatataaattattattggagatgcctaaaaaattatatgagacaaagtaaagtggagacaaaaaatataacgtttgatggtgctagagtctcttaaaatatattacttaaaaaaatccaagacttcatattaatagtttaagggtgttgatatatgggtattatctctcataccaaaaaaaaatcgatatttgtcctctccctctctctctcaccctatctataaatagcagccggctaccacatttgatcgacgagatgtgaatgaagcattcaacaaaaacatcacataaaataaacaaaggaatccacaaaaagaaaaaagcaaaaaaaaaagtttcctcttagagaaaaagagagagagagagtaacaaactcttgtcgtttcgttaaggtcaaggtgtcgttttgttctctctttctgtctctttaaacacacacaagaaaatg

SEQ ID NO: 325 - DNA, 32 bp, Unknown
  misc_feature (1)..( 32): cDNA_ID_2183387_gDNA_ID_1563836_Annot_ID_148378 3000 nt of promoter + ATG
cattcttaactttcaccttctacggaatgatg

SEQ ID NO: 326 - DNA, 41 bp, Unknown
  misc_feature (1)..( 41): cDNA_ID_1808991_gDNA_ID_1563839_Annot_ID_148384 3000 nt of promoter + ATG
  misc_feature (1)..(1): n is a, c, g, or t
ncttataggagtgagtattgttgcagatagataaggaaatg

SEQ ID NO: 327 - DNA, 603 bp, Unknown
  misc_feature (1)..( 603): cDNA_ID_3446177_gDNA_ID_1563858_Annot_ID_148416 3000 nt of promoter + ATG
  misc_feature (39)..(39): n is a, c, g, or t
aaaatattacatagataatatgtttcaataattcaaaancattagaaacagtattaaaaactaaggtaaatattttgataacaatttacttttgaaacagcaaaagaatttttaaaaatgaaatgggttttgattttaaattgtagaagcagaggacatatattaatcaaataaagagtagatcattcccttatcaagataaaacataaacatgcatgagttgatacttttctttatataatttttccctaaaaacaaattatatattcttttcttcttttgctagctattttcttaattgtgaaccaaattatatactatttcattgtatatcaatagtttctttaaccaaaaaaataaaaactgtctctatgtatatatgtaacataatcagaccaaccttaaagagagagagagagagagacatgttgactttccacaccaacgtgcgtccatgcaaatgagccctttctctttgccaaacgcacacgcagaaatcaacacatgcgtgtgcatataaagcttctgatcatacaaataaagatgcgtgtacaaaattataggtataggagcgagacacaagagaaatattaccaaaaaatg

SEQ ID NO: 328 - DNA, 3 bp, Unknown
  misc_feature (1)..( 3): cDNA_ID_2032973_gDNA_ID_1563882_Annot_ID_148455 3000 nt of promoter + ATG
atg

SEQ ID NO: 329 - DNA, 117 bp, Unknown
  misc_feature (1)..( 117): cDNA_ID_2702650_gDNA_ID_1563893_Annot_ID_148473 3000 nt of promoter + ATG
  misc_feature (3)..(3): n is a, c, g, or t
aantatggtctatacataattaatatacatgtacattgggtttcaattaagctctaattaactctttaaaattcaaatttttagggttttcaagaaatgatgaacgttaaaccaatg

SEQ ID NO: 330 - DNA, 268 bp, Unknown
  misc_feature (1)..( 268): cDNA_ID_3053090_gDNA_ID_1563924_Annot_ID_148524 3000 nt of promoter + ATG
catatgcttggcgttcttgttctatccagtggctcgtggctcgtcgttgctggctgcagtggggcttacgtctgagtcaagcatcaagtaccatatatggttggggcacttggtcatgatcatattcaccagccatggtctttgttactttatctattggatatccaagaatcaattagtctcaaaggtcactctttttcttttttacattattcgtcgatattgctctataattaatgcccttattaatcgttcgtgtaaatagatg

SEQ ID NO: 331 - DNA, 65 bp, Unknown
  misc_feature (1)..( 65): cDNA_ID_2052959_gDNA_ID_1563933_Annot_ID_148541 3000 nt of promoter + ATG
ggggagagggaaagcttcttccggatcctgactattcctcgcatatcgattaccgatggggcatg

SEQ ID NO: 332 - DNA, 3 bp, Unknown
  misc_feature (1)..( 3): cDNA_ID_2703300_gDNA_ID_1563948_Annot_ID_148567 3000 nt of promoter + ATG
aaa

SEQ ID NO: 333 - DNA, 1269 bp, Unknown
  misc_feature (1)..( 1269): cDNA_ID_1456083_gDNA_ID_1563953_Annot_ID_148574 3000 nt of promoter + ATG
taaaaaaaaaaaaaaacgattcatgggttcctcgaaccatagcatatccactagttctttattgggccgataataggggaactcttaaatcagcacatcaagcttcgtaggaagaaaatatgttttttgtggggcttaatctgttttatttcaaaacaaatcattctataacaaattttgatctcaaattcacgattaaataatatacacaagtttgagtcttatgaagtatatattttattgcaatgagccttaaataaaaagtcataatttgttgttttattatataacgttatactgaacaagcattccaaaaaggcctccgtagcatagtggtattgcgttcgcttcgtaagcgaaaggccgcgagttcgatcctcgccgggggcttcatttactcactcttttttaaacttccaaaaaaaatttactcactcttttttaaacttccaaaaaaagaaaaaaatcctttttatatctctttcttttttatgaaattagaatacaattcttcttagccacaactttccataactcaacaatatacataatcatcaaaaacaaacaattcaaggaaaacttccctccttaccataaataataatagtagtataattttagtgtaaaaatcttgaagaaagccctacaatacaaggctacaacaatcccaatttctcctcgtcggagatttctaagtaaaaccctagaactaaccattatatatattataatacaaatatattcatccctccctctccctgtgtcttactctgtcttctcttcgaactgatctgagatttttgattctgcttctcttctcatcttctcccaaggtatcgctttcgttcatagttcatacaccaattttcttactgttatcaattgtttgattgatatttgtagttcttcaatttgggtttcatgttctgtcttaaaagtcttttcctttctgttggaatcctctgtaaaagcttaatcttttcacattcttccaatatctagtagctgtatagagatctatgtagttctaacgtatattcaatttatagattctcaacttgcaagtcgcttaagtcaccaaataaatctcttgttaaagctataagagatctaatgagatttgtggattccttagtgttgatttgaatggcaatgtgagactaaaatcactacttgtggttcacccatatgagtatgttttaatttcgagacatttgtttgattatatatctgaccttagtgataatctcttgaatctaggtagagatg

SEQ ID NO: 334 - DNA, 1045 bp, Unknown
  misc_feature (1)..( 1045): cDNA_ID_3053192_gDNA_ID_1563965_Annot_ID_148598 3000 nt of promoter + ATG
  misc_feature (17)..(17): n is a, c, g, or t
  misc_feature (31)..(31): n is a, c, g, or t
  misc_feature (37)..(37): n is a, c, g, or t
  misc_feature (43)..(43): n is a, c, g, or t
  misc_feature (46)..(46): n is a, c, g, or t
  misc_feature (80)..(80): n is a, c, g, or t
  misc_feature (90)..(90): n is a, c, g, or t
  misc_feature (94)..(94): n is a, c, g, or t
  misc_feature (140)..(140): n is a, c, g, or t
  misc_feature (161)..(161): n is a, c, g, or t
tttaatgatataaaagnaccccctttaaatnaaaatnaatatnatnagatatattagtagaaaagaaaaatttaatgagnaaatataagntttnatagtaaaataataaagtaccataggtgattatttctctaaattgngattaaatgtttagatatacnaaaaaaaagttaagataatacataatgtttagatattgacatctgtattaagataaaaaaaaatctgtgctaatgttttaaagaaaatattctctatataacttccatataaacaaattatggttgtatgtctaaaattttgtactcttattttctatttaaagtgttaggtttctgaaaaggttttgtggtgagaagattcttaaacaactagtatattttatttagaataagttcgcgatgggttattggtcaaagcggtcacgacgaaatattcctgaaaagtagagtgacgaaataagtttttttttgttaattaaataagagttatgtcttttctatgttcttacgatactatatacgtgttttctattttgaaaaattttctagcaattcaattgaagtcgagttgaagatttggatgcattgtgaaaattgtgttaaagatgtcaaaaaagctatgtccaaatttgaaggtaaacgtatattatagtccacatttatgataacactatatcgatctcattcatggtagttggtacaatagcttaaggcttctacttagaattatattttttgaatccatatttatatttcatatttttggtgtaattgacactatataaaattctatgtatggttttactatctcaagttttacattatagttgcaaaattttaaaaaattttgttttatataatctttgtttttaaaatttgtgtgtttagtggagtttatatgcaaaaatataatattatgatgtgaacatttgtcacacagctttggaaatttatattgtttgaactgatcatatatattattgaggacaaccattttaaatgatatgtgattgctaggagttgaagcatgtaaaacagatatg

SEQ ID NO: 335 - DNA, 383 bp, Unknown
  misc_feature (1)..( 383): cDNA_ID_3436971_gDNA_ID_1563968_Annot_ID_148603 3000 nt of promoter + ATG
  misc_feature (73)..(73): n is a, c, g, or t
  misc_feature (150)..(150): n is a, c, g, or t
  misc_feature (175)..(175): n is a, c, g, or t
ttataaatatttttgttttttaaaaaaaaaggaaaactcgataatcttataatcgtttcttttgtatgtatgngaatacacaacaaaaagtgactttggtcttcgttggactattttgtggaaaagtcttatatcccagaagcccaaaanttgtaaaatccgaagtctatggccnaagtagagttctccacatctgacaaaacgacatcgttcgatggaactttacgaggcttcttttccctcacatcgtcctccgagccctcacttgacagaactcagaaatttgaaagagaaataaaagagagagaagctcccagagaagaaaagccctaaaagccccactcctctttccagtttcttttgatctctcagcatcgaaaatg

SEQ ID NO: 336 - DNA, 197 bp, Unknown
  misc_feature (1)..( 197): cDNA_ID_3029569_gDNA_ID_1564001_Annot_ID_148663 3000 nt of promoter + ATG
gtatacaaaattcagccctcgctttctattccattaatacattttttttaatccgtcatgttatgctaaaaaaatgaattctgggaaaacgatcagaatgaagtgagaagtgtatattgtgttatgtggttgctttacttttccattttactaaaaaaaattcttggaattgagcagtcaatgttgatgatgccatg

SEQ ID NO: 337 - DNA, 533 bp, Unknown
  misc_feature (1)..( 533): cDNA_ID_3053350_gDNA_ID_1564016_Annot_ID_148689 3000 nt of promoter + ATG
aaaaaaatttttatttaaaaagatatgattagaaaaacaaataatttgtgaaagcccttaaaaaaaaaaattgagagaatgtagaaattttcagataaaaagaataaataaaatttgcaaataaataaataatattaacaattttttaattcataaaatattatgattggctacagcttctctagctgcccaaactctgttttacaaaatcccaaaccaaacaagttatcattcatgatcgctttcgttatattcattctctcttttctctttccattttggctcccaccgacgtcatcaatctctaccggagacttccgccgattctcacaccgttcttcttctctccttccgattccggattccaatttcgttccttttttgttttctctcaaaacccctaaattttcttcctttcttcgatctggattttttgtgttccccaaatttcaagactttgatctgattccttctaagatttctccaaagcaaagatcttttttttgttttttgggatctctgtattgttgatg

SEQ ID NO: 338 - DNA, 19 bp, Unknown
  misc_feature (1)..( 19): cDNA_ID_3053452_gDNA_ID_1564051_Annot_ID_148755 3000 nt of promoter + ATG
catcggtttaccagcaatg

SEQ ID NO: 339 - DNA, 108 bp, Unknown
  misc_feature (1)..( 108): cDNA_ID_3016291_gDNA_ID_1564055_Annot_ID_148763 3000 nt of promoter + ATG
aaatgcagcatctgacaaagaaaagtgagtaattgtggtaccaccaagttccctacagacggagtcatccaatcttctgatgtctctaaggatcagttaagtatgatg

SEQ ID NO: 340 - DNA, 56 bp, Unknown
  misc_feature (1)..( 56): cDNA_ID_2048407_gDNA_ID_1564067_Annot_ID_148788 3000 nt of promoter + ATG
tttttaaaaaaaaaaaaaaaaaatccaaaatttctggagtagtttctcgagccatg

SEQ ID NO: 341 - DNA, 327 bp, Unknown
  misc_feature (1)..( 327): cDNA_ID_2025553_gDNA_ID_1564117_Annot_ID_148882 3000 nt of promoter + ATG
gttttgcagcggaagagatgatctgggtaagtgagagattctcaatgacatgtttccagagaatattagagaccttcccattgttggtgtcgccggagaattttcgaatttttgttgttgttcggtttttggtttatatgaacgcggccaagtgaacggatggtggacatgagagagtccaaaaagctgatagaacttaaaattgaaattaatgagaacattgaaccaaaatcaggttaacaaataaccagagataaccggtctctgtagtatactcaaatggttagtttttgccgatggtggtgccctaaactcgaaaaaaagatg

SEQ ID NO: 342 - DNA, 1378 bp, Unknown
  misc_feature (1)..( 1378): cDNA_ID_1032244_gDNA_ID_1564117_Annot_ID_148883 3000 nt of promoter + ATG
aagatcacctgttkcgggtcacggacaagctgcatcgcagcattatcgacatacatatgtgatagttcaacatctggatattcagaggctaaagctgttactcttttcctccacaatattgatgcctatacgaaacaaaacaaaaaaataattgtataacgaaaaacacacaagagtggagtggaaaaacaattcaaaacatacatccaagacattggctttgtcaacagaacacagcttgccacgccttttcctagcagtctcgaatgcaacacgagcaattctgtcaatctgaagaagataaagcaatgcattaatacacatacattgtcacagagcagcagattgtgaagagtaagtagtacctcgtgagcagcgtagatctctgtattaaaaccgacttcttcgccattttcgttgatcgtaatgcctcttggctctccaaagtaaatacctccagtgagctcccttacaatcatcatatcaacaccttgtgctacttctttcttcagtgtggaagcatcaactagctgaacaagcaaaaacagaaaaatttgagtatatttacaactagaaagcaaagtgataagcaaatcaatacctgtggtaaaactgtagcaggtctcaaattagcaaagacattgagatctcttcgaatgttaagcagacccatctcaggtctcagatgtttctcattcttgtcccatttgtacctgaacaaaaaatcatcataaagagaataaatttgctgaagaaacaacacacacacgcattacacataccctccgatagctccaagaagaatggcatcagactgtttagcagcagtggaagtttcctccggcaatggaactccgaccaaatccaaagctgctccgccgaaaggcatctcctggaaatcaaactctagtccttggagaaatccagctttctgaagcacattcttagcaacagatataacttctggaccgataccatcgccgggaagcagagtgatgttataccgttttttcaccggtgaagcggcggcgcacctaattcgatacggcgcacgaaacttatgatcggtgagagaactgtatcttcccggtatgatctccagacggatgttagtttgcaaaaacgccgccatctttttttcgagtttagggcaccaccatcggcaaaaactaaccatttgagtatactacagagaccggttatctctggttatttgttaacctgattttggttcaatgttctcattaatttcaattttaagttctatcagctttttggactctctcatgtccaccatccgttcacttggccgcgttcatataaaccaaaaaccgaacaacaacaaaaattcgaaaattctccggcgacaccaacaatg

SEQ ID NO: 343 - DNA, 223 bp, Unknown
  misc_feature (1)..( 223): cDNA_ID_3053620_gDNA_ID_1564118_Annot_ID_148886 3000 nt of promoter + ATG
gcctttaaagcccaatatgatcaaggccgaggaaaagctgacccaaacgtaatcgagacttgttgaagaagcctttgscctcatcgtcgtcttgtataataattttggttgtggcgcttctttcaatttgttttcagtttcgccatttccctccactctcaagctctcttttgcttctctcgctttctctggtgacccgaatctgctctgattgagagaaatg

SEQ ID NO: 344 - DNA, 802 bp, Unknown
  misc_feature (1)..( 802): cDNA_ID_1829152_gDNA_ID_1564119_Annot_ID_148887 3000 nt of promoter + ATG
ttttttttttggttggaaaaataaaaagtctctgttttcagaccgaatcttttgatgtatcacttgcatggctgtgaaggctctgtgtagcctgtaaagcttacacgaggattttgttgctccccttaatttccctctaawatctctccttctctctctctctacgataataatgtcttctvtgcaccgtttcctttcgccttctttctgtccgtttccaagtttcwttcgtttcttrtttttggctkwattwacrtgccatctctdtcgatgataacgacatgaaaccckcctcaaacaaaaccacattcacttattattagcctttgtttttttttgagtggccgtgaaggtgtgtgattrtggtgccctttcttcctttttgtttccctgcttaaggtattcctgatttttttccgtttcttgggatttattctgtgccattttttttgtttctgtttccaaattcttggctagttaattacgacctcaggatcatgtggatcctgttctttttgttatcctcttcatcagtgtttgacactatcttgtgwtttttccctctttttcaawaaccrtagatgsttattccttggccrgatgggycyckagtgawawcagmgtawggtgataybckakgacawtttcawawtvttcccttttttttttcttctttaatgttatttatgtttttttacttgacacttggtttcttgatatgtcctgatttgctttgacaacaaaaaatgcaggttaccgttgatagagtggtgttttggttctgttttggtgtgagcgtatg

SEQ ID NO: 345 - DNA, 589 bp, Unknown
  misc_feature (1)..( 589): cDNA_ID_3053643_gDNA_ID_1564131_Annot_ID_148907 3000 nt of promoter + ATG
aatcawatttgttttgtctgattaaaaaaagtttaawatatgmaaattaagmaagyacktcaatgaackttwaacatagaaaatattwacaaagagcagttwactatcaaggggyccaatttgattaaayaaattattttttgttcccattayaaattggcaawaacgttgaggmtgttrtrtcaaattaaaaaaaaaaatattttctattttgttggtgtgctcttaaattccccattgttacattgaggttgccctctaaattttaaaatattttatttttttgttggtgtgcccttaaatcacccattacacaacaaacaaaaaaagagactaaccaaaaaataattttataattaattttgtttcttcctacctacaagtatttacttaaccattgcctcgatcttttaaaccatccacattttttgaatcaccatcaacatctttctctcttctctttcttctctctatctgagtccagaaacattcacattaattacaaactgaaaaaacattgaaacttttgaataaactcacgagaagtactctgttttctcttcttactctgtttcttgttgatacaatg

SEQ ID NO: 346 - DNA, 22 bp, Unknown
  misc_feature (1)..( 22): cDNA_ID_3092689_gDNA_ID_1564156_Annot_ID_148954 3000 nt of promoter + ATG
ctcgggcaagagcaatgacatg

SEQ ID NO: 347 - DNA, 116 bp, Unknown
  misc_feature (1)..( 116): cDNA_ID_3028093_gDNA_ID_1564163_Annot_ID_148965 3000 nt of promoter + ATG
tataccttattggccccataaatacctaaagttggacaaatatcaataggtcgatatatatatgacgagcgaagtccactaaaagaaacagaacatcaaatcatctatccattatg

SEQ ID NO: 348 - DNA, 395 bp, Unknown
  misc_feature (1)..( 395): cDNA_ID_1009053_gDNA_ID_1564175_Annot_ID_148984 3000 nt of promoter + ATG
cgactaaaagaaayccaaaatgtattcgstcacatcactttaaaatcatgttttcyarktcaagtatattkaatkattcttttcaaactatatgaggttactgaaatgttatgcacdcaaaagaaataaaaagycaaaactattrddaaaagaaatgactagtcattaatactcggttgcaaaaaaaattaagaaaagaagcaagaaagagacctagtagtttcaagaatctccccatagaagaaaaagkcaatcattaaatatctcgaattctgtgtgcgccaataatattctccaaagtctaaaccatcaaaccggttattatatacatataaattagactaccgtaatcaatttccacttagagatcatcgagagggcaagagagaaaaatg

SEQ ID NO: 349 - DNA, 973 bp, Unknown
  misc_feature (1)..( 973): cDNA_ID_3063476_gDNA_ID_1564194_Annot_ID_149019 3000 nt of promoter + ATG
tacgtaraattaaacctgtcccgaaactagcttgccacagkgtygcatcttggtgtcaccctcgagcgccaaaccttgatattttgacttgcgttaaagattcacacatatggkatctttgtttaagatttggtattgyatatggtmsaatatatyyatgkrtattagatgmstggtctaattgtttgaattttygcaggtctattgagcatccaacttattcggccctgacaaggccgttatgtgaactttcttccttggttccgcctcaagtacttgcaacccacagaaaacttagggtaattagctcattgwtgatgaaatcctcgaaatctaccacgtatcatatcatttctttctgcctgctmgttgtatactatatcaatagctcatgctcaagcctgagcatgagcattgctctctgaggctccattctatgtgtcccacaaaacattagtttctcttcttatctcgyaaaatgcatctattatggttcaaatgatgaagttgtgtagctgtataatattgcacttggcaatgcaaaggtmttctgactcaagtagactaggaataagaataagaatrgaatwcaactgtttgataatatattacttcttgcagraaagttttgtwtatagcagactttaaattgatagctgthygaacactaaatktatctaamaraaaattgcaatggasaagatmcgtaatctttatgtcagatggtgatmgggaaagcacatgctgcacccgaaagttgaaasytattcctttttcaraatttgcarataatattcggggttcattttctacttgaaaccgccagttgatgattttcaaagattgctagtttctttattgcataattataatagcattgcttctgtacttctttcgctttcatggcttccatacattggtagtaaccctcatcaggtacttattaatttccattttttaggtctattgtatg

SEQ ID NO: 350 - DNA, 286 bp, Unknown
  misc_feature (1)..( 286): cDNA_ID_3053909_gDNA_ID_1564215_Annot_ID_149054 3000 nt of promoter + ATG
accaccacatttctttagctcaaccttcattactaatctccttttaaggtatgttcacttttcttcgattcatactttctcaagattcctgcatttctttagaatttgaaccaagtgtcgatttttgtttgagagaagtgttgatttatagatctggttattgaatctagattccaatttttaattgattcgagtttgttatgtgtgtttatactacttctcattgatcttgtttgatttctctgctctgtattaggtttctttcgtgaatcagatcggaaaaatg

SEQ ID NO: 351 - DNA, 108 bp, Unknown
  misc_feature (1)..( 108): cDNA_ID_3042299_gDNA_ID_1564216_Annot_ID_149056 3000 nt of promoter + ATG
ggaaaaatcgagaacgaaagtggtgattctactcttaagccttcaaaatcaaagcttttttttgtttctttgttctgttttttgcaaaaaataatttccgcggagatg

SEQ ID NO: 352 - DNA, 496 bp, Unknown
  misc_feature (1)..( 496): cDNA_ID_2105398_gDNA_ID_1564227_Annot_ID_149074 3000 nt of promoter + ATG
gtcttgtagaaaaaaaaactgaaccaaaacaaacttaatttacttcgaagttttatatttcgttatacaaaaagaaaaagtctaaatttctaaatacatgtagaaaatatattcaaggtaataactaataagtcaaatatttgaccagacaagtgaccaaaaggaagacaacaacaagaaaacaaatagctttttagccatttggacccacgacagtagataaagtcttggacatattattactaaccttttgtggcggcttagtgtttatcttcaaccccacacattctctgtttcctcgaaactgcatttttcttctttgccaagacaaagattaaataagacaaatatcaaccctatcctttgtttatatcaacaacatctcgcaacttgtgttcacatgaaacttctcactactctctttcatttcctcttttcgttgacttactaaagtactcttgtttcaatcttcattctagagagattctgtttcatg

SEQ ID NO: 353 - DNA, 106 bp, Unknown
  misc_feature (1)..( 106): cDNA_ID_3053939_gDNA_ID_1564228_Annot_ID_149077 3000 nt of promoter + ATG
gaagagtgaatcaggcgktgtcataggtccaaatctttttatatataacagccttttgggtgctatgagagggtttggggaagcagagaagatactgaaagatatg

SEQ ID NO: 354 - DNA, 59 bp, Unknown
  misc_feature (1)..( 59): cDNA_ID_3053963_gDNA_ID_1564238_Annot_ID_149093 3000 nt of promoter + ATG
agacttttagctctacattattatcataccaagtctacaatcactcagagaagaaaatg

SEQ ID NO: 355 - DNA, 629 bp, Unknown
  misc_feature (1)..( 629): cDNA_ID_3054102_gDNA_ID_1564282_Annot_ID_149174 3000 nt of promoter + ATG
ttatctaaattgatgatgttttggaaaccaattatctaaaactagtttatgattttactttcgttttctaaaccaataaacccccttgaatgatttagaaaaaagaaacatatatacaataataatctttataaattaataaaaaaattyggttatattttgggaccggtataagaaattgacattattgttttaaaagttttatagaaacatatagtccattaataacataaattaataattctataaacttatgaaaatatatatacatttctcgaaatttcttacacataccaattataggtaagaaaacttttttaaaaaaagaccggaaaaaatcccatcttgaagcaaaacatattgtaacttaccaccagggcagagcaggtggtttaatccgacggcgagaagatagaaaaaaaaagtgaaaaaggtcgcaacttgttgtgtctctctttctccaactaccctttcgagcttagctgtccactcttctctcccgatgaaatcttcatctttcgtatctctcctccttctcatgccctaaatttcatctcctctcttgtattgattctgttaaaaatctcacctttcaattcaaaaccccttccatttttgtgattaatatg

SEQ ID NO: 356 - DNA, 689 bp, Unknown
  misc_feature (1)..( 689): cDNA_ID_1019508_gDNA_ID_1564308_Annot_ID_149219 3000 nt of promoter + ATG
araaaagtgatggttggttggactttgataataacaacgatatcgagaatcatattttgagaagtttgggcgaatccataattagtagagtgaaaaaagactctataaagataaagatcgacgattwtgatacagggagccagcacgaggtaaccttcgggtataatcatgaatctgatacatattacattggatcattatggagattgaaggagcttgctgctggagatgaaataggattgttttacgatcctatttcaaagaatttgtgtttctctgtgttgaaacaagcaaaatcctgcttgatcaaaaaatgaaataagcaaaaccctgatgatcacaacttgtttaattatggttaattatacagcatagtaattaataagatcttgtttgaaaggacatatataagaatatgtatcgacgataatcatttctatatattaataaatatacaagttttgacatttcacttttgttcctcttaaatatgacaccttgtttctcaccattagatcgaccgacgacataagtaataacatttattacatacaccaaaaaaacaagcaaatcattaatacaattttccattagtgtatataacaaacaagagactaatcttttctttaacatttcatagtattacaaaacaacgccaaaagtcaaaaggtttcgctttctagatcatg

SEQ ID NO: 357 - DNA, 80 bp, Unknown
  misc_feature (1)..( 80): cDNA_ID_3594167_gDNA_ID_1564312_Annot_ID_149225 3000 nt of promoter + ATG
caaataaatctgaaataaaagacaaaacgttactcttctctctcattctctttmgcttctcgatagcttctcaaatcatg

SEQ ID NO: 358 - DNA, 788 bp, Unknown
  misc_feature (1)..( 788): cDNA_ID_3052886_gDNA_ID_1564341_Annot_ID_149285 3000 nt of promoter + ATG
aataaggggaatttggatgttcaarggacttaaccacgattgatgactaaacaaagcagtggttagctgaattactaactaactagagctagctgcctaggctagtcgaaagaacaattctccgttttgagttgaccataaaataataatattcaacaatattggaggaaacatgtttatatgttcttgtaataataatattatagcaaatagccgaagatacgacgaagcgtatatgtgtgaaatgagtatattctacagcctaaaccctcggagataccaaatcaacacgacaacagcgacgggacacctgtatggttctaattcaacttcttgtccacatcttcttcttcttcttcttctttttttaatagatatattaagaaaacaaaacagaaaatctcccacgtctttacaaagaaaataaagaagaagaaaataaggaaaaagaatctgatagtaattgacaaaaataccctcatctcctacctcaagacagtaatatatatgtaacaactcgatacagagcatggcttatctcttatccgaatcctcccaatttgtctgtctctcttttgttttctctgctaacagatctctctaaatatctgttacttttgttcatatctttttacttttcaaactactaattttcctttcgcttcttctattaataacaacactctctctctcagacttcttttcttttttttctacggcgttgattcattcgcaatgacctcagtttctgtgtaccataattgacctagcagattctgtttttaatg

SEQ ID NO: 359 - DNA, 855 bp, Unknown
  misc_feature (1)..( 855): cDNA_ID_1034108_gDNA_ID_1564347_Annot_ID_149294 3000 nt of promoter + ATG
cgtgtctttttcaaacatcattcattcatttcttataatgctttctgattttaaaactcttgacactttgaacagaaaatggattcttgttatttgcatcaaacatcatctatggatgttaaaatcctattatcttcagatcaaatccaaaacckaaactatackaacaaatataagaatgaaaataagtttttttttaaaaacaacaagtgttacagctacattataagtrtgaattataaaatcttacaaatattagtaatttttgattaaacataaaacaaaactttttattatcgtagctaacaatcaaagttttatttttttttttaaaaacagacgctaattcgcactactacacaaatcaatagttttagaaaaaaaagaaaaaaagagagagatgatcataaaataaggaaaaagaagaaaaggataacaataattaattctaacaggatagtgcacatcacatggcagaagtaggacagtaatttgtttttggttacatgtgtataaaaatgcgattctttgcttcattcctctttgttaaaataaaatagaataaaaataaaggaagaagaagaagaagaagaagaagaaaggattcgtcttccttcttccacaccctttctgacacctcatctcccctcccaccttctccgtcccgttccgtttctccatcaggtaattattaatctcctcttaatcatccctctaatctctttcccgtttcttcatctcccgattctcaattccatctacacagatcctcgattccgatccaacagttcgaattcagtttccgattctgatctgatcgaaccaatactcactgagatttgatcggcgattatg

SEQ ID NO: 360 - DNA, 668 bp, Unknown
  misc_feature (1)..( 668): cDNA_ID_3054324_gDNA_ID_1564359_Annot_ID_149319 3000 nt of promoter + ATG
cgtaagctagaatattacaggatagatgagattaaagaaatagtcccaaatagcaagcaacaaaactaaaacattaacacaaacaaattctaaaaatagagacacaaacttaacaaagatacaatgaaacctcaatgaattaatactcgatatactaataccttaaaatattttttctagttctaaattaataatttaacctaaaaatatcacttctataaattaataattacgataatttaatgaaatttagtaaaccattaatctcaatattcttaatttatagaggttttactaaattgtagaaacaactaattcgagtacatccctgaattaataaattttagaaatgtgaattaacgaatacttttgttcttgtgaatggttaaaaaaaagttacttatcaagacaagtatgaagtatcacgtgattaaacgtttaatgacaccaacctaatgacaatttgtttgatttatttgtcacctaactagagactctctcacagtcaacgcagcttatgtgtcatagtaagactttttgtctactatagaagaaagacgaatttataacccctttaggtmttttctaacacacgcctctaatctccgcgcacacacacacaccctcacgaagaagaagaagaagaagaagacgaagaagaatcaatg

SEQ ID NO: 361 - DNA, 665 bp, Unknown
  misc_feature (1)..( 665): cDNA_ID_3066549_gDNA_ID_1564361_Annot_ID_149324 3000 nt of promoter + ATG
taagtagtgtgtttgtacatttgttccgcaatggtttgctgattagaaaatctgcctgcagtttcctcactaaaccaaaaaagtcttgatttttttccatgttgtgtaatctcttgatttacaagtatttggactaatacttctctgttcagagattctttgtctctgttctgttggaaagtaattttggtttgctttctctgtagattactttccagttagacctaaatccggatatttgtattgctctaatcattccacttaacttgagtataaaattttgctttaagcctaatcaatttaattgcttattgtgtgacattgtttcagtattgtaggtgaaaagcctgacacatagagaacaaagatgtcttcagtttgagttagtagagattgattctggcctggaatccttatcttggacttgaccacccttgggtgaagtctagaccactctttgtgcttctagcagccggtgtgatggctactgtcttgcactcagagtccaggcggttatactcctggtggtgggatagtcacattcccaaaaactctaaatggattcagcagaactttcaggtgcctctttctctctatgttctaaagtgttaagtgttttgttcctttgtattattgcttacggttattttcttgatgtagatatg

SEQ ID NO: 362 - DNA, 460 bp, Unknown
  misc_feature (1)..( 460): cDNA_ID_1394255_gDNA_ID_1564366_Annot_ID_149332 3000 nt of promoter + ATG
  misc_feature (426)..(426): n is a, c, g, or t
ataatagmactctgtacatacaataaagaaaatgaatcaagatattagtaggatacccatacgaatttaggaaaaatgaatcagataacggatataatattvtcttatataagtaaataaaatctgtaaatataatttttttggacggcaaatctataaaaatagctattggataaataaaaattggcatgtgaatgatatttatgaactgacatagccatgtgttataatctcacccacagataaccacaaaaatatataaacccaaaaagtaataaaaaagaaaggaataaaaggaagatattctcccgaaagaaagacagagaaaaaaggatattctaattagaaaccttaagaatattctttttaatcccttttatatctctaaacctcttccccctctstttcttcttcattcatcattcntcacttacgtttcccagaaaataaaagagctatg

SEQ ID NO: 363 - DNA, 312 bp, Unknown
  misc_feature (1)..( 312): cDNA_ID_3054388_gDNA_ID_1564379_Annot_ID_149354 3000 nt of promoter + ATG
tcatgaggtcttgttatatatatggtgatcacatctttaaagaaaatgttatagtatttgttttagtttaaacaattttttatgtgccaaaaacattattaaaaaaagagcaataccctactctaaaatagtaaagctaccaaattcaattcattacgacatggctcaaaagaaaaagtatttcgaatattatacgatatcaaccccattatcattgctataaaataagccaaactttccctctccattttcaataatctctcatcttctttcgtctctctttctacggttcaaacattaaaaagatagatg

SEQ ID NO: 364 - DNA, 1250 bp, Unknown
  misc_feature (1)..( 1250): cDNA_ID_2990066_gDNA_ID_1564380_Annot_ID_149357 3000 nt of promoter + ATG
ttttttgcatatgtagaacaccgcaccggcaccagatggtaaaactaagggagcacaagccttatccatgagaatctccggaaactttgctgctttctacaactgcaaattctacggtttccaagacacaatctgtgacgataccggaaaccatttcttcaaggattgttacgtcgaaggaacattcgatttcatcttcggaagtggaacctctatgtacttggtacgtaacatctcatacttatttcttaatacataaagtgcgagatctctaatgcatgtttgagttcaaaagggaacacaattgcacgtggttggagacggtattagagtgatagcagcgcatgcaggaaagagcgcagaagagaagagtggatactctttcgtacactgcaaggtgaccggaaccggtggaggaatctatttgggaagagcatggatgagccaccctaaggttgtttatgcctacaccgagatgaccagcgttgtcaaccccaccggatggcaagaaaacaagactcccgcacatgacaagtaagtcctacttttcacattacatagaagacgttatgaatatcacccaatcggtccatgtctcttatgttggttctatcatgacaggaccgtgttttacggagagtacaagtgttcaggaccaggatcacacaaagccaagagagtaccattcacacaagacattgacgacaaagaagctaaccgtttcctatccctcggctacatccaaggatccaagtggcttctcccaccacccgctttgtaaactcttcaatatcaagtctaaaatcatattttgcacatatatcacttttaacaaaaaaattatttttacatatatcacttttagcaaactttttctttacctagtcgtcactacttacgaccctatgtatgcttttatgcaaagaaccgagaggtcgataatctgagaaacatataagcaatcgagacttagccgaaataaattgattttctctctcaaataaaagtataaatggtaccctatatttatgtagcttttctaaaatagccgaggttttatttaattatcaaaaaagtcttttaagtctaaaagtaaaactcggtcacgaccaaagtaaaaactacgaaacagtaccttttgtttatgtatacttacaaaagtatcccaaatgtatttaattatcaaaaaggtccgttttaattacaatcactgaataatcatctggtgttactctctctgctcacaaatg

SEQ ID NO: 365 - DNA, 3 bp, Unknown
  misc_feature (1)..( 3): cDNA_ID_4263162_gDNA_ID_1564383_Annot_ID_149362 3000 nt of promoter + ATG
gtt

SEQ ID NO: 366 - DNA, 49 bp, Unknown
  misc_feature (1)..( 49): cDNA_ID_3054406_gDNA_ID_1564385_Annot_ID_149365 3000 nt of promoter + ATG
cactcaacaagttcatgaaatggtggatgtaagaaatgacgagkcaatg

SEQ ID NO: 367 - DNA, 791 bp, Unknown
  misc_feature (1)..( 791): cDNA_ID_2685721_gDNA_ID_1564388_Annot_ID_149369 3000 nt of promoter + ATG
agtaaaacctctataaattataatactacagtaaaacttcttttaaattaatattagataaactaataatttttataaattaacaaattcttccgattttgagttgtaactatagtaaaaattaatacaaatcgataaattaataagataatttttattaaaaaaaatcattgtataaaattaatataatatgctctcattaatattataaattaataattttataaattccttaatatatatataagaaattttagtaaaacataacctttgctatattcctttttcatttttaatatttttactacattcaaaactctttttgttgttgtctatacataataaattttaattattttgtaaatggttctaaaaagataataattataaataaaagaaaacttttttagaaaaaatcttttaaaaattacaaaattagtttaaactctctataaattaatagtacttttctaaattaataaaattttattgtctcgatattattaatttatagaggtttgactgtatgatgaatagttaaatacctttataaattttgttacaaatgttggatacatatatacaaattacaatctatactaaaccaaattaaccgaaaaacaatcctaaccagcattaaaccggagctatacatatgtagtagatcagtttaatttggtcctcacctcaatcccaagaaaaaggccgttctttgcattttctatcgtttcatgtctgtctgagtgacagaggaaaccccaaaaacstccgtaaaacctcacaaaagaatg

SEQ ID NO: 368 - DNA, 745 bp, Unknown
  misc_feature (1)..( 745): cDNA_ID_1566630_gDNA_ID_1564401_Annot_ID_149391 3000 nt of promoter + ATG
aaaaaaaagacatagaaatcttctcacatggtacgataaattttagctgaggtatcgtttggagtttggacattttttcaaaagtcaaaagtgatctggttcggtccgatttataaaccaaaccgaacaaaataaaccagaacggtttaactaaaatccctaatttcccgtacgatctgaccttcctttagtgatctcataacttagccattctaccattcaccgtctctgtttcgttcgccgtgattcatagtcgtctcgtctcaccgtcaccatcaccgtcttcttcttccattgacaggtttcattatttctgaagattctctattcaagtagtttttaaagttttcctctttgttactctgtttggttttttgtttgattttaacatttctttgttcccccgatttatcatcattttcaagcttaaatttttggatatgtttgcaagtgcctgaagctgattgatatctcttatgaaatctctctgctttcttctgattctgtttccttcaactcacagttcaatctttagtatgctcttttagtaatctcttctatgatttgttgtgggttctctattgttttctatacgtatttccaaaaattgaaacttgattatgtgtgattccttttaagcaagatcaatgaataaaaaagtttgctctttgaactgaaaatcagcaatctattggatattgactttgttcttactactgtaggatcttgtttagattctgcaatg

SEQ ID NO: 369 - DNA, 209 bp, Unknown
  misc_feature (1)..( 209): cDNA_ID_1025971_gDNA_ID_1564417_Annot_ID_149420 3000 nt of promoter + ATG
aactcatttggggttttacgtctgcgtttgcgtttgcgtttgcgtttgtgaacgcctttattcgattttggaaaagaaaaaatgttctgttctattttgttctctctgctagtcacagtcaaatgagtcagctaccttatattcgattttgagcgtccttaaattccttcactgtgagaaaaaacacagagaaagagagagaaacaatg

SEQ ID NO: 370 - DNA, 202 bp, Unknown
  misc_feature (1)..( 202): cDNA_ID_2705162_gDNA_ID_1564427_Annot_ID_149437 3000 nt of promoter + ATG
gtttaagaacataggctgatgccgtttcttattttcagacactaactttgtgccgttttatttcatggaaatcgaaatgttctctgcttctctgctggagctagagaaggtataaaagtaaactttttcaggtccaacgcagcaaaaagtctcccctttcctctctttctctctctgcgtccttctgaggctggaagcgatg

SEQ ID NO: 371 - DNA, 11 bp, Unknown
  misc_feature (1)..( 11): cDNA_ID_2709550_gDNA_ID_1564439_Annot_ID_149458 3000 nt of promoter + ATG
tcggtctaatg

SEQ ID NO: 372 - DNA, 245 bp, Unknown
  misc_feature (1)..( 245): cDNA_ID_1471083_gDNA_ID_1564444_Annot_ID_149466 3000 nt of promoter + ATG
gtactattagaaatagaaaggggaaaaaaaatcaaaacttttcctttttgatcagatctttagtttctgtaatgagtagattactgttgatccttggtgggttatttgatcccatcttcaaaattttgtctttttgaatagaatctttacttttgcagatggaggtcgatgaagaagaagagatatgatttagtctttcttcaaattgagaatcttggggtggttgttttttattgctagtcatg

SEQ ID NO: 373 - DNA, 10 bp, Unknown
  misc_feature (1)..( 10): cDNA_ID_3054564_gDNA_ID_1564448_Annot_ID_149473 3000 nt of promoter + ATG
ggagaatatg

SEQ ID NO: 374 - DNA, 170 bp, Unknown
  misc_feature (1)..( 170): cDNA_ID_1689239_gDNA_ID_1564498_Annot_ID_149559 3000 nt of promoter + ATG
acagttaaaccaaataattatttcgacttatatgagttagagttatgactgactcatcactttatatctctctttctcaaaaaaagtcaatggtgaatacgccttttccacagatttttgtctatgtgaacttcaacttttctcgctagtcgctactctagtctctcatg

SEQ ID NO: 375 - DNA, 904 bp, Unknown
  misc_feature (1)..( 904): cDNA_ID_1388444_gDNA_ID_1564514_Annot_ID_149582 3000 nt of promoter + ATG
ggtatgactacgtaattactgagtatatattatactttgaaattaaatttattcaaaataaggcttttaattaatttaacttgtaacttttcatagaagctactgttcatattttctttgctagtcttaggtctattatattattgactcacaacttaaaaactagaaaaaaaattgtataaataataatacaattcagggcaattttgcttaagaactagacaaatgcaaggtagtatgaattaagttgcaaccaattgcaatgaaacaaacaaaatttaacatatttcttcaaattactattatatattttttttaaaactttagaatgtaaagacattaaattgtaaacaaataacaatttttttcctgttttatcatctagttttaggagtttgtcttacatttgaagattaaaaaaaatatccaaaaattaaaagcaatatcatatagcaatctcgcattgttttggactcattgcacaataattttacttattgggcctttagtaatagataaacgatccaatttataactacgtcgttttaaagatataacatcccaactgggttctgattcggtggatccaagttcgggttgcaattcgattaagaatcaaaccatttttgaagaaccctaaaagttctcttcttcccccaaattttaatctgttcttgcaatcggattcgaaatccgaaagtcttagtctcgaatttgagctcaacagtttcttatggctccgaagaagtctgaaggaatcgctttgctttccgtttacagtgatgaagatgacgaagagatggaagacgccgaggaagaggaagaagaagatgagaagcagagaaatcaggaagagagtgaaaaaataattgaagaagatcaggtagaagaagcgaattatatg

SEQ ID NO: 376 - DNA, 3 bp, Unknown
  misc_feature (1)..( 3): cDNA_ID_3054754_gDNA_ID_1564516_Annot_ID_149586 3000 nt of promoter + ATG
atg

SEQ ID NO: 377 - DNA, 4 bp, Unknown
  misc_feature (1)..( 4): cDNA_ID_3054773_gDNA_ID_1564526_Annot_ID_149603 3000 nt of promoter + ATG
catg

SEQ ID NO: 378 - DNA, 54 bp, Unknown
  misc_feature (1)..( 54): cDNA_ID_3054783_gDNA_ID_1564528_Annot_ID_149606 3000 nt of promoter + ATG
ttgataatcactcattcaaatcaggctttgaatgatctttttgagaagataatg

SEQ ID NO: 379 - DNA, 786 bp, Unknown
  misc_feature (1)..( 786): cDNA_ID_2993463_gDNA_ID_1564533_Annot_ID_149617 3000 nt of promoter + ATG
aaaaaaaaackaataaataatckaattttactgaaataaattgtaatgatcaaawawatttaagcattgaatttttttgmgtagtccraaagmtmaatrttmaaaggcrgctgatcrtaawttgtcrttttttttttgttcgtgcaaagctgctgatctttgttattgtctcatatgtaagtggttagcataaaataatattaatttcttgaatatgcgttgtatattttggtgaccatatacaactacttacatcgatcttgtaagaattgcacatagtaaagtaaatatatcacaaatcatatgtccgataacttcatttatttatatatttaatgatgaaaattgtaaataaaaaaaataatgatgaaaattgtagaaacgaaagtattttaatcgtaaaatggaaaaaattgttagatttttattgatcattttttggtagttgctatactgtttataggttttatatttagttgtggaaataatttataactatakcagaatagattattcatgtaatgacatagaaacagttgttttcacttttcttgttttgtcttggtgccgtggtagattttgataataaaattagagtgttgattaatttatatttgccaaaacaaaataaacaaataaataatttcaagttgaccaattcatatttcttgatggaaaacactgatctcttctcttctattctttctttctcttatgaggaattttcacaatctttgatcatcttctcctttattctacggaagaaatctatatattctatatatg

SEQ ID NO: 380 - DNA, 494 bp, Unknown
  misc_feature (1)..( 494): cDNA_ID_2712623_gDNA_ID_1564535_Annot_ID_149620 3000 nt of promoter + ATG
agttttccaacttattaagctattagtcaactttcttaaaaatataagtcttactttattggttgaattgaacgacatgtgtattgctactttaacttattcgagttgttaatrtttttttttatcatcatcattcgagttgtttaattgtttaatcacaaaaaattaaaatggaaaattacctaaataaacattatattatgttgttgagaatattgatagttagtatgcaacaattcttttagtaagatcatgatgttattacctttaccttctaccacctaactgtttgaaaacacattttactcaattcatatattatattttacacatatacataagaaggagacaaatgcatatttcttaattgatttctgagcatttcaacagagagacaaagaacatagggacccgttgaggcatggctcctttgggtgtagaagaagagcaatagttactgtgagtggagcttgcagagattggaaaaaaacatg

SEQ ID NO: 381 - DNA, 281 bp, Unknown
  misc_feature (1)..( 281): cDNA_ID_2994259_gDNA_ID_1564561_Annot_ID_149660 3000 nt of promoter + ATG
ttactcactctcggttggtcaaagcgtgtttcgcccgggaagagttacccatgcgttgaatgatgatgctttggctcaagcactgatggataccaggtatccaactgaagggctgacgaactatgatgagtggacgattgatctgaggaaactcaacatgggtcctkgcctttgctcaaggggcttttggtaaattatacaaagggacatacaacggtgaagatgtagctatcaaaatacttgagcggccagagaacagcccagaaaaggcacagttcatg

SEQ ID NO: 382 - DNA, 242 bp, Unknown
  misc_feature (1)..( 242): cDNA_ID_3054943_gDNA_ID_1564586_Annot_ID_149704 3000 nt of promoter + ATG
cttgaattrgttctagtgtwaggatgtacatctgtttttttgataacactacctgtgacatcatcggtatccgtttgaatcccccactgtatggtacattcataaatcttgatgccatcttggacaaaagatataaacttagtggcatgccctaaagcaatgggtaagatcccgtcagctaaaggatctagcgtgcctgcatgaccaatttttgtttttttatctacaattttcttaatatg

SEQ ID NO: 383 - DNA, 49 bp, Unknown
  misc_feature (1)..( 49): cDNA_ID_3054977_gDNA_ID_1564597_Annot_ID_149724 3000 nt of promoter + ATG
tgtttacgaataatgtctaaatacattgttcgatttatacgtatatatg

SEQ ID NO: 384 - DNA, 254 bp, Unknown
  misc_feature (1)..( 254): cDNA_ID_1825731_gDNA_ID_1564609_Annot_ID_149744 3000 nt of promoter + ATG
tacgttctcgccatttgcgccattgattaattcaagtgcgttgaagttagaggtaaccaccaacttgcattttactctccaaagctctgatttttctgtcaaattcttttgaaaactttgatgcttgttttcttctcatcattgattcttttttgatgataggttagttctacacaaagcttgatcttttaggggttttctctagttattggagagtggtgagaattagaaactgcattatccgatctaaaatg

SEQ ID NO: 385 - DNA, 35 bp, Unknown
  misc_feature (1)..( 35): cDNA_ID_3055050_gDNA_ID_1564622_Annot_ID_149769 3000 nt of promoter + ATG
tagctctggatgttatatccatccacatgttcatg

SEQ ID NO: 386 - DNA, 363 bp, Unknown
  misc_feature (1)..( 363): cDNA_ID_1031100_gDNA_ID_1564626_Annot_ID_149775 3000 nt of promoter + ATG
  misc_feature (52)..(52): n is a, c, g, or t
attagtattatttaaaagaaatactaaagtggggtgagtgtaaatgataakngysttgtttggtgtascaaatagctggcataaggttggtattgaaaagctcatctcasaatcatcaacggcccaaaacacattgcaaattaaagaaaaagcaaagattttcctcattcttttgccattattatctctcatcgatttggcttgctacttttgaatttacccgtgttctactacgattcgggattagggttttttcttgagttagaaaagattgtttcttgattcttgggaatggctgggatttgaggaagaagaagtgcaaaagggttctttttttgagtttgtgaatttgctgcggagatg

SEQ ID NO: 387 - DNA, 126 bp, Unknown
  misc_feature (1)..( 126): cDNA_ID_3055110_gDNA_ID_1564641_Annot_ID_149799 3000 nt of promoter + ATG
aaaaaaaaaaaaaaaagaatctctatttaattgactcaaaagttttctcataacacaaactcatctctttcctctcaccttcctcatacatcatctctctttctctttgtctcctcatcaacaatg

SEQ ID NO: 388 - DNA, 356 bp, Unknown
  misc_feature (1)..( 356): cDNA_ID_1596933_gDNA_ID_1590610_Annot_ID_149852 3000 nt of promoter + ATG
tttttttgttgtattttactagttcatgatatgaatatgacttttgcgatagtagatttttaaaattatctttagtaaattaattaccaaaattgtttgcaaaacacgtgatgatctacactttaaagactttgaaatatattttaaactggtaaaaaagatgctttccgccataaagttgatctcatcaagaaacacaaagagaggtagcaattaaaatattcaaagatgaagagcattattagcacgagcaactcttttcctctgtctccacttacaaaggaacaaaacttgatctgctttatagtaaagaacaaaactcaggaagttcaaatttgcttgggcagagaaccatg

SEQ ID NO: 389 - DNA, 334 bp, Unknown
  misc_feature (1)..( 334): cDNA_ID_1026239_gDNA_ID_1590641_Annot_ID_149882 3000 nt of promoter + ATG
atatgatgaatatagtaatatgttatgctactttaaacgtttgaaaatcctattgtacacatcaaaaattaaagggtgtagtatgaagtgcttgattaacttttcattaaaacaaatgcatatgctgtagtaagattttagataagtagttcaggagaataaaaatataggttaacgttaacgtcaaagctaagtaagtccaaagtggaacaacacatacacacttttcttataaatatgggaagctttgtggttgccaaactcaaagcacattggggcttatctctctctaagtaatacacacaaaaataactcacatatagagagagatatg

SEQ ID NO: 390 - DNA, 3 bp, Unknown
  misc_feature (1)..( 3): cDNA_ID_1988848_gDNA_ID_1590644_Annot_ID_149884 3000 nt of promoter + ATG
aag

SEQ ID NO: 391 - DNA, 1727 bp, Unknown
  misc_feature (1)..( 1727): cDNA_ID_1597200_gDNA_ID_1590645_Annot_ID_149888 3000 nt of promoter + ATG
  misc_feature (447)..(453): n is a, c, g, or t
tcgttgtgtttttacggtcaatttggttctattcagatatggttatctccggttttggatttgaaatctcagatacagcggcggattcacagagttccccgagtgctgctgcgactgatggttttggagccgatttcctagcatgtatgaatatgtcctgggacaagttcgagacggacaaataaacgagaccatatgtttgctgcagctgacaagtctcactcagctttcttgttgattgatgagatataagagcagatgggattagctggatatgtgcaggaaactgagatggtatgcatataagttaaacaaatcgttggagcatataagcagacacaaacaatcagttgtagccgcagaggcattcctttgctcattgtgagatttggcagatctggagcactaaccattcgtagtctattgacaatcacacctgattcttannnnnnngtggatttatcttccaagttaatagctttacttgaaaaacgattccttactgatattcaaagcataacacgtctaggttcatggatgcactctataatttacttgacggttctattgacgacaatacaaagtttgaagatgagtgccgagctatttttggagcacagtcatatgttcttttcacattggacaagctagttcagaagtttgttaagcatgtaagcaaaactagtgtcttgtcttcttgactctctacttccattctctctctttcatctgatcactgggatggtttttggaaatgcttcagctccatgcagttgcatctgatgaaacagacaccaagcttctgcaactacatgcgtatgagaactacagaaaactttgggaagatgatttgatctagtgtatcatgagaatgcatgtgccatcctccatgaggcaaagatataccaaagagcaacactccaatcgttacattggttaaccgctggagcgttttggagcccgagaatgccagctcatccactttagagccaattggtcagatagaagcgagcaattcaaaaataataaaaatgaaaattaccgaacgacgtcgtattgataaatgggggctgtttggtagtacgtgtaatgttgttctaaatacgagtagggaagaggcgtaagataacaagatgcgtaggagaaaggaaaggattattgtcacttgcctgcgcaaattagggcttctccttcgcaagactctcttcgccagcttaaatcagtgtactctctctttctctgtctctatctcttgcaacttctctgtttctaatctcttcacgcatttgtgtatcaaggagtcattttttaacagaatatgaacatatttgataattcgaatcatgcgagttttattgaaagcttatgttcttgtgatgatttcaaacttttcgaaaacagcgactttcaaatttcttcagaaactatgaaaaccccatcttgtaattgccattatcggcatccaaaatgtgcttagctcggaaaattcgaattgaattagcttcgaaagctcctaattacattagaaaattcaatctttatacgaaatttttgaattctgaatctttctagcttcgtactcatgagtttaaaagcttgttacagattatgtagcacttcattggagattatctggttattgtagatagtaatgttacagagtctcataagtgctgttgttatgtgcttgtcaggcaaagtgctgaatataccttaggagctaaatg

SEQ ID NO: 392 - DNA, 70 bp, Unknown
  misc_feature (1)..( 70): cDNA_ID_3439206_gDNA_ID_1590652_Annot_ID_149894 3000 nt of promoter + ATG
aaactcacacttgctggcttcttcttccatggctttatcttttgtttcttcaactagattctccaagatg

SEQ ID NO: 393 - DNA, 23 bp, Unknown
  misc_feature (1)..( 23): cDNA_ID_1593869_gDNA_ID_1590659_Annot_ID_149904 3000 nt of promoter + ATG
  misc_feature (8)..(8): n is a, c, g, or t
gtcgcggnggttcttctgccatg

SEQ ID NO: 394 - DNA, 3 bp, Unknown
  misc_feature (1)..( 3): cDNA_ID_1593747_gDNA_ID_1590684_Annot_ID_149921 3000 nt of promoter + ATG
cat

SEQ ID NO: 395 - DNA, 239 bp, Unknown
  misc_feature (1)..( 239): cDNA_ID_1596158_gDNA_ID_1590743_Annot_ID_149977 3000 nt of promoter + ATG
cctccagcatatgtgtagagccgggcctgcatatacgattagtacttggagtcaaagtaacctcatggaaagacaaaactaagcttaaagacacagactttacacaagatacagattcagactactttactctaaagcaaaaagagcgacctctatccagtctccagcctatataaacaggctcttctcttccatttcctcttatcaagtgacaaaagaaaaacaaacgtactcaaatg

SEQ ID NO: 396 - DNA, 3000 bp, Unknown
  misc_feature (1)..( 3000): cDNA_ID_1596137_gDNA_ID_1590754_Annot_ID_149993 3000 nt of promoter + ATG
acttaggaaccgaaccaggctcaaaggcatactgtctcttggatccaaccactcacaagatagttgtaagcagagatgtagtcttcgatgaaactaaaagttggaagtggaatgatctaagaagtgaatcaacagaagattcaggaaactttgtacttggttttgaacaattttgaaataacggactaagaagagaaagagaagaacatggttctgagacaagcgagaagaacactaaggatgaagacacttctcgagtcactgaagcaacagaaacagaggaaccaattcaagaagaaggtcaaccacaagagaacacacaacccacactaagacgatctcaaaggcaagtttctatgccgaagtacttagaggattacgttctacttgctgaagaagaaagtgaatatctcctctctgtaataaacgaggaaccttgggattatgctgaagcaaaagaaacacaagagtggagagaagcgtgtgaggacgaaatcgcttcaattgagaagaacaagacatgggatttagtggaacttcctcaaggagctaagccaatcgggctcaaatgggtgtttaagctaaagaagaacgcagaagggaacataaacaagtataaggcaagactcgtggctaaaggttacgtacaacgacatggcatagattttgacgaagtctttgcccctgtagcacgaatcgaaacagtccgcttcatcattgccctagctgcttcaaacggatgggaagtgcatcatctcgatgtcaaaacagcattcttacacggtgaattaaaagagatagtatttgtttcacaaccagaaggattcacagagaaagggagtgagagaaagggagtgaaggcaaagtatacaaattgaataaggcactctatggattaagacaagcgcctagagcatggaacaacaaattaaacaagatacttggggaattaaagttcgtcaagtgttctaaagaaccatcgctctatcgtaagcaagagaaagatgatcttcttctagtagcagtgtatgtgaatgatttgcttatttcaggttctagcttaaagctcattaatgacttcaagaagggaatggcgtccaagtttgagatgagtgatctcgggttactcacatactatcttggaatcgaagtaattcagtataatggaggaattatgttgaaacaagggagatatgcagagaagatcctagacgaaaccaagatgagtgattgcaacgcagttcacattccaatggactccggtttgaagctgtcaaaagcgggaacagagaaaggaagtcatgactcggagacagagaagaacattgagccaaaagagtatagaagaaacattggatgtcttcggtatctacttcacacacgacctgacctctcatactgtgttggtgtgttgagtagatacatgcaagaacctaaagaaggtcatggagtagctatgaagcagattatgagatacttgcgtggcactacttcctatggactatctttcaagcgaggagacaaatcggggctaataggtttcagtgatagcagtcacaatgtagacgaggatgatgggaggagcacaaccggacatatattctaccttgatggctctctgataacttggtgtacacaaaagcaagaaactgtggctttatcgtcttgtgaggctgagtttatggcagccactgaaggagctaagcaggcaatttggttgcaagaattacttggagaggtaacaggagaagcatgcaagaaggtgagactactcattgacaacaaatcggcgatagcacttgccaagaatccagtatttcacggccggagcaaacacattcataagaggtaccatttcattcgtgagtatgttgagaatgagcaaatagaagtggaacacgttcccggggaagaacagaaggcaaatcttctaacaaaggcacttggaagaatcaaattcaaagagatgagagagctagttggagttcaagagttgtcgaagtgtgagttcaagcttaagggagtgaatgttgataagcttgaagttagcttaaggaataagctaaccaaatcctaagtgattaggattagattgcatctaggagttatctaaatacaatatttagtagttatctaatgttattaggagttatctaatagctagagttttcatataaatagagatgccaagttgtggtaatcctattgagaagtttagagtttgagagtttgagagattgagagctttggtgagagctttaggttttgagtaagtttcctaaagattaataaagagtgagtctttatatacaccattctcttgttctataaatcgatagtttcgagagtatatcgtagatctagttcgcttgtgtctaatacttgtgtgcttgggtattagttcgtgatcagttgtatcctgggattcaaaaattatgatgtccgaaaagcacttacgggcgatttattgaagtaaggaaaaagatatcatatcttgcctccgtgatttactttttgtccttaattactgttattgtaattttattgttatcgttatcttaatagaattcgtacttgtttctcaattcggtttttgggctattacaatcttaattcaataaatccgcttttagcttatcgctctagaaggattgagaatttttcgaattttttaaaacgattttaaaatcttctaaaaattgtttctgctatcatctttgggtgcttacgcggaaagtttatagaagaacgttattacttctttctttctcctctttctaaattgcttcgcaaacgctatgtagcgattgttatggacagtttcttatataaacttctctagtttccacgaacgctcatacttgagtgagtttgtgaaacgcgaaacaagtttttgcgaacgcttcctaatcgagtttgcaaaactaattcggtgtaatttagttacatgaattttttggttaatatactaatcaaatctgtttttctgtgaacagaatg

SEQ ID NO: 397 - DNA, 903 bp, Unknown
  misc_feature (1)..( 903): cDNA_ID_1596141_gDNA_ID_1590754_Annot_ID_149994 3000 nt of promoter + ATG
catcacacctcctacaagtgctcggaacagatatatctttgtgctaattgatgatcactctcgttatatgtggtctattctcttgaaagaaaaaagcgaacccttcgaaaaattcaagagattcaagacaagagttgagcaagagagtggagtaactatcaagacttgtaggacagacagaggtggagaatttgtctctcatgagttcaaaacgttttgtgaagagaacggtataacaagacatctcacagcaccacactctcctcaacaaaatagtgtagtagagcgacgaaacagatccctaatggagatgacaaggagcatatgaagatgccaaattacttgtggggagaagctgttcgacatgccacctatgttataaaccgagtagcaacaagagttctaactaatcaaacaccgtatgaagaatacaaaggcaggaaacccaatgtagaacacatacgtgtgtttggttgtgttggatatgcaagaatagaatctcctcatttgaagaaactagatgacatatcacgttctctggtacacttaggaaccgaaccaggctcaaaggcatactgtctcttggatccaaccactcacaagatagttgtaagcagagatgtagtcttcgatgaaactaaaagttggaagtggaatgatctaagaagtgaatcaacagaagattcaggaaactttgtacttggttttgaacaattttgaaataacggactaagaagagaaagagaagaacatggttctgagacaagcgagaagaacactaaggatgaagacacttctcgagtcactgaagcaacagaaacagaggaaccaattcaagaagaaggtcaaccacaagagaacacacaacccacactaagacgatctcaaaggcaagtttctatg

SEQ ID NO: 398 - DNA, 3000 bp, Unknown
  misc_feature (1)..( 3000): cDNA_ID_19124_gDNA_ID_1590760_Annot_ID_150004 3000 nt of promoter
  misc_feature (2235)..(2235): n is a, c, g, or t
  misc_feature (2245)..(2245): n is a, c, g, or t
  misc_feature (2353)..(2353): n is a, c, g, or t
  misc_feature (2521)..(2521): n is a, c, g, or t
  misc_feature (2533)..(2533): n is a, c, g, or t
  misc_feature (2967)..(2967): n is a, c, g, or t
ttcttatcaagtttccaaaactgttaggtgacaaatgaaggattggagcaaggctattgtgttgttccgagcaaacaaagacttatccttctaatttcctttttgaaaaagaacctaaataaaaagattatggtatttttctcgacttgcaagtcggtacaattccatacggaaatcatgaaaataagcgacgtggatgtctctgatattcatggaggcatggatcagaacagaagaactaaaacctttttcgacttcatgaaagcaaagaaaggtatcttgttatgtactgatgttgctgctcgtggtctcgatattccttccgtggtacgtctccacatctatgttcttgcattggttttgtacgcatttacttaccaatggttttatggaaatcatatttctggcgatttttattatctgtaggactggattatacagtatgatccaccagacaagccaacggtaagacaaacacttcctcatatttggttttgcatatccctttgcctctgtatgtgtatcttagattgttctttggtgctgttatttcaggaatatatccatagggttggtcgaacagcccgtggagaaggagcaaagggaaaggcattacttgtcttgattcctgaagaacttcagtttattcgctacctgaaggtaagaatggttattgaaattttattgtgggttaaccaacttgagttttaatttgtaatttaaccctcaggctgcgaaagtacctgttaaagagcttgagttcaatgagaagaggcttagtaatgttcaatctgcgctggtaagacttctgattcagtaatgttgtgggtttaataactttccatttgtaataacaacgtttcttgttctgtctcacaggagaaatgtgttgccaaggactacaatctgaacaagttagccaaagatgcgtacagggcttatctctcagcatacaattcacactctttgaaagacatctttaatgttcaccgacttgacctcctggtaaaagaaacttaaaaaacaaatattcttccaaagatttttgttttcataatagctaatatctcgtgttttgacgttgagtatcacaggctgttgctgaatcgttctgcttctcttcgccgcctaaagtgaatctgaacatagaaagtggagctgggaaggtgaggaaggcgagaaagcagcaaggtcgcaatggcttcagtccttacagtccctatggcaagtccacacctacaaaggaggcataaagtgtcatttgtttacaaaattactattttgctccgtagttttgactaattaccaccaccaagttttgtttaaagagtaaacagtgcatttgatttaaatgaaatgttccttggctactattaatatttcagttctatgggttataactttttaagaattgttgatatcgtttgcttataataaaaactgatacatggaaatggaataagaaaacataaagaaaccataaagagctttattaagtgattatcggaactacatgaaaagtgaaaacatattcattgaatctaaaccggtctaaccggaaaccaaattcagtaatcgaaataaagaaaaagaaaacgctaaaccggcctaagatcttcagcagctaaaaccgctggaactaaaccaaaccaaaaactgaaacaatcagaacagcagagacaacaaaaccggaactactgaactggactgcggttttgaaggcattgctcttcttggccttgggagttgacgccggaagagatgatgatgacgaagaagaagaagaagaggatggaggaggagactctgtagaagactccgtctccataacttttacgatcatcttctgacccttttcgcagtggccagagacaccgctgatgaagtaaaacaaaccgggtcggtctagtttgaaaacagtgtcttcgttgtttgagtagagttgtggtttggtcgctttgcatttcttgtactcttcttctgacaccactaacactgagtctttcgtgtacttgaaaccttcaccaaaaaccgcacaaaagagttaatatatcttattatcttacaagatgaaacgtttaaacttcatacaaaagtgttcaatatacttaattacttacggagagtgtcaccaactttaaaccggttatctgacgcccattggttaaacgcatctccaagagtcttagattttggtacgatccaaccattttctcctccaacttcaaattcagngcttgaaacncatgaaaacatgtaaaatgttacaagaaacataacgataatgatcttctttgatgaatccatttgttgtttttttggattgatatgaaggaagctctaaccaaagttncagagattgttttttttttagtgttcgtaatgacttgtgacttgtgaggttttgagtttaaaaagagtgagacttggagatttgttagagttgaccacttcttgagggatattaatggatatctctttgacttggtattttaatttcttgaatcaaaaagatattttngtcgaaaacaancatgacttgaagttgttaaggaatatcagaatttgtgggatatttttgcttgttattttgaattacaaaatttatgtagacgatgtgtattccaaaagaattgttaaatgcttattaacggatacatcatacataggagaatgtgttgtatttttggtgacgacaaaagcaaatttcttcttcttattgaccctttcagcatgtgggttgaaattgtcatttaagagagttttggtaaaaagtattagatttgaaataattgaggcactttgtcccaaaatattctaatcactttctccgctctttagccctttagggtttatgacgttaaacccagaatccaacatttgacgattcgattcgaaaatctcagtgaagatcgaaaatggcgaattcaatggctacactttctagaagactctatcgatctcttnctatcgaaccctagaatttctcaagcttccatg

SEQ ID NO: 399 - DNA, 927 bp, Unknown
  misc_feature (1)..( 927): cDNA_ID_1596099_gDNA_ID_1590760_Annot_ID_150006 3000 nt of promoter + ATG
  misc_feature (13)..(13): n is a, c, g, or t
atgaatcagtttntaaaaaaaaatattttttagagttttcacacgttaagaattttattaatgtttaattataaatatactattttgcattaaacaatttccataattctaacccaatagtaattcaataaatataaaattatcaatcaatatttcttgaaaataacaatatcttgttattatttattgaaaatacattgaaaacctaaaaaatacatctttataaaacagttttttttctttctagaaaatacactaagaaaaagctgaggcttcacaaccgaattgttaaccatcttgattttgggagtagtttgtgaattgtaagccaaaagaagaattgactaatgtatttttaaaataaaaataatagacggataaaactgaaattatgtgcattttagttaatcacatactcatattttttttaacacaagtacatacttatttatataaaaaaaattgccgatattatacgaattactgaaattaggtgtataatgaaataaatgttaaaaaataaaaaaataaataaaaggttacgaattacacaacttcaaaggctcgttaaaccctaaaaccttgtctccgcgccgcgttatcactcttacgtttctctctctctctcaacttcttccacagcaaatttcttcgattctctgagctctctcccatccttttcaagtggcttcgtttctaaaagtaagtttttttaatctatgggttctcttcaagtggttgttccttttcgaatctctgtaccctagatgaaatcgagtacagctttaattactctgtttttctttgggattgctctgtttcccttctcttagaggtgtataattactctcaaatttgttgtttttttcattcataaattcattaatattgctgcagaattgattggttgaagaaagtggaaacatg

SEQ ID NO: 400 - DNA, 2750 bp, Unknown
  misc_feature (1)..( 2750): cDNA_ID_3055551_gDNA_ID_1590760_Annot_ID_150005 3000 nt of promoter + ATG
  misc_feature (1)..(1): n is a, c, g, or t
  misc_feature (2088)..(2088): n is a, c, g, or t
  misc_feature (2522)..(2522): n is a, c, g, or t
  misc_feature (2534)..(2534): n is a, c, g, or t
  misc_feature (2702)..(2702): n is a, c, g, or t
nttcttcttcatcttataaagtataaacggaaacaaaataagaaaatgtaatattaccatgaaccgtgttcctcctccataaatcgaaccgtgatcggttaatactaccctgaaccagactataccaaccggttcaggtcaagcaccaggggccgcatctttagccctgccatggaagtaaccaccgtattctctagcgtaatctttgacgtgagatgccgtgtcatagatcctactacgtgcataatccatctgattcgatccaaccgggtgcattccccggaaatagcggtacgtccacgacactaaagccaccgttccgacaagaaatccggagaccgttaagaacccgccaacgacgacaaaaacgggaatccatatcggactcgagatgatgatcaatggaagaaagacaatgaagccgagcacggcagcggtgacgcttacaccaaggaggaagaggaggatgccagtggagataaagagagcgaggaaaccaaagagctgcgaggatgttggtgaatgggatcggagctgatggaaaaacgacgagatggggctgttgctaacggtggtggtggcggtgctaccataattgggccaatattgggcctcgccgctagagaacctttccgccattgtagagagcgattgttgttttgtgtgtgtgtgtgacagagaacagaatgaggaagggtaaaacaaatggaggacagattcagctttgaggtggcattcatgcaatgtttgtaaacacgtggagattggtcttggttttcactttgtctaaaatcgagattttggtttagattcggtttagtctaaatcgtattgattgggtttggtttgggtttatttgccgaaaaccatggaaaagggccaatgccaattgaagaacactaaaccaaaccttcaagttacaagaagagacaacagaagcgaaactagaaatactacaatagcaaattgtgtacctttatgacaacaattttttgtatgttaaaaatcagtagtagccaacgcctctaagctcagcagaactcggttgctgcatatcaccggcttttcccaaaaacacaactcggcctgtaaggagagaaaacagagatcaatatttaattgtttcccaatgaaatatgtaagaaatggagttttaggggttgagccattagtaccgtttctacgaattgctacttctcttatacgtcgaaccaaaccagtgacaggatcagtgaatatcttcgtctccagattaccctctaagtagataacagtactgttgaatgaacacgaaacaagttgttatgacacatacacaaaagcaagctaccattttgaatctagcaagcaagattcacctaaagtttcatcctttttcaccgattcttgatcgatatcagacatgatacatacatttgttccttattctatcatcacataaccttacaagctaaatatgatctcagaagagaactaacccgggttcaacattcttcaacacaagatctgccaagcgttcagggtaaacagagacacggtgccactgcaccgcagaccggctcgcatactctctcggatcttcgttaataagcggtctccggttgttcctgatcccaccagttcctacagagaagagagtgacagttctaccactcttaagcttcttctgcagaggaagctgacccacttgccccaccaaaattgcctgtattaaaccagaaattagtctagaacacactaattattaacctatccagaacgagaatctaatgatgttcacaaaatgactcaacaaagatcatacaaaaggcaaaattgcaacgatcgatttaagaaaaacaacaaaaacagagtatgtatcaattggaattagaatctaagtttgataccttgaaaatgccagagtcaaggccattttcgagtggacgctcttccataacgcgttcttctccggaaaatcgagaaactggatctgaggcctttggttcaatgggcgattctaactcgtcaaagtcggagtcttctggggaagtgatgttgttggtacagaaagacatggaagcttgagaaattctagggttcgatagnaagagatcgatagagtcttctagaaagtgtagccattgaattcgccattttcgatcttcactgagattttcgaatcgaatcgtcaaatgttggattctgggtttaacgtcataaaccctaaagggctaaagagcggagaaagtgattagaatattttgggacaaagtgcctcaattatttcaaatctaatactttttaccaaaactctcttaaatgacaatttcaacccacatgctgaaagggtcaataagaagaagaaatttgcttttgtcgtcaccaaaaatacaacacattctcctatgtatgatgtatccgttaataagcatttaacaattcttttggaatacacatcgtctacataaattttgtaattcaaaataacaagcaaaaatatcccacaaattctgatattccttaacaacttcaagtcatgnttgttttcgacnaaaatatctttttgattcaagaaattaaaataccaagtcaaagagatatccattaatatccctcaagaagtggtcaactctaacaaatctccaagtctcactctttttaaactcaaaacctcacaagtcacaagtcattacgaacactaaaaaaaaaacaatctctgnaactttggttagagcttccttcatatcaatccaaaaaaacaacaaatg

SEQ ID NO: 401 - DNA, 1185 bp, Unknown
  misc_feature (1)..( 1185): cDNA_ID_1596076_gDNA_ID_1590766_Annot_ID_150020 3000 nt of promoter + ATG
attaaacgatcaccattaagaacttccccaagagtttcctgtttctcaatcacaggccctacaaaatataaaacaatcctaaatcaaaagaccgaaactagggacagatacaaatcctaatgtaaaactaaaaggacatcattgagaaacctaacctcgacggcagaacggcaaatcatagtattgataggtctcactgcaaacaaaacaaaacaccaaactttaaaatggggtttaagaaaatgtgccatctttgagttccatggtcaaactaaagctagaacaaaaacatatcttacacattctctaacttgatctcctcctcttagattactcacccgtcatcataagccaataaaaagcaaaatgcataagaattaccaaaagatttgaatttgagaacaacctcggattgtggagaggacccactttgttgacgaacaaagggacatgatcgccggcattataatggttcgacgagcctgatccgattccgatccagaaggtcaatgcaagtaggacttgtagtacagtaagcagaaattgcgccatgaattggcactcttcttctgctgggttccaaaagaaacgaatcaatatgtgcaacaagaagagctccagaagcagtcatcttctaaaatcttaatctaacaacagctcaagaagaaaaaaattccatagctagagagaacacaaagtcacaagacgacgtcgtagaggcacaaagtcaaacctgaatggcttaagccgaactgaactgagtggttttgactagaccatcatcagaaaagtctccaagacggtagtcggatgttagatcgctcaagtaatttttggttttgttggtctcacgttttcagctgcccatttgatttcagtttgggcttttctttatctctaaaggcccaatttcatttaggtttagtttatttgatcattatccttactataaagccttcgcctttcgaggaatttagggtttcttctgtctgtctcgtcactcaggtttgtgcctcaacgactgcttcacttctagcttgattcttcttcttcgtttatatgtatactgtacattagattattcttgtttctcgagcttctgctatagattttgattcttttttttgttgtctttgtttcgtttccaggatcagatcttagctaaattgagacaagctcaaaatg

SEQ ID NO: 402 - DNA, 3000 bp, Unknown
  misc_feature (1)..( 3000): cDNA_ID_3034909_gDNA_ID_1590766_Annot_ID_150021 3000 nt of promoter + ATG
ttgacaacaaacaaagatccttcaacgtccttacgactctgaatgacaaaagacagatcaatcattaggtagggaagcaaacatcaaattatgtaatcgaagattgattgagactaacccattggctgagctcaatgttgaattcatagaaagtgacatgagcggctgtgatgaggatttcctcgatgtatggatcgatccgctggagaactgtgagattgaggagcctcgtactgttttggtccagatttgggattatcttcccgttttgagacatcttttataaatcaaagatcagaattttgggaaatctggattcgattttaccctaatcggaagaaccctagaattctgatttaaggtagctgagagatttggggacggagacgaaaacgctaacttttggaacgcacttcgctattttgttgtctgctttggcaaaaaaaaatggtaatttagttataaaacttaagagaataaatatactgaccataaaagcattagagtttgcttcaaaaatacatcattagagcttgcttaagagattataaacaacattaaagaagaatatttattcaattagagtataatcagtgggttgatccttttaattcaaagatcaattactgcatagtcaatagaatttggttatggaacagtccacgaggacaattttcaaattgaaaacgaaaatttctgtttttattcacatctgtggattgattcgtctttgaaataagcacatctaattcaaagataatataagctacaaaatccattaaccaaaatcactgcagttatttcaaattatccaaaccaaaagctaaagaggagagtagcagcacaactcttacactgtttaacagatatgtctgaaacaaaaacgaaagggtaagaagaagtgtcttatagccaccaattttaagtaggtgaaagctcagaagattctttgtggtggtcccattgtgctcttgaggtacaaacacctgacattttgccagttcttcttcaatagcgagacgaggaagttgacgctcatctgcacattctgaaagatctgcttctcttccattgaaaggttaccaactgcaactcccatgcacagaaccttcttcagctggaacttcactgttgcctttgtttcattcacctttgactccaaggattcctggtggctcacaagagttgggaattttcctgtgtaaagtaaagcaaaggaatgttacttaagaatcatcaaagaagcataatctcacaggataaaggattggcattgtatcaaaaagacattgacaaaagaaatagactactaaaacctatccaaaatcaaaacggatgtaaagaagaacaatggagtattagctgtagccagaacttgcctgccttgttaagaccaggaccaagaagacgaggaatctgcttaatgacagactcagaggccaagaaagcatggtatttctttgcaagcttcttgacgagtttcttgttcttgttaagcttttttagagactcaacatccatgttttccaaccccatcttctcagcctacgaaaagatacaagaaatgaagcctaaataaacaatgaccaaattccgaaaacatcatgcatctacattcagaagacatatacaacatcaaatgaaactaatagagccaccaaatgaaatgagcacaaaaccattatacaagaaacagagcacaaaatgatcaatttccatgaaaagatatatcacctcttcaacatgctgggcatctccgagcatgcagatcttcattttaggacgggggatatgtggtaacttgacagatccactgaaacgcttgtccttttgagggtcatagttcttcagaccgatctggagctcaatagtctcgacaaagttacgtttctttgcctcggatttccctgtgatagtagtgatggcttcacgaacggcctcactctgaagcttactgtattaacccacaagaacagagttaagcaaattaactaaacaaacaaaaatacacaacattgacaacctcaacatgaacaacccacattatagacactaccatacaaaataatcttatcttaatacacctaaatttttatgaggcaagatttagatttgtcatccaaatttagaggccttagtaaagagcatttatgcaaaactgcagaacaacttcgtgtcaatcctagactattaacatcataaagctatcaataacgcacatccaaaaaacaatcacgattcagagacgtattgttctctaattaaacttattgcatatgacagaagaacaatacgtctctgaatcacgattcagagacgtattgttctctaattaaacagtgaatgtaagagatgcgtcaagtacctcattttgagcttgtctcaatttagctaagatctgatcctggaaacgaaacaaagacaacaaaaaaaagaatcaaaatctatagcagaagctcgagaaacaagaataatctaatgtacagtatacatataaacgaagaagaagaatcaagctagaagtgaagcagtcgttgaggcacaaacctgagtgacgagacagacagaagaaaccctaaattcctcgaaaggcgaaggctttatagtaaggataatgatcaaataaactaaacctaaatgaaattgggcctttagagataaagaaaagcccaaactgaaatcaaatgggcagctgaaaacgtgagaccaacaaaaccaaaaattacttgagcgatctaacatccgactaccgtcttggagacttttctgatgatggtctagtcaaaaccactcagttcagttcggcttaagccattcaggtttgactttgtgcctctacgacgtcgtcttgtgactttgtgttctctctagctatggaatttttttcttcttgagctgttgttagattaagattttagaagatgactgcttctggagctcttcttgttgcacatattgattcgtttcttttggaacccagcagaagaagagtgccaattc

SEQ ID NO: 403 - DNA, 1036 bp, Unknown
  misc_feature (1)..( 1036): cDNA_ID_1583732_gDNA_ID_1590770_Annot_ID_150033 3000 nt of promoter + ATG
  misc_feature (842)..(842): n is a, c, g, or t
tatatacttttcgacatatcatttgaattatagcataatagtctcaaaacatgtaaaaacctcatgatagcaccaaatttgcagtatcatgcttgaggtgttgttgttattcgaaacaatcaaatccatggggaccaggcccaattggagcttgggctttttggtatatatatttgttggcctttggtgaatcttccttgatcttaacattttctctctatgcggttctctgttctcttgttaattacttgttgtttccgtaatgggcccaaacgcctttaaaagtcaaatttattgcttcagagttgaaaaaattcaaaaatcagattagtttgcacacaaatcatcgcgccgagaagcagaggttagttatgagtcttagttatggagtcgcaattctaaatctccattttccgggaaaacgcgagaaacttttgttttctttgaatttgctctcaatttggaaacttattcttctatgatcttcggttacttagttatggagtttcagtgtaaaatactcttgattctttttcctcattatcgcttgattgttcgttttttgattattttccgggaaaatctttctcgggaaattttgttcgacgctttgatttttctcatagtttggaatcggattctttaatctccagtttgaaagactctgaatctttcctcattatcgctcgtttgttcttgtttaattttcccgagaattgtttttaggcgcgatcttaattgggattttggaatgtgaatcttttcatgttagtttgttatgtggagtctcagtttgatactgaaagactctgatgaatcaatctcattttcccgagaattantttttcttaatgcgctatgaatttgctcttactatggaatctgaatctttcatgttcttagtagttgtggagtctcaccttgaaagacactgaatctttctcattatcgcgagaaattcatactttgggcacttggaattaattgggaatctgaaaatatttcaggttagtctgtcctgcgcatatcgaagatg

SEQ ID NO: 404 - DNA, 349 bp, Unknown
  misc_feature (1)..( 349): cDNA_ID_1663178_gDNA_ID_1590770_Annot_ID_150034 3000 nt of promoter + ATG
ttttatttctgaaatcactttccttgcatttttacatgagaagacatgttttatttaaccaaaaaaaagggacataacatttgctagtttgtattttcgctcacacttgttgccgttaacctttttcctaaaggtaattagtttttcttcgtttagataaaaaaaaatttggaacgcattgagatgtgaattacaagtcataattggtgaccgacatgtactttttctcaaataaattaattgaacgaaattaccaaaccaaaaccggttttcagatatacacttaaagtcgatatttaagggtttatcaaaagtcagaaccacgacgacagacaaaacataaaagatg

SEQ ID NO: 405 - DNA, 3000 bp, Unknown
  misc_feature (1)..( 3000): cDNA_ID_3055505_gDNA_ID_1590772_Annot_ID_150038 3000 nt of promoter + ATG
gtatactatggatgaaatcctagaattaacaatcaaaatacaattatataatttgaaaaactaaacaaaaatattattattaacataacaaatataattttaaatttcaaaaaaacaaaatttataaattcattacaaggtgtatcatagtatcatacaaaaaaaataatagcatctatctatagatcatcttaaaaataaaaatttaattttttatttaataaaaatatagacttatgatcattgtatttcttgaagatgttatttctatataaataatattaattaaaagaaaaatctctaattttttaaccaaaatattaacccacgggtcaatatctacgtaatacaagtttttaaatttttattccctctaaaacaaaactcaaactacaaacaaacaaatactgcattttaataataaattaatatacaataaatatccaaaaataaaacatgaattacccaacctttaaatgtgtcaaaaatatattatcatatacaaataataattcttataacaaaatatctataacttttcaataaatatattttcggtatactacggatcaaaatttgattttttactattagaggtatgttttagcataataatataatttaacataatacattggtgggagtatgaaaaagaaaaccattttcgagcacaagcaaactatatgacgccagcgatttatggcttcactgtgaccctttcaaatgatttctagagaggttaggattttcaattgattgttggttgctgattaagacactttgattgatgaaaatgacgtttatacttcgatcgattgtttaattgtagtggattgggccaaaaaaccataaatatatgttgaccatcgtatgaagaagctattttagatattattttaaagaaggaagaataataaaatatagtaaaaaattgaattcaagggacaaattaaaatatatttatcatggaaaatcagcagacaagaaaaagtcaaattgtagtagagtttataaagtgagaatattatttatttacaagtaatttgcaaacgcttaacgtaaaatttgccatcagaatccatagtcttattctgaggaaacatatcaaacatataccttatatatgacaaaaaaaactttccaagtcacaagtttttacaatttaccttatatttctagaaaatacaaattaattttataaaataaaaaattattatacaatataagcttcatatatattacaaatttgtcggtagcgaaaaatgtttaaattacgcattatctttaacttgataaaattaattataatatatattttttgaggtagagagtataattgcaaagatctgcgatttggaagttctttttacacaaaccccttgttatcacatccaagttggatggagtttgaattttttgaaaatgacaagaaaattttgttcacgaatttaatcttaaaataaaagcgctcaaattgaacattacttggaatggaaaacacaagatacaaacttttagtaaacaatacaaattaaagctttgaggactctataactttagtctttagaggtagaggccacttttacgtccatgaaagaggaacttagacagataggctgagcgaagtgtgtcaaaccaaagctgaaaatgcaacaccacaaatgagagagccgtggcagaagccacgtaaactaagaggattaagctccatttaggttcttgatcacggatcaagatcaatgtcgctgtgaaggcaagaaccattgaaataattgaaacaaacaatgctaaaagtcccaacattagcttcgttggtaaagtcgtctggaaactagcttctgcataacgagatgtcaggattgacaaaaatatcataatagatgtcacagatgataggagggcaaccgaatctgatatgataaacacttcaaaccagaactcctttctaaaagtagggaagcctagtgtttttatgtcgccactcgtatcgtttccaccaggtagagtaaaggcagctgcaaagaccacagttgctatcagtgttgatacaagaatgcatgcagtcgcagtttctttcatccatttctctccttctttgcgtaagttgtcatgctctttcgtaaatagatcatgcgccacctcctcttttttgttctttgttttgatgtatacacgaggaactatctctttaacagcctggaaagtcattagaagttttgtaaagatatatacaagatgttaaattatacccattgtggaatgtgtttagcataccttgtaccaaagaatctctctttgcatctgaagtgctgctcctgatacaacttgtaacctatttggaggtggtaaacgtgccacaagatgcaacaagttgtcgttggattctttctctttatacatagctatcaaatctttgatggccccgagttcatagattctattaaagattttttcatgacgatttatagcagcaatgtggaacaagctttggttcttatgatccaccgtccatatcagatctggataagaacgaatgagaataagtaaaagctcaagatttccagattgtgcagcatcaaagagtagcattggagatgatcccacaaattgcgaaatttcctccactggcaattttataacaaaactccatagctcctctaccaccatatgagctaaagtccgcattttggcttcacgaaatacccctttaaaaactaaatggaaagagttcttgtcaggtgtgatgttcaaacaaaggtttagactataggttatataattctcaaactttggtcacttctgagcacttgttcctactacttatatatatatattttgatatgaaaagaatgagttaactaagaggtgtacttgtgagaaactcgttaccaaacgacctgttcaccccaaggttaatttgatattatacctgtgagtttttggtctaaattcaccaagtatgagaaagactctattcggtatagagggttcgaagttcaa

SEQ ID NO: 406 - DNA, 154 bp, Unknown
  misc_feature (1)..( 154): cDNA_ID_1692104_gDNA_ID_1590785_Annot_ID_150066 3000 nt of promoter + ATG
taatatacaacttgtaaaaataaaatatttgaataagcattataaataaacccaaagaggtgttagatttatatacttaattgtagctactaaatagagaatcagagagaatagttttatatcttgcacgaaactgcatgctttttgagacatg

SEQ ID NO: 407 - DNA, 1150 bp, Unknown
  misc_feature (1)..( 1150): cDNA_ID_1455908_gDNA_ID_1590789_Annot_ID_150073 3000 nt of promoter + ATG
tctacataaccgttggactaaaatggtaataaaaagaagcagaacagaagtaggtgaataaaactgagaatggaaacaagaaacaactgaagaaatcggatttatatacgtttttgatcatattctttggttcaaactctataaataagtttcttggcttctttcttataagaagaatcgactatactttaagttaaaagaccacaagcaatacacagttacaagaagaaagaaaagtagttccaagtactctctctactttaagttataagatcacaagcaatacatagtatttaataattaacacaagagtcgagcttggactttcttctttcttgggccttcttctattccgattcatcccattgacaaacccaaagcgttgatactcaaatgctcattcgtaaacacgtatcctcattagctttttctttcccattttgcttgaatgtaactaattaatttggtatttttttaattagtaagtgtagtatgtcaatattgtacaactagatgatactgatccattagagtaacactaaagttaccaaagtttcatacaactccaacgacaagcaaggttaggcctttccatccaatattataatctaagaaggagcgattgcccttgatctgacccaacttgcgagtggaaaaatctaatgcttatttgttcattcgttttctgagattctatatcaaataatagtcagtcatcactagaaaatgctcaaacaactaatatgattcatacacatttcatatcatatgcttggcaatattggaccgaacttcatgatttttctgtccatgaatgcaaatgtgttgtgatctctgagttacatctcaaaatgtgaacttgacatcatattctcgttcaaaaaaggaagataagacaaaacatttaagaaacatttcacaatcatagggggcaaaagatcaaaatttaaaatttcggacgagagtggaaactatcgatctttaaggggatgatttggcaaaagtgttgtttttatttttccttttactgttttcgttttatcatctttcaacgtctttctctcccgacggccaaaaaccccaattttgccaaatccaattttacacccagaaaccctaattttccttactttgatttgattttgtgatg

SEQ ID NO: 408 - DNA, 289 bp, Unknown
  misc_feature (1)..( 289): cDNA_ID_1692111_gDNA_ID_1590804_Annot_ID_150091 3000 nt of promoter + ATG
  misc_feature (9)..(10): n is a, c, g, or t
ttccgcagnncttgttcaaacagataaagtcttacccgttaaatttaaaaccaccaatatatgtagtaatcaaattgcttatattattcaaattgcttttttaaaaagagaatttcttacaaaaatatgaagtatcatgaacaagtccacaatgtatttctttttgagaaaaattattaacatctccatgttgcactctatgttaaagattgtttttttcaccatcccttgtacccagaaacaaagcattagctagaaaccaccaaacttaaaaaaaaatcaagtcatg

SEQ ID NO: 409 - DNA, 97 bp, Unknown
  misc_feature (1)..( 97): cDNA_ID_4262542_gDNA_ID_1590810_Annot_ID_150094 3000 nt of promoter + ATG
  misc_feature (45)..(45): n is a, c, g, or t
ttagttcttaaacttcagctgagagaaaaccctaatttctcaaangagtctaaagagacggagagtgagagaagagagaaacatttcgagacaaatg

SEQ ID NO: 410 - DNA, 1354 bp, Unknown
  misc_feature (1)..( 1354): cDNA_ID_3055440_gDNA_ID_1590819_Annot_ID_150110 3000 nt of promoter + ATG
tcacatacgaagattgacagccatccatttggaagctcacatgttgacaccaaatcatgtcacgtgcacatttttctcttttcccatgcatattttgactgctccctatgtgataaatttgactgattaaactataattagttagatcatctcgtatctaagatgattgcttaaaacaatactattattctactaacaactaggttattcccaagatcataacttttgattttgatgtaactagttttgtaattttgtacatatatgagacttttttgaattgcttaacagaataaataattgaattttatgaatataatatataaattttcaatttgatcgacaacaatgaacggtgttttatttataattgtttttttgacaatcatgaacctaatgatttgttttttctattttatttagtcgacataatgaagactaatgaagatacaatatgtgattgaagtgaacaagttagatttaattaagatacgtggaggatataaagaagggtgataaatacgtgaataaaaagtgaaataaacaaaggcaaacgatcagacagacaagtcgtgaacataaaaacgggagagacaggaaaaacaaaagaaagccagacgagcaccaaaaaagaaactgcaaatcttcgtttatgtaaatcttcttaccgtctctctcttgtatttcttcaatttcaaaggtggcttttttttctttctttgttgggtattaatctgagagaaattgaggaaaactgttttcccctttctatgttctcagctttggcacttttctttgagattatggttaattggttcccttttggaaattgatttcaaatcttatccagaagaaatttggtgccttctgtttttaaacaaattttctagagtttccgtgtttaatttttgtttcttattttgttttctattaaaaaattcgtttcttgctcgtgttagttttcgcatttggagtttcgtgacagcgagagttgctcgttttctggggtttagcgattcgcatttgttgatttctggggtcacaacagaagaattcgagcttggaagattgaaatttgagatcttttgatcttgaatcaagcataaattctggattttgaagtttgagagtgacccagtgactttggtctgaatctcggaggtatcttattccaggtaaaatccattaacatctctctctctctctctcaagctcctttcttcttttaagagaagtttatgttgattttcgtggttaccattcatcttcagggatcaaggattagacttaatgcgattaagcaaatgggtttttcacgatgactctccttgttgttggggagattcaataaatg

SEQ ID NO: 411 - DNA, 1487 bp, Unknown
  misc_feature (1)..( 1487): cDNA_ID_3022296_gDNA_ID_1590839_Annot_ID_150135 3000 nt of promoter + ATG
  misc_feature (9)..(9): n is a, c, g, or t
tattttggnctatacattacatttttttttttttattactagatctcaatatttttccgcaaagattacaatttatgaccacagagttatcaaccatgtaggatcatcaatagcaagtaaaccggtataaaccgaaccaggatcatgccattctggtcattacctcttgaagaagaaactttgtatctttataacacgattccgtctctgctaagttcttcgtcttagctgcatcttcaagctgtgtcgaaacaccaagaaaacaacaaacaaacatataggatatatcagaaaagagaagaaattttaaaaaaacaatagtctcttcggttcgaacgaaccaggacttcattagtacacttaccttttcgaaattgtcgaacaatttgttggctaaatcagtgagaggttgcttgtcttcagaggcagcagcagagatgagattgtcgaaatcgtagaacaaaaatgtggatttaagcctcaagtactttttcacatagtttaaagtatctggtccgatcaaatcctccattgccaagagatcaaaagcattctttttaactctatacattcttcctttcgtcccgatatccgctacatacactcctttctttatgaatgttctcgttcccgtcttctcattcacgatatctgtatattcaaatcgaggacgaattcaaaaccggaaatcaaatgattctaccaaatcgaattctcatcttgaatagttgtatggctcaaaatgttcaaacatttgaagaaagaaaacaatcaagaatataaaatggcgcttactgttgtaaataggaggaattggaagaggaccatcaatccaaaacccattgtcttgtgccaaggaaacattattttcgccgagaattccggtaagacctattgagacagcaaatcctaatgtcatccgtcttgtgatctgtaccgaatccggttcttgaaattcttcagttctcctgcaagcaaacccgctggatttcccggtttttcgactctcgggtagtttcggaagagacggtaaagtgttggtgagactgttgaggtctatgaagtgagccattgcagttagagagtaagctttaggtgtcagcctctgttcttgtgtattgtttacggtttttatccgttataaatgagaaaagcggccatcacaaagattttatctgaaccaaggggtgttttcgtaattcaatattttaactactcgttgttcctgaattgataaagtagagttcgtgccgttttacgtgacaaaaaaaacttgtatcttctttgctttttccttcaccgatctgtattgccgagtgtcgccgattccccaaaatcttccctccgttgctgatcataagcacgccgtttccaatcgaaattctccgtgttatttcatcgtctctgccatcttcactgtctcgcgtcgccgtgttcgattgaggtactcccactgctccgatttgagtatttagggtatgtgtatg

SEQ ID NO: 412 - DNA, 955 bp, Unknown
  misc_feature (1)..( 955): cDNA_ID_3239163_gDNA_ID_1590839_Annot_ID_150136 3000 nt of promoter + ATG
tgtgtcaaattagcccaaacgatcaacactcgagaaaagataccaattccccagagagattgagtcagcaagaacactaatctagctagacttgtgtcaagtgatccccaatgttctttgatcaggtagtttattaatacactaatgcaaaagaaatcagaaaatatttgaagaagagatagagtaagaaaccttcatagattgcataaactctcggcaatggctgttgacgaactctttcttgggaccagaagggctcgcgagttcttccatcactccaccagctagttccaaaaccttaacaactctctgcccggaaaaccaaaaataaaaacacaaaaacacattcacatcaaatcgtccaataaaatctctaaggaaagagtgagttttccaaaatttcacattctcaacattctggagtcgctgcaacgaagtgttctgcgtctgcggatccattggactctccacgatttcttttagaccagagagagagaactccaaactgagatatatcacaataccgtcaaatccactcatacacataccctaaatactcaaatcggagcagtgggagtacctcaatcgaacacggcgacgcgagacagtgaagatggcagagacgatgaaataacacggagaatttcgattggaaacggcgtgcttatgatcagcaacggagggaagattttggggaatcggcgacactcggcaatacagatcggtgaaggaaaaagcaaagaagatacaagttttttttgtcacgtaaaacggcacgaactctactttatcaattcaggaacaacgagtagttaaaatattgaattacgaaaacaccccttggttcagataaaatctttgtgatggccgcttttctcatttataacggataaaaaccgtaaacaatacacaagaacagaggctgacacctaaagcttactctctaactgcaatg

SEQ ID NO: 413 - DNA, 182 bp, Unknown
  misc_feature (1)..( 182): cDNA_ID_1692214_gDNA_ID_1590843_Annot_ID_150146 3000 nt of promoter + ATG
agatgaaagaacatacatttagaccctgaagcaaagccaaagctttgatattctcataaagaatagaggtcaagaaaatcatcaacgaaaagccctaatttgcactacacggtatttcccaactattgtcttaaaacctctgccttgcattacaagccacctcttcaaagtgatacaaaatg

SEQ ID NO: 414 - DNA, 950 bp, Unknown
  misc_feature (1)..( 950): cDNA_ID_1568887_gDNA_ID_1590844_Annot_ID_150148 3000 nt of promoter + ATG
  misc_feature (1)..(1): n is a, c, g, or t
nctttcattaccctgtctttccaactattatctacattttacaattagcagggataactcatgttgaaacggggatttttatatttctctcatgaacatatatgatgcagccaacactgcatttcttcaaaggaggctcgaagcaaggcgaggttgtgggtgcagatgtcacgaagctgaagaatctcatggaacagctctacaagtgaagacctaatccgtcctagtaaagaacgtgttgaatagttgcaagatagtttaagactgaaaatttgaaatcaatctaaaaataatgaatgcgctgaaccagtttcgtctttgttcccccctcgttgttcaggattgtaattgcccttttgttttgtttgttttctccatttcctttgggcttagtttccggagatttgtttgtgtccgtcggtgacaacttcaaaaaatatcgacaagtcataactttttatcaaaattttgactaagttgtcaggcccttagtcgacactcgacgcccctgacattaaaagtattgactccagtgccctgtgacggcctaaaagagggcctattttgggactcttttgctggcaaattgcgccatatgtagtggagtaaatgtgtaaaaaaacagtggaatcaacataaccattttttgatcagaaaagaaaacaaaaatgtggtgtaatgagaggaggatatgtggaaacttgatttacttaatttcaaaggagtctaaaacctacggagtcaagagagagttaggccaactaattgtcggagagattgagattggaagaagggtattatggtactttacgaataatattacgttgattaatttggatactttgtcttcttcttcgtctctctcccctcgcgcatcttcggtgctataaaacaaactcacgactagatcattttggagtgagatttacgtttgatagactactacaatg

SEQ ID NO: 415 - DNA, 63 bp, Unknown
  misc_feature (1)..( 63): cDNA_ID_1685373_gDNA_ID_1590854_Annot_ID_150153 3000 nt of promoter + ATG
cacacaaacactctacacattgcaaaacaaaaacaatttgaccattttcctcttcaaacaatg

SEQ ID NO: 416 - DNA, 2070 bp, Unknown
  misc_feature (1)..( 2070): cDNA_ID_3447941_gDNA_ID_1590858_Annot_ID_150163 3000 nt of promoter + ATG
  misc_feature (1)..(1): n is a, c, g, or t
  misc_feature (27)..(27): n is a, c, g, or t
nttactctcctcttaacgataatgtanaagctgcgaggcgtgtgattcaagatctggccaagcgtggctgggaaatcgaggcatgaccgttctttccctccacaagtttttccagagtactactctcttttccctatatagtctacagttattattttcgtactgggaattatcctccatagaagttaaatgctctagtcgaactcagggtcatatacttagctcatcgtttgaactattagtctattaacgattggtttttgttagttctttggttttttccatttggtttgtagtctcatgtatcaagctcatcatctgtaaaggaacgaataaaagctgcgtgctctgacctagataaaataagaaagagtcttcctttgatgcagttaggattgatattctaggtactgacacttgagtttgctagactgaccatagcatagaccaatctcaagcacttgttacgaagtgttggcatgagtctcaaagagtgcttacattatgagaaacaaagaattgcagaatgcgtttggattgattaaacatgtgtgaaagactaaaaaaacatcatatggttcacgttcactcagggaggtggtgacattgactctccggagtacactcttgagtaacaaaagcagtatcttaatccaagaaaagacacaaaggcacaaaggtatgacacgcttctggattgaattttgtatgtttattgtacttttggtagagaatagttgaaaaaatagttttgcaataaaaatgttagaataatagaagttttatcaatagcgaatcatctcgagtcttagagagacaagaataaatcatctcgttacatagagttggttaattcatggaaaggagaaataaaaaattaaattcatagaaaagaaacaaaaaaacaaagcctaaacacacttttggattactgatctctgattattcctctagccctcagttgatcaaacctctccttcaaaagcttcttctcctctctgatacgagcaagctccatattccctagtactattaggacactagagactggaattgatatcaacgatattcgataccaaatatcacgtttaccaaacttttccacaattcttgctactacacccgccatgactggatatggatctggatcgcgagctgtaactactcatacgaaaagaaaacatagacataaatactcaaatccctaaatcggatgataatatgcgatacatcaagtttaaaacgaagaatcttcacaatcaaacaactaaacaagctggatttatagtaatgaatgagagagagagagagaacaaaaaaaacctgaagagagaaaagaccaaagctgctccagagaactcaaaagtagattgtgtgttccgtaccctacccatcttatatagccccaaaaaacatcattccaagattagttgactttgggccagaagcccaacgtatgcagtagcccaaacccaatattaagacaacgacaacccgtttatgctgagcatgggtatgatgcttaagttaagacaacgacaaccttttcctcttcgcactttcaaattgggaagtagagcgagtttttaacagttgaattgtagtgctctagtcgaactcaaggtcatttacttagctcatcgtttgaactattagcgaatgggttttgttagttctttgggtttttcccttttggttatattgatctactgattagttggaataaagtttttcaactttttttggtaagataataataataatacggtggatgcaccaccaactgataagagtctcttgacttagggatatatgatctgctgatccaattattatttattattttagttacttgttgacttgtataattttgttgccaactccatatcttagggaaaaacaaaacaacaactactctttctctactccattaacaaagtccaccatcagaacctaaaccctataaaagccatacactcacaacagcaaaagcatccagtaccattccccccaaacaagtacttcaagaagattggtgaacacactgagaaagttaaaagagaaaagatg

SEQ ID NO: 417 - DNA, 2375 bp, Unknown
  misc_feature (1)..( 2375): cDNA_ID_1692312_gDNA_ID_1590873_Annot_ID_150188 3000 nt of promoter + ATG
  misc_feature (122)..(122): n is a, c, g, or t
  misc_feature (1721)..(1721): n is a, c, g, or t
  misc_feature (1756)..(1756): n is a, c, g, or t
  misc_feature (1833)..(1833): n is a, c, g, or t
ctagctatgcggtcgatgttgtcgttgaaaaggaggttctaattgcctgttgatcgagtttgcatacaacaaaggtgtacctggataaagaaaacaacaagaaaaacacacagttagtaatngaaaagaaaatggaaaagaactagatctaagcaagtctgaaatctcaaatgtaacaaacaaacacccaattagcaatggcgccaaattgataataggtttttcagtcaattatcctaaaacaccaatcatgtcgttgtagtattttaggttgtcaatccaaatgggtgtgttgctaacaatcaagatgtgatcagaagtcactaaatcaagccaagcaataacaggttttgctaacaacagatgacaagatgcagtaaacaacagtagagtaaacaataaaatcaatcagataaagaattcccgaggatggggtaattgagtagttacgtctcctcagtttacaggtgattgacatactcagtaaattatccctagacaacaagtttattaagtaaatctaagtgccaccgcaaaaaagacccttaagttaccctagtcccagactcaatcaccattgacgagagctaacctgacaagtattacgaatcaacaagttaaagccaaaacgctccctgcaaccaataccttggtacatggccacgaatctctggaattagtggttcagacatttcatcgaacaccttttcggcgcggaaatgtctgggctcaaattcctgttgatcagaaagcaataggcattaagaacaactaatccagaagggatctatcaatcaaactcaaccacttagcatactgagaattctaaactactctaacccatccttagaaacctattcactactcagacaacattatagagaacataaacattgaattgaatgaaaacatgataaacaacagtgtaatagcaaaatgataacaggattaacaacaataaacaaaatcaagaacaaatattgaatactaaatagattagagaaatccagattacaaaacgtcaagaacacagtgtctccggaataaaacttaggttaacgaaaatgtaaagtacatgctccttatagcgaaatatttctgaaaccccaatactcaaaacgacgcagtattgggagggattaagaacggtactcgacccagatggtcgagtgagtagtggagtgataagctggagtcttcttttcttccttgtgctcgagtgtctggttgagtgtggaatggagaagactctgaagctggccatcgagtatgtagtcgagtgatggtgatggtgatactcgacttcctggtagagtggtgtgatcgagtgatggtcaggtgtggaggtgatgatactcgaccaggtggtcgagtgaagtgatcgagtgactctcatggtggtactcggccaggaggtcgagtggtgaggtgaattgatgaagtcttctactcgaccaaggggtcgagtggtctgttgaggtcttgaagcttctactcgaccagggggtcgagtggtttgacatgatcatgtccgcttcttccaattagctcgccaacagctccaaatcacctgaaaaacacaaatatgcaacatgcatgcaaaactatcctaaacatgcaaagtgatgagaaatgatatataacagtgatgatatgatgctaaagtgatgacaaatggatgctcaaaacatgcaaaatacacacttatcaggtcggcccangaggcaggcgtatcctttggtgggtatcctttggnggcttatcttatagcggaatccagcatctatgttgaaccgtctacaaaatccactaggaaatcgtactcctccattncttcttttaaagctatctctaggggatcctccagaatgatttcccctacacattctaccagacgcctcttctatctcatcgagagagataatctgatcatgagatgaagcttgcttcaaagtctcattcatatcaaacttcattatgaaatcgccaaggtgaaggtcgatttttcagttcgggacatcgataatggcgctggcggtacacaggaatggtcggccaaggatcagtggtccttatgctctttgtgaacttccaggataacaaaatcagtagggatttgagatcccccaatcattatcggaatatcagccaaaatcccaacaggatggcggatagaacgatctgctagtactagggagattttagtttgtttgaaggtgtagtatccaagacggttagtaactgtgagcggcatcatgttgatgcttgatcctcaatcacataggcatcactcaaaaagttcatcatcaatagaacaagacaacacaaaactctcaggatcacctttctttcgtatcgtctggtcttgcaggatg

SEQ ID NO: 418 - DNA, 386 bp, Unknown
  misc_feature (1)..( 386): cDNA_ID_2038824_gDNA_ID_1590876_Annot_ID_150190 3000 nt of promoter + ATG
  misc_feature (149)..(149): n is a, c, g, or t
cgttgttatagaaaattcataaaacaaaaaaagactttgaattctgtcccagatcaaaatcaactggcaatcaatgactcagtctatgtattttatctattattttggatgttaatcacatctttaataacttcactaaagtcaaaacngacattgtcactaattccatcttataaaatccaggttgtcttcctgtccttagtgggaaatatatatagttactgagccaatgatgaaagaaaagtctacaaacacctggctaataccataaagagtagactttgcactttttggcttttaattaagcttatcttactcgcacgtagtctgtttttttcctgaagatggtaagctgaagaacttctgaaaaaagagagaagaaaatg

SEQ ID NO: 419 - DNA, 1590 bp, Unknown
  misc_feature (1)..( 1590): cDNA_ID_1692324_gDNA_ID_1590879_Annot_ID_150195 3000 nt of promoter + ATG
  misc_feature (13)..(14): n is a, c, g, or t
  misc_feature (50)..(50): n is a, c, g, or t
agaagaatatgannctgaaagagtgaaagaatttaaaaagaggtctgatnagcaagatgaaactatagagaagctagcccacactgttgaggaacttagaagtaagctgaatcagttgcagaaaaaagctcaacctaaaggcgggattgacactatcccgagaaagaagttcacttcaagatggtctgaagagacagtttaccctccagaggaaaaaaaagcatatttttgaagagaggggaattgagtattctgctgcacaattctccagggaggacgctgagtatgatgatggtatcagagaggattatgcagaccctctctatagttcattttcctcttgataagtgtgaggagtcaagctagagactttaaacaagctcacttgggaggaagtcccatgattatccttgtgaataatttttactttcttgttatttttgatttgtttttgttgtgtttgtggttctcacgattagaggaataacgtgaggctagagtaaaaatttaaaacttttactctacagatagcctagagatcgagtacattggtcgagtgtgagtgatatttaaaacccaaaaaaatttaaatcattattttactcgaccaacagaagctacagagacttgcagggagaagctatagagacttgcagggatttcctgcagtttacagtaggttttctgcaaattttctcagtcaacagagtgtgggccacgcgcttaggataaactggagagagaatctaaaactcaacctcaaccactctttttgaagcttcactcgacttcaacaaatccactcgacctacctcttttcatctcaccaccgacactcaaatctctctacaccacgaatcgccgttcaaagagccactcgatccagataacttcactcgacctcctagagccactcgacctccgcgccgccgacaccagttcattccctccgtcacccgaccagaccacttcactcgattccttttatatactcgacaaattcatccacatcaaccgccgtctctttcaaaagaagctactcgaccttgtttccccgtctcgtagccgcactcgaccgacggcgcgtcaaccgatttcaacaattcactcgacgaccataaagcactcgacccctgcaaaagcaactcggtttcttgttcttgaattcaacagagcctttcaacttcagagaagttactcgacctctaggcttcacgactcactcgacctactgaagcattccaactcgaattcggagaagatactcgatccaattcgtctaaggggaactcaggaacagctcagtctactcgagtacagaattgtactcgatcaatagggtctatttcattgcatattgataacaattttggcttcattgctatctttgagactaacctattgacatttgagctttgagttctaaatttctacaggggaatcatgagcaattacagtggcagttcttctgttgatcctgactacaacatggatgacacatagtcgtcttcttcaaggcctgagagagaacaaagagaatatgaaagctttagaagaaaagctgagatagcccgagggaagagagcgatg

SEQ ID NO: 420 - DNA, 282 bp, Unknown
  misc_feature (1)..( 282): cDNA_ID_2994796_gDNA_ID_1590883_Annot_ID_150199 3000 nt of promoter + ATG
  misc_feature (52)..(52): n is a, c, g, or t
tttttatacgatcagattcgtaaaatctctgttttgcgatctttctctgcgntagatctctgttttccctagttgtgattcgttttgatctttaaactctctcatactctgttttcaataaatacgacaaaaaaaactgcaaaagttttttacttttttaacgattggtggcttttaccatatgacaagaagtacattttaggattgtgtttggtttactgactgattttggttttgtttgtggttcaaatgtagtaaaaaaacaaaaaacaaacaaaaatg

SEQ ID NO: 421 - DNA, 3 bp, Unknown
  misc_feature (1)..( 3): cDNA_ID_1692403_gDNA_ID_1590901_Annot_ID_150226 3000 nt of promoter + ATG
caa

SEQ ID NO: 422 - DNA, 840 bp, Unknown
  misc_feature (1)..( 840): cDNA_ID_1692410_gDNA_ID_1590903_Annot_ID_150230 3000 nt of promoter + ATG
  misc_feature (11)..(11): n is a, c, g, or t
  misc_feature (565)..(565): n is a, c, g, or t
  misc_feature (607)..(607): n is a, c, g, or t
caaaattagtngtaaggttaatctttgtaaccgtgtcttcttcaaaatcataaacttctttttttgcttcaattttataagagtatttggctatcatatctatagagagaaaattggtttgataactacgtgagtttgttgaataatttttttaaaggaaagatagataaatagtggtttgaatattttattttatttcatcttatcactatcgaatatgtttttcgttatttggattatttttttaataataaaagccacatttgtttattcgccctaagctatatttagccttagcacgacactgaaaatagaaagagaccagagtcgttagattttacgagtgacttctaacttacgagattaaccgcagactggttcaaaagaccatcctcactttcctaagatccaagtaatcaaaattcactttcactcaaatcacctctctatttaaacaacaacaccactttttcaatcctcattaacaaagttaaaaaaacaaaacaacaccatcttcactttttttttcttcttattttttgttttctttctctatacatattgnatcaaaaaataaatacattttcctgtattttattttttttgngagtattaaagaaaacacaagacaagaatgacatacacagcggtaactatgctctctctctgcctaataaatatcttttcatcttatggcaaagagtgtcgagttttggcccgacttgtaatgtagtttcatcaatgagactcttaacattatatcatatcattgcctcactttattacattttttgtaacgttacgcgctgttagttctcttaattcattatattaagcatg

SEQ ID NO: 423 - DNA, 2084 bp, Unknown
  misc_feature (1)..( 2084): cDNA_ID_1692421_gDNA_ID_1590906_Annot_ID_150233 3000 nt of promoter + ATG
acggttgcctctgccctttgagtggtgtcctgcagatgttgtgagtctatctgatgttagagatgaacagcttgctgtgttatttcaacttgagcatacattagaaatggagatctgggttacaactaagattgagcccaacatgttgtcgtggggcagcaaggtcttcttatcagtggatatgacaccactcactggcaacgattttatgttttcgtttatggctacaagtttcttcattgatgaagagaagaaaatcgctgtggtttttaatcaaagcaaagacaggaagcacaacacagctttcatcattggacaggatggatccttgaaagaagtggatcttggagaagttcgaaacagagatctcaaaccacttgtgtgctcttatgttccaagttgaatgcaacttgaatagtgcattttacgaaacccataatctatttcttgcacttttacttgtttctttttctcttttgtcatcttcttctttgaacaatatatagaaatttaattcgtctctcatacttctttttgtttgccatatttgacttcgttttgttgccttaggttgtttaatttacttcttctgttgtagtagactcattgctaaatctctgtttctcttctaacatttgttatgtttgtattcttggaaataggcagctctgctagctgttgtgatttatgtagaacagagtaggctgcgtttaactttaaaatttgcaagtaagtacgcttagatttgaattttccattttaacttttgtccttgtcagttttacaaagtgcaaatggctgctaggctgacacgtagaagattgaatgatttcttggagttaagttttgtcctttgatactccctggtcttcaagcatacttacagagtaaccgtagctgaatatcaacctcaagcaagtcatggaaccatacaccttcctccaatccaccagttttgggctggttagcgctctcctagatttatgtttcatataagctaaccattaaaagtttaagagaagcttgtgtagtaagaagacaagctaaatgagttctcagtagccttaattcttcttctttttttttactaaatatgagcacttatagatgaagactagtgatgcattgattatgagaatactaaaaagttaagatgaatcaaaaaaattatttggttagtattaaaatcttcaaatgaaacttagtgttaagatttgttgagatctttcatactatcgaagtcatgtagagtggaggtacgtagccaggcctaggagaagagaagagaaggagaagcaagctaagaaactgaaagcctaaaaacttttgaatgttgatgattaaaaaagaatagatacatgctaacagcttatgcatttttgaaatagtttttgttaactgtcgtgtagcttgtgtgtaaatatgtcgacgacaagtcaatgatgtcacacacactacacaaaacaaaacactgcttcaaactaccttcaacttcgagtccattactataagcaaaagtcccaaatcaaaacatcaattttcttgttcttgtcagctactcaaacctcaacatgttacatatattttttcagataaaacaaatcattctcatcgttcttatctgaccaggaataattcaatggaagtatgagtttgactcggtttccttttgatattagtcgtacttttcaacattttacctagatagagccgtcctcttataattattcatcatttcatgcttctcatgttacatttctgcaatttttcaactctttgattttatataatcatttgtttcctttcttaatcaaatccatctggctaacattatttagcttgatgcaattaaggtatattatctaatgaggtgatgcttccacgtctttatattattataatccctcaacaattttaaaaaaagatcctgactttcaattttctctcttgtttcttcttttgatcatcttcaacaaaaaaaagttacgatctttctctccgggtcatcggaatttgagctagtttagctaaagttccgatctttcctctctgggtcgtcggaatttgagctttttaaaatcatg

SEQ ID NO: 424 - DNA, 1559 bp, Unknown
  misc_feature (1)..( 1559): cDNA_ID_3055286_gDNA_ID_1590931_Annot_ID_150275 3000 nt of promoter + ATG
tttttcctcgacaagactcttgtctcttcaatcaaaaatgcgttggtttaattttatactgtatttagtaagtatatatgctttgccccacactcatgcattaatacataccactttattggtctctagactaatctggttatatgtgcccatcattaattcaaattcattaacttacgtaagaataccacccttataaatcaactttttaaaaaaacttatgaatcaacatttaatatttaaaatttgacaaacctcgttataaattttatataactattgctaaaaccattgcttaataatttgaaaaatccgttgcttaatagttaataattaatcaaaaacacattgatcaactattatattctttttatgccctcgatttggtatcttgatatatcaagtggctgttacttgaattcagaatctacgttttcaatgttgtttcctatgatggtcaagtggccgctacttgatttcagaatctacgttctatgatggtgaagatatcgtaatgaatgttgtagtttcttttattaaatttttagttggtatgactgatttaggttgcagccacttattttaatttgtataaaaaattaagtgatactactaattgatacttttattgatttatttaatatgattcaataaatttggtgtaaatctatattaatttccactaacatcatccttagtactgtagaaacttgatttagtacctacagcctttctagaacaatttttatccaaaacttagatttgtttacgttcatgttccttgttccaaataactaatttaagtgcttttattttctttctttttttgacattatgcctttgttaaagtaatgcatgtcacatacagtacaagaaaacacgagtttcagacttcagtgtaaaacaggattacatgtattgtaagcgaaaataattaacatcaaatagtaaaaatattttacactatgtaatgttaatgatgtgtaagattagcaagacttacacgttcgcggaaagtaatctaaattatatacttccattaacaaaaggtaatctagctagaattcttaattgactttgatagctagttcttgtataaacaataattcttttctcgttgatatatatatcaaagtggttatcatctatctaaaaatctatgcataagaattagaatatccttaaaaattctaccagtaactttcaatagagagttatcaaatatgaatcatgattacatcattgtttattacacacatatttacacgtaacacataattagttccatggtcatcgttgattactctgacgataatgtaaactaaaaccgggtggatttttaaccggacccatttgccatcactctccataaatcctaaccgtccatctaatcaagcgtagatctaacggtggatatcgaatcaaaggttaattccctccctatatatattagaaaattgatcctgaagcgtgtaccgtacacacatccccatacgaacactcacaatcgttaaaaagaagagaagagaagagagagaaagcttaaatcggaaaaaatg

SEQ ID NO: 425 - DNA, 3 bp, Unknown
  misc_feature (1)..( 3): cDNA_ID_1692542_gDNA_ID_1590933_Annot_ID_150278 3000 nt of promoter + ATG
  misc_feature (2)..(2): n is a, c, g, or t
gng

SEQ ID NO: 426 - DNA, 2522 bp, Unknown
  misc_feature (1)..( 2522): cDNA_ID_2992736_gDNA_ID_1590940_Annot_ID_150290 3000 nt of promoter + ATG
  misc_feature (11)..(11): n is a, c, g, or t
  misc_feature (30)..(30): n is a, c, g, or t
  misc_feature (123)..(123): n is a, c, g, or t
  misc_feature (133)..(133): n is a, c, g, or t
  misc_feature (1429)..(1429): n is a, c, g, or t
ttgaaagtaanaaaagctttcgatgaagtnttagacagtaacaaactaacaaacatatccgctcaactaaatttacctaacaaatttccatagttttcaaccaagatttaaattaaaaatacnctggaaattntaaacaaccctaaattatgttttttttttgttgtgtgagagcgaaatagtcggaattagagtaagaccaatcaaattttaaatatttatcgtaacttttatttaaagttgctttatatgatgtcttgaatctcaattgccttgccaagaaaaacaagcgctgacatatataaaaagcctaaaattacagaagaaaaatacaaagagctagaagaaaaagaaattcccctgttcttccgtaaatatcgttaattcgttatgacagagtttcattctctttgactagatctttatttttttctttacaccgatacaagtcaaaactcttaacaaacaaatatttagatcaacatagaccaaagagtcaaagaaataatgtctgtctccataaagtctccaacttttataacaaattttccgttgaatatgacagtaaataaaccaacggtctagttcttatcatgtctaaaaaccacaagctccttcctcatcttacgctcccctctttacctctccttttattctccttctcattctcctctcaacaactgatcgtataatcattctcacggagacgagtgaccaaaacaaggtctcccgcttcttgcgaagattaaacgaatccatttagattttaaaaaccacacaaaaaaaatatgggtcggctcaagttcgcatgtccggttcttgagatcaatttaatctcagctcaagacttagcccctgtctcaagaaacatgaaaacgtattccgtcgcttggatcaacaccgatcctatgagaaaactcaccacgcgtgttgatcaatccaacagagctaaccctatatggaacgagaagtttgtgtttcgtgtcaacgacaagattctctacgttgacgcatcagcgattgtgattgagatctacgcagcggcttgggctaaagatgctcttgttggtactgtgaatgttcttctcagcgatctttttgctccttggtctggttttggtgatggtaacgacggtggtggtgggaataacaacatgaggcttgtgactcttcagattcgtcgtccttcagggaggctacaagggtttttacgtctcggtgttgcacttcttgacggtggtcaacggagtatgcctttatctattgaggttttcgatggaagtcgaaaaggagagaggaatagtgttaaaagagaccaagaggcttcaagaatgatgcatcgccgtacgaatagcgatcaaacggatttaaccacgtctacgaatgattacggtgtgaaaacaggggttgttactggcaatggaggagnaggtggtggtggtggcggtattgttgttggtgcggatagtatggttaatggttcgctttgtagctctgatattggaccatcagcgtctgtggttgcggctgcgattgcgcaagggctttacaatagacagaaaacagcggttaaagcggctaacaaagaggacgcaagttcgatacttgaagggaaaacagagggaattgagcatagagttgaacggtggagagcagagaaaaatggcacgggtggagcgggtggagcggctggatcaagcgatgattctagcgggaaaggaggagcgggaaggagaagaaggaggaggagaagaaaggagaaacaacaagggaggagaaacggtggaggagagggtaagaaagggttgttttcatgttttggaaacgtgtttggatgtgagatttcgataacatgtggcggtggaagcggcggagaaggagacagcacaaagaagagatataataacaataaagtagtaaatcttagtgctgtagacgaaacgtttagtcattctgcgacttgagataagagaaagtgtttacttatttttggtttcttttggtggtgtaaaacgtttgatgatgggttaaaccatacagatttgaaagtattgaggttaaaacgtatgaataaactttcccgttacatttctggtaaatggactaatttgaatatttgtataatactggggttattgtgaaaagcttttaaagaaagggaaaagaaaagagagctttttgagaaacgcattaacacaccataacttcatcatcaaccttctcctctttcttacgcaattacaacttcaacgcctctctatctcttcgccgtgaatgtcgagatagtcgtaagctctctgcttttcaaatttctctcaaattgaggtagagagagagggcacagagatagagagagaggggcataggaaacggtgattttcccagttcccggaggaacaatcggctgatttctctgtaatcgaagaatctaaacctcacccactcgaaatcagctcgtgggttttggggggtctctattaatttccaaattctggagaaaaatcttgtatttcttcaagatg

SEQ ID NO: 427 - DNA, 415 bp, Unknown
  misc_feature (1)..( 415): cDNA_ID_1692588_gDNA_ID_1590946_Annot_ID_150300 3000 nt of promoter + ATG
tcgttggtctcctgagctgacgacagcgagcttcgacgattgtgggccaaattactttttcccaaaaaaaaaacccaaaaatgtccatatcagcaattagctagccacgtcatatatttgacagttggataatattcagttagcttatattacaaaacactgccaaatggccttgcctcattggtcatcgccattacattaatggttttgaaatccgttgacttttgagcaaagactattttggtcaaacattgttttgcatttctttccagttttcacgcatgatccatcttatctcatctttgacattttcgtccaacaaatgcaagtcttgatttttgttttcttccttcattacacaacataaaaagtctcaaataacaagaccgacttgacgagttgagaaacaagtatg

SEQ ID NO: 428 - DNA, 2669 bp, Unknown
  misc_feature (1)..( 2669): cDNA_ID_3055241_gDNA_ID_1590947_Annot_ID_150303 3000 nt of promoter + ATG
  misc_feature (2394)..(2394): n is a, c, g, or t
  misc_feature (2410)..(2411): n is a, c, g, or t
ctggccataagctcggacaaaggggaaatcatgcaggctaagctaggatcgtaaagaaatcagttggatcagctcgcccaaagctcaagctcagctggaaggagtgacggttactcaggtcgagtgacagtccagctcgggcagctggacgagtgacggttgagctcgaggtagctggacgagtgacggacgagctcgaggtagctggacgagtgacggatgagctcgaggtaactggacgagtgacggactagctaagcggttatgggcgaagagatacaactcttcagaaaggtgcaactcttcagaaaggtgcaactcttcggaagggcgcaactcttcggaaaggtgcaactcttcgaaaatgtgcaaagaacggatgtgttgattcgggaagcatccattcgccccctatataagggagggcgcccaggaccattccactcaccacaacacaccgaaaacacaagaaactcaccattaaaactctctccctcttgggagaataaatagtcttaggattcggtagccgggctgtggccggcaataaagaagaagggtcggatcgacytaacctcgagaaggaaggtaagggatcctagactttgagtctaagggttctaggatgtgagttagtagtcggatccttgaaaggatcgactagagggctgggtagtatccgggtcatgtgcatcctacacaagactcggtccgggtagggatcggctgaggcggggacgcggctcggcggaggaacggcgggtcttaactgacctgccgagaatctgccggactgatgcgcgatcttcccctctctgaattctctccacggatccgagtagtgtatggcatatagagcattgcatggacttgcatatgattaagtaaatgagcttacttatggctctatgactttcaggaatgaatggtgatcgtgggaaggacttggcttaggcgcgagagactcaaggccgggatgatgggtggtgatagttcggatagtctagggatcgattatatgacttgtaatagcttatatgcaaactcgtaggttgtatcgaatcctttgcttaatcaataaagtatccgattgtttgtttactctattcgtctcatatattgaatcacggaatcatatggaacggattagactaggaaagaacctcataaacggttagggtcgagtcacttagtggcttgggtcgagagaactcgtccggactttaggcagtccggatcggggcctttcacataagcttctttgcttttggctcaaaactctcaaggaccctttgtcgattagccctatctatctttttatcatttttctggtaacttttggagtatgccccttattgttgtgctttaaacttttgaactttttccctttatctttgtatttggcttctacattgtggaatgaaaacaaacattgtccaaaaataaaataaaaaaaccaatgaggaaaaaaatcaaacaaaaataggagaatcatagtcatatttttggatttaaattcaaatcttttttcatggtacataatctgcagcatttacagcaaaaatgaaacaaaatctgttagttttaaatttgaaaatatgtttgcaccctataataatctcacataagttcttaaagattgaaaaacaaaaatggttgcatatgtcaagaacaactttttattggttcatataatagttttacttctttttgttatctcatcatatgcaagatttaatacgaaggttacaacagatgaaatatgtggcatgtgcgcacgcagagcagtcaatgcgtcattttgctatgagttcatgaaatcatcccctcaagttgcaacattggatacttatgatctctccaaattttttatcaattatgattttcaaaacacctttgatctaataaagcatttccagtcactcacaaacaacacaaccgatcccagttctaagagttcttatgagctatgtttacatctttttaatcttatcaatcctcttgaaaccgcacttaaagctttggcaaccaatgactatgacactttaaacaggaatgttgatgctatgtctcaattcgcgaaggaatgtgaaagcgagctgtcaagtgtcatcaagcctattccaaagctcttgaaaagggtttctatcgtcgaaaatgtatccgacattatttttgtaattgtggaatgttttttaagaaaagaagaaacttcatgtaaggaatcagtatcaaatctacaataataaattaataatcataatgttgtttggtatgatgttgccattaccgatttacaccgataattaattgttttagtgttcagaaaaatcgaaatccaccacaagagcataccaaatcacgaaaaagcttgtttgatagatcggattggancggctttcgtatttgnnaaagtcatcgttcacctgtgaaaaattacgcaactccggcgaggactattttcaactatgggcctagcccaattagtccaattagtaaggagcttaaaatgcttttctcaaagtacggggcaaaagtaaaagaataaaaaagtagtggaccttgagaaaagtcatcaccagctttccttcctatgccacacaaacgtgttcttctgaatatgagtcaaacacagagaagattaggagaacgtggaagaagaagccatg

SEQ ID NO: 429 - DNA, 7 bp, Unknown
  misc_feature (1)..( 7): cDNA_ID_1692605_gDNA_ID_1590947_Annot_ID_150304 3000 nt of promoter + ATG
tcaaatg

SEQ ID NO: 430 - DNA, 764 bp, Unknown
  misc_feature (1)..( 764): cDNA_ID_1692663_gDNA_ID_1590961_Annot_ID_150332 3000 nt of promoter + ATG
  misc_feature (241)..(241): n is a, c, g, or t
cactgaaatcataattaacatgatgatttatacgagtaaatgatttgattggcatataaagaatgcctaaagatggtgtgatgaaaaacttaatacaattctaacggctattttttgctatatactgaaaataatatcgtctggagttataataattagaattttgtatggttaaatttctattggtaatgtaaccaatgaatggaatgaaacaaaattgatgtagtcagaaaaaaaatcntatgaaaaatttgatatattttttttaaatggaatgaaatagctggagactaacacacattttcccatcatctatccaaatatatgtttaaatggtaaaagatagaatagataatgaaaagaattatgagagattcactaccaatttcaaaattatgagagattcactaccaatttcaaaatatctctaaaaacaaagttttcttctcttttttttttctttcttttctagatcttcatatctaattcaaaagagaagctcacttttgacgagcgtgaaagacagaaggtacttggataacacaactagttcagaaaaaaagtaggtgaaaattggctaccatcttgcctctctcatacataagtattgtttacttccttggttcttaaaatattagaacccattttttgtgtttctaataattgttttgttgttatctaagactaaactcatagttttgtatactttcaggtcagatcgaagcagacaatactgatattttggaggaacctattctaaaatg

SEQ ID NO: 431 - DNA, 930 bp, Unknown
  misc_feature (1)..( 930): cDNA_ID_1692672_gDNA_ID_1590962_Annot_ID_150335 3000 nt of promoter + ATG
ttctctagccgaaaccttttaagttttagcttgagacccttagcttcaattgtttttctcttggacactgtctaactttgattcttcttggaattgattaggaaatggctaagaaagttggagaagttatagaaaaatcctgcgtagagaatgggatcacaaaggtggcctttgaccgtgcaatttacacttaccatggctttagctgcttcagcaaatagaacacggtctccaattttaagtctttttttgttttgtccttctcagaaatttgcttgtatagaacccatgattgaaatttagattagtcggcttggaacagtgttaacttcttcctttttaatgtgttcatttgttcttactacttatgcatctcaagaatgtttatatcgtctatacgatgataatatatttgaaaatggttgatgtttacaaagcttcagaaggtaagacatcaaatgtgctgcttagttaagagacaggtacaagtgcttgcaaatttaggacagaaggacaaagacagagacgaaaacttcggcgcagtgaaggcagttcatatctgtgaagtatagatgcgatatggttggaagttaagtaactgatagtctataaatagaaaagtgcgaggtatatgcccaccctggagttggtatgtccgcttctatctcatctacctattattagcaaactatagacattattagttttctgttttttccttttatatactcacttctttaatgtagattctgtttaataaaaacagtaacagaacagaataaaatcttgatttcttttttttcctcccattcaggtctcatacttcgtttggcaatgcaatgagggagcagccaaggcagtattgaagggtgaagcagtatctcgtttcttgaccaatcatcaacctgtaagtagatctccactaggatg

SEQ ID NO: 432 - DNA, 2681 bp, Unknown
  misc_feature (1)..( 2681): cDNA_ID_3055223_gDNA_ID_1590964_Annot_ID_150342 3000 nt of promoter + ATG
  misc_feature (2)..(2): n is a, c, g, or t
  misc_feature (24)..(24): n is a, c, g, or t
  misc_feature (85)..(85): n is a, c, g, or t
  misc_feature (103)..(103): n is a, c, g, or t
  misc_feature (162)..(162): n is a, c, g, or t
  misc_feature (225)..(225): n is a, c, g, or t
tnctaagaaataagaagatgcatntttcgtcaagagacacatgattcaacgaatttagacatccaacatcaaaccaacacgaatnttagtaatagacaagttnggttaatgttggaacggacaacgtcccatatttttgtttacattctatgtttccaatanaaaatttggtttcgcacggaaaaggtggaatttaagaatcattgtatacaatactataaatgngatacttaaactgataactgtaagtaatactcctagcaaactctgatttttcagcttgtcataacttttgttaaccttttaagagacaaaactatcactagacatttatagcttgactcactatacaagtattgacttcatcagttgcaattttgtggggaagagttggatcaaattatgaataagggctattaagtacggtttgcctatcctgaggtactttgctctatatgggaaggaacatagttattactttttataaacataaattttgacaactgttgtttttattgtaaccaacaaattgaggatctttatagcttatagtttctttggattgattacgtaaactaattgaaacgactagtacctcctcccctatttgactaggatacaatcatacaacgtaacaggttgaattgccgacatatgattttattaaaaccagtgtttaaaaactgatattagactatctggtcgaaccaaattcatttataaacaaaataaagcaacacaattaccatgaagactagaaaaatacgataagtaaagctataaaaatatggtgttgtttcaatttttaattatcttgttttactcttaatattagataatgatattttagctgtatgcttgacattgacatatgttttgtttccatttaagaataaagcactgttggtacaaggttatatgctgtgtcttaactcttaacacaatattataacttaatccacaacctttattaagaactaatttcgtaagatatggatttggattacgaaagtgactgttgagtatgaagtctatatcatatattaatatgaaattaggttggtctcttcatgttttttagatcaaccaagcagaagagagtagagggggaaatatcaacgtgaatgtcacgtgaacggagtcgtgcgtgcgtgactactcgtggcgtaatgtcgggtcgaccactgaagtaatgggctttaaaagttgaaggaccatatccatatggctcttgtgggaaccactttacacttagtcttgctcgtgggatcgatctgttttttgtttcttccttttgctcaaaattgatctggttttgctattattatatcatgactactagcaaaacttacatttttacttatcccatcaacattttcagatcaatttttttgtaaacaagattaaagtgaaattggactaacaatgattttcaaattaggtgtgtatgccctgaaactcagtatctgcttcatcccgcgatcttccaaatataagaaaaaaacggtcacctaatttaccgacaacaaacctaatccactaagacattattcaagatctagaaacgaaaagtcatgagatataaagatgcacgtgggaggacaagggaaaggacagaaactgtttggttgggagacaaataagtgttacgaaaggggaagtgaataagtctctctttaaactcaaaacactgagaaaagagtttgagtgtttttgtgacagatttggcttactgtcttgtctccgtcaagttgtaaataccaaagtcttatcatgttttttctctgtctcctctactacaattttaagaattgtaccacaaaccgatccattcattcatcatccaagcttcttgattcaaactggcaacatgttaactcgttatagatgatagtttggtgagttctataaaattgcgattaaagttatttctcttacaatttttcttggaacattttatatatgtataacttgtacatgaacgtagctcaaaagctaagaaaaaggtagcgccataatcattatgatgaataaaataaaccccagtttctctgaaagtgttggtttttaccacaccatattctagaagttaatttattggggttctaccacaccatatgcaccatgtgattcatgttattgttctaattctaaaactttcactgcgattttaattataatggttcactaatcactatgaaaacattagatgaaaattactaacacgtgattcttccagaaatcccgaatctctcagttacacaaaaagtaatatttttgtcatgacccagctttttccaatgccgtacataagcatggggacaggcaactaaaaaagctacaccaatcaaggccttagttcataatcgaacaatcacgtttagcccaaactttaaatgggcttaaaataatgtgggccttgacccacaaatagaaaaacacgtgacattccctctttgataatgattgcaaaaaaacagaggtgtgtttactcaaacgtttcccgtgtcctctacggtcagtatcattctttcggtgacgctaatttctccggtggttggaggagaacaaagtctcaaagagacggcgaacgaagacgaagacgaggagcgtggagagagtagacggcgaacgaagacgaagacgaggagcgtggagagagtctacctctctcgacgatg

SEQ ID NO: 433 - DNA, 195 bp, Unknown
  misc_feature (1)..( 195): cDNA_ID_1380819_gDNA_ID_1590981_Annot_ID_150358 3000 nt of promoter + ATG
aaaaaaaaaacttagaaaaatacgggttgtttgaaaatgacagaatagacgactctcgttgcattgaatttgagtgaaccccacactctctttcaagtctcaacggccatctccattctcttctatctcttcttcacaaaactctttcacccatttttcctccattaaacaacaaacgacctcgtaaggaaaatg

SEQ ID NO: 434 - DNA, 351 bp, Unknown
  misc_feature (1)..( 351): cDNA_ID_1711067_gDNA_ID_1590986_Annot_ID_150363 3000 nt of promoter + ATG
  misc_feature (73)..(73): n is a, c, g, or t
tctcttcgtaacgattacatgaggcatagctccttatttatactaaagttaagcccttgtaaaaccctagttnacattacacatgtcatcatctagttaccataaatctattctttgttcattgtacctcttttgcttgtgacaatcttcctcttttgcttgtgtaataggctaagggtattaaatttaatgtttatttttgtataagagaataattaaagcgttttttaatcaaaaaaattaaacacctaaagccgcatcaccagcgttgaccaacgttccggtcaatcgaattcggtattagggtttaaacccaaccgtcccccatttctccaccgcgcttagctaatg

SEQ ID NO: 435 - DNA, 3 bp, Unknown
  misc_feature (1)..( 3): cDNA_ID_3055727_gDNA_ID_1590989_Annot_ID_150367 3000 nt of promoter + ATG
tct

SEQ ID NO: 436 - DNA, 1636 bp, Unknown
  misc_feature (1)..( 1636): cDNA_ID_3055734_gDNA_ID_1590990_Annot_ID_150369 3000 nt of promoter + ATG
  misc_feature (1076)..(1076): n is a, c, g, or t
aaaaaaaatgaaagacaataattcatttgcatagaagttgttgtccgaatattgttatgtgctttcaaatcaaaatacatttgcaatgacaaaccaaaagagataatgttggtcttctataagtgttgtcgtcgacgacctgcagctaaaagaaaaaaacatgtaaatacaaagcattccataatccaaagcattctctaattcaaaaactcaaaactgaaagaattctatcaaaaacaagactatctgaacaaggaaaataaaagttaccttagtattatgaaagtaaagaatgttgtgaaaaagatgagaatcagagcacatatgacctggaaaaaaaaagaacataaagctgaagcatgtaaatttaaattatgcatttcataccttgacaatctcacacgtcaaaccaagatgagcctgatttcataccaagtaaagaatgcggtgtgaccaaaccaagataaaaacaattcattcactataaagaaacaggaacataaaaaaccttaacaattaattcaaacaaaaacaatccaaacacatctcaaattcagatgtacgaactacaattcatagacataatattcagagatttcaattgatagacatatgacaaatacattctacatacaaaacatataaaaaattgatctcataatcgagtgtgaacaaataatctacagcctataaatcgtcttcaatcatcactaataaccaagaaagagactgattatgcattcttacaaaccctaattcgtttacatcaaatagccctaatttattttgcttgaattcccaattcacgaaactctaatttcaataacatctaccaacccaaattaatcacgatttatacaaaacttaaagatagaatcatacctttatcatgagactggaccatggtttcacacaagactccgatatgattcacaatcctctccgatttaaactcgtcgacgttgagcaccgtcggttgagatgatgagcacagtggattagagacgacttccgggcgataatctcttccaatttgatgatataaaagcatgaagatcttccggcgataatcaatngttcaattgcacagccgagttcaagagagagagagagatcgataaatgaaaaaaaaaaggcaaagaagaaaaaaacttgttttgtcaaaaaagctcaaccaatgaaaacatgccacgtatccgatccttaacatcatcaaaaatcttaaaattaggtgcaatcctaacatttaatcacattttttatttattttttctcaaaattactcaaagattttggttaaggatctgttaagtccctcccaatagacctgctcttacccacttaattaataaaccggaaattaaaattggttacaaagttaaaaactaaaccgaaactaataaactaatcagacaattggaccgaagtaaaatcatctaaccgggtagggtttaaggtctgatgaatctgattcacttttgaaactccttcacttccaataacacttctcgaccatctaccgccacttccgatatcgtcatcattattcgacgagcttctctccgccgccgccggaaccctaacctcccagcctctgaccaatatcattatcactccgattgagccacttccaatg

SEQ ID NO: 437 - DNA, 1224 bp, Unknown
  misc_feature (1)..( 1224): cDNA_ID_3055730_gDNA_ID_1590990_Annot_ID_150370 3000 nt of promoter + ATG
  misc_feature (177)..(177): n is a, c, g, or t
  misc_feature (1050)..(1050): n is a, c, g, or t
aataacactaccaccagatacttcatcaccatcaattgattccatcatctgctcagtgaacaaaacctcgtcttcttctttctcttcatgctcagacatcttcaaagccttagctttctttccacgctcagaagtcggatcccaagtattatccggtttcatccggagctccgcttnaccgtgagcgtatttacactcgtttccatgactacacgaagcctcacgcctaaaataagaacagagactcgtcttccaccacggtgaaggagtagtaatcttcgtgtctgacgatttgagattggttttctcgtcttcatcggcgcgtttccgtttctcaccaacagcttcgatgttatccgttgcattcgaatcggacgatggaagttcgtcgattgatgatgtctccattgcaattggctcgacggaagcaggagctgttaggattttggtggctactggaagctcgttgatttcgattgatgatgtttccattggaagtggctcaatcggagtgataatgatattggtcagaggctgggaggttagggttccggcggcggcggagagaagctcgtcgaataatgatgacgatatcggaagtggcggtagatggtcgagaagtgttattggaagtgaaggagtttcaaaagtgaatcagattcatcagaccttaaaccctacccggttagatgattttacttcggtccaattgtctgattagtttattagtttcggtttagtttttaactttgtaaccaattttaatttccggtttattaattaagtgggtaagagcaggtctattgggagggacttaacagatccttaaccaaaatctttgagtaattttgagaaaaaataaataaaaaatgtgattaaatgttaggattgcacctaattttaagatttttgatgatgttaaggatcggatacgtggcatgttttcattggttgagcttttttgacaaaacaagtttttttcttctttgccttttttttttcatttatcgatctctctctctctcttgaactcggctgtgcaattgaacnattgattatcgccggaagatcttcatgcttttatatcatcaaattggaagagattatcgcccggaagtcgtctctaatccactgtgctcatcatctcaaccgacggtgctcaacgtcgacgagtttaaatcggagaggattgtgaatcatatcggagtcttgtgtgaaaccatg

SEQ ID NO: 438 - DNA, 2504 bp, Unknown
  misc_feature (1)..( 2504): cDNA_ID_3055738_gDNA_ID_1590991_Annot_ID_150372 3000 nt of promoter + ATG
  misc_feature (18)..(18): n is a, c, g, or t
  misc_feature (61)..(61): n is a, c, g, or t
  misc_feature (65)..(65): n is a, c, g, or t
  misc_feature (109)..(109): n is a, c, g, or t
  misc_feature (121)..(121): n is a, c, g, or t
attttgccggtcctgcanacaagcgcacaaatctcggttagattattcagataatcaatgnagtnaacataaaagagattcaattacccgatttgattgaagaatatanactaaatcagtnttaatcacaacaagaatataacctcctaattttggcaatgaattaaaccaaaaattatactctcctatatgcgatcccgtaaaatgagcaaagccaaatataagtcctcctaactacattccttatcttccttcaaatattccataacatttaaatcaaataactattcctaattatctaccataacagcttttaaattaaaatttaaacaaatcaaatcaaatttgaaaatatggaatatcctcaaaattccagcgcctatttacttctagactcacaatcgtaacctaatttgttttgtgctatataaacaatcgaaatcttttaccatcaccacacacataccattatctctcaagcaaacagtcgattcacatgtacatgttttcatttcagttttcagcttcagcatttggttgggatgatcacaagcttttgtttcaaacactaatatctggtaaaagaacagattaaaactcaccgtcttaggtgccataagagaagaaaaagtaatggtcttttccggtggaggtccagctctgttgtggctcaaagccgtgatcactaagcagtctccggaggtaacagccttcactcgtcctttaagccatcagttcttcagccttcaatctatataacagaaattttgaaaaaataatatgatttaattatctactcccagtttgaaacaaaagcttgtgattatctatatgattcaaatttataaccatacctcatctgcatgaagcaatgaggttacgattgtgtaatccggtcatccctctcattccaccaagtaccttcacaaatatcacatgtaaaactatatatacgagtatgtttaaaagataaagcctttgtgtaatcacaaaaaacattagaatccataccatatcaacggtgatgttccccactggaacctttccatgttttaatttcagtttcttcgaacggtcctgaaagttgaaagttgtgtttgtgtatgaagtttctctagaatagagagagaagagcttgatcactacatgaaatctgccctgaacatagaaacaatataaatcacaacgaagtagaaacttaaaaaaaaatcacatacaatttgatctccaagcaatcagattgatccatcaaggatagacgagagattaagggatataatctcatgattaatttttttaagcattatccaatcccaaatcacaagtcttttcttaacaaattaaatgtgttagttctttaaaaatgagatgatgagtatttttaagagtgaattggtgtaatagccctattgttgtttaagttaaagggaatgatcaaatgtctgaataccatttcctgaagtatatggacgaaacgctagaaacagaacattgacccatcttttttgagagagagaggaggatcaagaacatttcctaaagacaactacgcaaagcattaatcactataactctttaatcgactctgttgtttctacacctcaaaagatttgtccctcggtcacaataacatttcaaacagaaaaatttgtatccaatggtcacttatttctcaaactttcttctacctcttaactgtttattactcctaactcttatgtttaattactgcgaattcaaggaaacatcaagtaatcactggcacactttattgatcactgagtttggttatttaaaaacagaacgtacagagaccaagcataatcaaattgtattttaacaagtaaatggcacaagaaggcccttttagccatgctaaaagataacgattctttcaatacaaaatcctttatgactctcaaattctgaaaaaaacgaatttggaaaactcataattgaagtgcagagaaagcatcgtcaacttcgtcaacctaaaaagagacaagaggacagaggttgagaattgaatacctgatcggagcaaaattgtctctgacgattgaattcccaaatccgatcaattgaagagactgtggagatgatgaatctggcttcacaaactcaaacacaccacattttacacgtattttaagatccaaagaccggaatagaagaaattcgaatcgccatagaatgaagaagaaagaaaaagagaaaacggaaggacggaatcgttgatcacgattaagagaagattttcttcagttttgctcgtcgatttcatcagtcggaggatacgaaagaagagagaattcgcgaaatgagaaaaaaacagaggaaaagaattcagaggctattgactgaaggttaaaaagagcgttgagttttctcccaggcactttctccaatgcagtctattagcagttggaaacttttgaaaaaccagatctcagctacctctttttactaaaaacagaattatccaactgttccttccaaaaatg

SEQ ID NO: 439 - DNA, 1245 bp, Unknown
  misc_feature (1)..( 1245): cDNA_ID_3055752_gDNA_ID_1590997_Annot_ID_150380 3000 nt of promoter + ATG
atcagcataagcttttgttgtgattttcaatcagaaaaaaaaaatataaggaaccaagagcttttggcccaagtatcttccccatgacaaaaatatactcttaatttgttggcattaaattcataaggttaaaatgttgaaatttggtgagagatgatgtgaagaggagaaacgagagaagggctctataaaattgcaaaggccaaattgaagtacaaattgttgtcatttgtgaagaaggtggtccattcttttggtagcccagacgttaggaaccaaataacaacataattttctatttattttcatctatttttattttggaaaatgagttttcttgtaataataattattgttttatttttggactttactttcatgaaagaaaacgactgggtggagaaatggacaattaattcttgggggcaactatcgtatgatgtggaaagttaattattgttaatttagtgggtccattgggcctaacgggcccttcttgaatgattttatgagaattttctactgtaagatattgtaagacactgtaactttaatgaatgggggatatacgatgtttttttttattttaacaatccatcgttttatacacatgtttcgaagttcacaaacttcgcagacaaactaggtttgaaattttttaactaatattccaagtttttgtttgttttattaacctttccgtctataaaagaattaagaaaaaagaaccataaaattaatgaatctacttagcaatattctaagatttgctgtctttaaataatgaaacaaagcttaagaaaataagattcttaatatttaaaaaaatactatgaaatttggacagaattgctgagttttcttatttatgtacaaacaccactaagtaatatgtatcattagcttatgtatttttaccaagtttgagaggaccatacaactaatattatcacgaattctattattgcatattgcaaagtacaaacagaattaatgcaaaaatgttctttttaaaataaatgtcaagaatcatgacgtggcataatcgtgacgataacataactttgatcagaaatactcaacggtctagattgagtcctgagtttatggttcttctttatcttccatgtctcttctccttcctcactcccctcttccctctctttatctctctcaagatttgctctgtccagagctccaaatttcaagaacataaacactacacacaaaacactgaatacgatg

SEQ ID NO: 440 - DNA, 2559 bp, Unknown
  misc_feature (1)..( 2559): cDNA_ID_3055757_gDNA_ID_1590998_Annot_ID_150384 3000 nt of promoter + ATG
  misc_feature (62)..(62): n is a, c, g, or t
  misc_feature (66)..(66): n is a, c, g, or t
  misc_feature (205)..(205): n is a, c, g, or t
  misc_feature (371)..(371): n is a, c, g, or t
ggtggggaaataggtgggtccattaatccattgccctaattaactcctaatcattcaatgtnttgnctatttagaaagggaaatttcagaaaacataattcgagatttttctatagaccgacaaatgtaaacgattctgattttgtattttgaaagctatagtataatgttttggtgtcattaattttaactcgatgatgcttcnaaaataaaagaaactaaagatggtagacgacacgtgatcaatagctaagtaaacatgtattgcagatctgcagacaatatacacgtaccaaagtttttgttcagttaacatttaacagattattattgcattgtttcatgtaacataactcattcactatattgcngaatatacggtactttctgtcatatcgtggtagtttaaacattttgtgtgtttatcaatgtgtatcatgaattaactcttatcgtacgttaaattcctgaatcattaaagaaacaaaattttgagatcatcttgtatatgtttaacgatgacgcatctgtatcttcaatcaatgacttcgttatatttttggtaactttgaggaagaacccaatgtaaaatttaattgatttgaatttatgttatgtcagattttgcaaatactccaatttattatagatatagataaggtattatatgacatactattattatcaattctgcaaataatccaatttattagggatttagacatagtccttgaattgttaattaggatgattaaccttaaaatgaattaattatatcttaccattttttaatggtatgaatatctttataaagagttgcataaaattttaatggtgtaactgttatgtatccattctcttcaactgagtgaccttttcgtttgcgcccatttcaacaattataagtttcgtttaaactgaaattctctatcacgtccttaattttagccaaaattttgcagcaaattcggcattattattttattacactatgatccttatattaagagacatcacctttgtttatcgaagtttaattcttcaagtatgcatcttatattatccacttgacatatgtatatatgtgcttaaaatatcaaaaaaatttgaccaaaaattttctaacttaaagctcgattcgttttcaagtcaatgttcttctataatgttgctatatatcagttttataataggtgaaataatgctataataaaacactaattttaaaagctcacaagaattctcataaataattatataatgaatcaagttaattattcaatatgtatgtattttaaaacattttcgtctttttagttaagccctgttcgtttctccatttgacagatccatccaactgattcattcaacatgttcatctagatgattcattcgactcttgttcgttttatttttagtaggttcatttaactagaccatccgaatgagatgttgttcgtttgcttatctctatctccatccaaatgatttgtaataatacaaatacctaaaataccaatgctttcatctaattatatttttattattacttgtaaacatattaattttaattcttaatctaaaatatatttaaaagtaaataaattttaaataatagttttttacatttatgaatttattttacggttttggcgggaaaacgtgattttacagttttgacgggaaaactcgatcttacggtttggcggaaaacagaattttacgtttttggcggaaaaacgtaattttacgtttttggcgagaaaacgtgattttacgattttggcggggaaaaatgattttacggtttcggtgagaaaacgtgatttttgcggttttggcgggaaaacgtgattttgcggttttggcgggaaaacacgattttgcgggtttgacggaaaaacgtgtttttgcggttttggcgggaaacgaaaatttacagttttggcgggaaaaaacgatttgcggttttggcggaaaaacgtttttttacggttttagcgggaaaacggaattttacggttttatcggaaaattttgattttgcggttttagcagaaaatttaatttttattttttaaaaaataattggaaaataagatttaagtctatttgtttttatctaaaaatacatctaaataatcaattaaaataattagggtatttttgtcatttgttaattttgactgaatcatctccatccaaatgatccaattaaattcagccaaatgagtttcaaaatttagcctaaattttcaaactcatccaaatgattcatttggatggatcttctgaatgaaccgttttttgcactaaacgaacatcaaaactcatctccatccagatgatccatctgactgatgaaacgaacagagccttaatagaatctgaaaagagtgggtcctcaataattaaaaaccaagaattcaaggggatgggatttttcctataaagaagccaaagcctttctcaccattttctctcatcaccaaacaaacaaacacattcaaatctcataaacacattgataagtaaaaatcctctcgagagacaagaatg

SEQ ID NO: 441 - DNA, 136 bp, Unknown
  misc_feature (1)..( 136): cDNA_ID_1839149_gDNA_ID_1591003_Annot_ID_150398 3000 nt of promoter + ATG
  misc_feature (132)..(132): n is a, c, g, or t
taaaaagtagaaaatttactgaattttgactaaaattttaccggttttttctgatcagttgaaaaaacagagaaaatttcttgaaattttgattaaaattcctctgaatctaattgttttttgttttctggngatg

SEQ ID NO: 442 - DNA, 102 bp, Unknown
  misc_feature (1)..( 102): cDNA_ID_1443346_gDNA_ID_1591026_Annot_ID_150414 3000 nt of promoter + ATG
agatgtgttcagagaccgttggattccatttctttgtcaaaagactcaaaactacccaaaactcttccatcttcaccaaattctctcaatcactcatcaatg

SEQ ID NO: 443 - DNA, 281 bp, Unknown
  misc_feature (1)..( 281): cDNA_ID_3055807_gDNA_ID_1591035_Annot_ID_150426 3000 nt of promoter + ATG
aaaaaaaagaaacaagcagcataacaaagctaaaaggcccaagtgaaaagtaaataaacaaaggcccaaccaagcccaagagaaaaccaatgtcagttttgtttttttgtttttgaatttcaccggttattcattaaagaattgtttggcccgccaacaacatacgtgtccatatccacagtctctcacctctcgcagtgcccaaacctcttcttcttcttcttcttcttggcttctcctcctccttttccaatttcaaaacccaaaaacaaatcagcatg

SEQ ID NO: 444 - DNA, 755 bp, Unknown
  misc_feature (1)..( 755): cDNA_ID_1692880_gDNA_ID_1591037_Annot_ID_150432 3000 nt of promoter + ATG
acaatacaaccattgtaacccaacaatgtcttgttgaacccaacaatctccgacgtccgacgaggttatatgaggcatatgaccactatggtatactatttttcttttagtttattttttgttatgtaatatcttaattgttttgaaattttaattttttgtatatcgtatgtatattttacaatatctttttgtttcatggatagatgaggaagtgacaaagtagaagaagtgagcaaagaaaacacccgtgtcaaagcgttaaaagactgaaaaatgaaattttgtagaagaagaaataatataacatcgagacacgatgagactaacttttgaatcaacttcattgtagtaaaacttttgtggctacgaccttagaaatgaatctattttatttatttattaatcattgaatatgtgtagtatttttattttcttacagcctaagcctttgtatttgtattatctaaaatagttctgttaattttggaagactgttaatttggtgttcatttcattcaactactgtcctctcacaatatcaaatgacaaaactaaatcatcaaatacatgaaacatgttaatattgttttcataaaggataataaaccacttatatgggcttatatgactctatattgggctaggcccatataatggtcgccacatagtcaaataagtctcacgaacacgagtagtcatcgaacggaaagttaaaaaactgattttgcctgtttggttttggatccgagatg

SEQ ID NO: 445 - DNA, 94 bp, Unknown
  misc_feature (1)..( 94): cDNA_ID_3092211_gDNA_ID_1591038_Annot_ID_150434 3000 nt of promoter + ATG
ttacgaagatgctgcattgcaaagtcggaaaagctttgccttattaaattttggacagagttttatatttagtacagctttgtcaacagcaatg

SEQ ID NO: 446 - DNA, 449 bp, Unknown
  misc_feature (1)..( 449): cDNA_ID_3055825_gDNA_ID_1591051_Annot_ID_150449 3000 nt of promoter + ATG
atagtctaatataacatttttcgattactccaacatcaaaatcaactcttttttttaatattatcatactcctctatcaagaacaaaaactaaaaaaaaaagtataacacaaaccgtaaacacgattactaatatattaatgtttaaaattatcaatcgaatcaatgattaaaaaatcaaataaagttaaaagtaaaaagaacaaagaaacaaaacaaaaacacatttagacagctagagttttattacaaaagccaaagctttattttgatacccccaaaaacagatatctttcagtcttcacgttgcaatatactcacatttcgaccacatactgacaaaaactccgtatatatatatacgtataaaaatacggtcttcttcttcttcttcatctcttacaaacacagacacaaaaatcacaaaacccttctcactctctctcaatg

SEQ ID NO: 447 - DNA, 2589 bp, Unknown
  misc_feature (1)..( 2589): cDNA_ID_1808168_gDNA_ID_1591053_Annot_ID_150453 3000 nt of promoter + ATG
  misc_feature (26)..(26): n is a, c, g, or t
  misc_feature (1616)..(1616): n is a, c, g, or t
ctttgtttcttttactcaatttaganaaactttctggttattcatggtttccttaacgtttttgttttggtattttgatgcagttacttgttaattttggatcgtaccaattggaaaaccaagatgcttacatcactgctaataccatacatcttccttagccttcctagtgtcattttcaacttcctcaggtaacacaatcttttcttgtcaaaagacacaactaattcttaaaactatagtctataatctatatactggactggtttacatggaatttttcaatttttgttatcagtggagatgttgggaaatggattgctttcgttgcagttgttctcagacttttcttccctaagcatttcccaggtgatgacatcttcatattgttgtgccttcttgatttgtatctttgtattgttgtcatacaatcgctgaagatgtctcgagaatctttaaaatgctttgaggcaaatctatactaacattcaagtcagtgtaattgctgaaacaaaattaaagtctcacacttttgttgttgtggttttcaaaatgtgcagattggcttgagatgccaggttctctgatcctgctactggtagtttctccacacttccttgctcaccatatacgtggaacctggataggcactgtaatcagccttttcattggctgttaccttcttcaagaacatattcgagcatcgggtggattcaggaactcattcacacagccccgtggagtgtcaaacactttagggatcatccttcttttggtctaccctgtctgggctctaatcgtccgtgtcatgtaatccacattcctctttcatggacaagttgtttcttgctcggctgctccaataaactgcgtgaaacatcgagcagagcaagtatctatggtgttcctttcttctgattatgttgcagacccaaatactacctcaagctcaatcaatgttctatgtataaaaaaatctcatttttcaactatttgtttgtctactataagaaaaagttctttattgaatgattgtaaaaactagccttcatgagttcatgttgtttgcctagtgttgaaaattactcgtgacttccgtttcgagtattcacattcgcaatacgtggcgttttcaatatgaagaaaactacacgctgtttgaattttataactagacttcatgtcgtctaaaagtaggggggcggcttaaaaccctaaccctagtttgtctgactccttataaatagttctctctccgccgtttataatcttaagtcatctctgatctccgagttcaacccaaatttgaatctctggcttcttaattcttattgatatttcgttttattggttaatctgttttcgatttcatatcactagtctaggattcgttcttcttagaaagaaagggtttctcagtgatgaatacacagatgacgagtccgatgaaatccattcattaaatcatggggacaaacgaggcatttgtctgagaggaatccttttatacttttttcaatcttattagttttttctgctaaatgtttttcaaagttgtttgttttgtgattttcgaaaattgaagaaaaaaggcatgatgaggattgttttattgncatctgattctcatgatgaatatatacctcctactcattctgagtgccttttcttaatttcttaccatcaaacttcgttgagtctataaactttattcgttctatagtcgaaattattcaattggatacttatcaattgatcgaaatctaaaagtttgactgtctcagcagtttttgtttttaaaactaggaaatttttgataatctgtgcaagctgggtcggattcatagctactattgtgttcttggttctggaaattataactgttatgctactattgtggatgtgaggacggcttttcatggatgtactctcaattctaactatttgacatggttgcgtaagaatcaggagatgaatgtactgaacctaacagataaacaactgatctttagagaagcactgccctagatgtgtatacctagaagtcaatcgatgatacttctctgagaaatcacttgtaaactttgattttgtattcaagaatcttaatataataaaataaactctttattcattcgttgtgtcttctttctcataaacaaccttcatcatcactattgaaatcttaatattaatgatatgcataagtgatttcaatctgcgatcaaaatgttgtgatatgagaagcataataaccgaacatttagttatcctttctctggtgtattccagaccggtcttgaaccgtttctagaaccaaactatttattcaactttgtatattccagtggaattgataactttataaccacgtcaccaatactgattgggacagtatctctatttccacatcagctttagacacgtggctattaatcaaccatatactcctgaaaacaatccaatggaaaattttcaaaacttatccgaccttatcttagcgaaacaaaatctctcctctgattattactactcaacttcgcattatcactcaaacaaacatattgacatctgagtcttgtcatcatg

SEQ ID NO: 448 - DNA, 502 bp, Unknown
  misc_feature (1)..( 502): cDNA_ID_1019620_gDNA_ID_1591055_Annot_ID_150456 3000 nt of promoter + ATG
taaacgatagaagagagacaaaagttacaacccaaagccaagcgtgtaaagatcaaaaggtcatatttttcctgaggggaaacttccgtcgcaggttaaaattggagggcttttttgtaaacaattcttaagaaggctacttgtagtaatttatttgtaattttagttaactgtgtaaagtaaatactttatccagtaataacgtatcactttagttgatgtctattggttaatagccgaagctcgttccaaaatcgaagagaatctataatctcatcacgacacaccaaagccaaaacctttattgtcggaagctgactcagactcaaacaatgtctctagcgtcaattatatgctaaattcaccagccgcttagagccaatcatataatctcgattctcttcaacggtcctcaattatcctaaattcagatcataaaaaagctaacttttaatttctttctttctgagaaattggttctcatcgttggaatcgaaaaatg

SEQ ID NO: 449 - DNA, 974 bp, Unknown
  misc_feature (1)..( 974): cDNA_ID_3055849_gDNA_ID_1591056_Annot_ID_150460 3000 nt of promoter + ATG
  misc_feature (13)..(13): n is a, c, g, or t
  misc_feature (25)..(25): n is a, c, g, or t
ttgacatattggnttgttttatacnaattcacattaacttctttttttcttacattaacttatttctaatataacaaaaaaaaatcatttggtcgtttctacattatcatcatggatatttaggattttttgtttttaattctactatgcatgatgatcaatctatcatatatatctacatgcaatatatgtgattataatgaacgactgtacgaaagaacttcatgatatgcacctatccacaacacttggatctcctattgacaattgttattagtgccataataattaacgatagacattcttatatgtagcattcgagacacgacggacggttctccgtgcaaatgtgcaatattctaaaacgtctgattagtattacaccaatactctgtaaataaatgcgctatgtaaaagaaaaagtccaaacctagtgtagaaatctttttacacttggataaaagacttccacaaataaaatatattttaactaatcacttatgaggtaatgaatctcacattttgttctctattttcttacgtcgaaggtaaaaatgtctgtgtttatgctcctccaactacttattttccaactaaacatttctttccatctatctaaaaaatccctgaagaaacaatgtgaaaagatctgataattactttgttttgtgtggaggccattttattttcctttatataataaaggggacaatatatatattacatgcattgataataaagatgcacctagaagtaataatattctttttgttattactagacgacagaaaccgtgcccttttgactcgggtctttactcttaacctatcgatgagaccacagaaagaaatataaaattgtaacgaacatattttattgagcttctttaccctcatatgtatgtaaatcttcttcaaaattaaagagagagagagagaaaaaaaacttggaagaatctgtctttgataatcatg

SEQ ID NO: 450 - DNA, 1782 bp, Unknown
  misc_feature (1)..( 1782): cDNA_ID_1031872_gDNA_ID_1591066_Annot_ID_150470 3000 nt of
  misc_feature (1)..(1): n is a, c, g, or t
  misc_feature (3)..(3): n is a, c, g, or t
  misc_feature (10)..(10): n is a, c, g, or t
ngntcatttncttactatattacttttattttgaaaaaaaatgttaatatttatatcgtattaatcatgtaataacagtcaaacgttacaaatatattcatattttttcagatgtacacatcttatatagtaggagaaacattatcctttcacctttctttttctgaatcttgtaataatgttatcttatgcgtcaggaaaacttatttaatgagaaatattttcctctgttttgaaatcttcttgtggtcatttggacgacgacccaggacatggtctacgctcttctactacttattaatattatatatgagtttcttacgatccatatattagaccatgtatatgggtgatatttttagagtatcacaagtccaaaaattatttttatattaataaagcaattagaatatgtttgatcagtatcagtccattgatatttgtgatactagtatcatctgacgtggcttcttctgattggtcacatttgacaaaagcaaaaaatattatatataattattaaacaaacattataaataatactaaaaaatttcttaataatattttgtaagtatcacctatgaacatgctcttagatcagatatccgttttaagattttttttaaaaatgttgacacaaaaaaaaagttttggattaagtgccggatgaaaattgaaatcataaaaaaattcatatttttttggtagcaattttgtgtgtttgattgcatttgttgaagattcagtcgatgcatgcatgtgttgttgaattcgaagttaagattacgtaactatggaattagttatagtttgtgtatgcttttgagcttgatatcgaaattttggtaggtggagccgtgaagaacattttccattttgtcccaaagaaattctgatgattttgtggtgttaagtctgtcgatgagcgactgattttctgaacaaacctaatttgtctctggtgccgaaagtttgggtaggaatataaacttttttcctaatttttacccaaaaatttaagaaccacacaaacctgttagtctaccttcttaggaattcacgaacgtcgctactttacgtaaagggaaatagaaggaataaatcgtagatggggtcattatatagaatggtaatttgcactagggttggggctggtgttttagttggcttcttgccccttcaaggtcctgaattggtgaatttacgttccatcacaaaaatattattttttgacttcctagttcctacgtgccggcctcgttttactgatcaataacttggcctataatatcaaaaagtggtagtggcatttttatttatttaagataatagacatttagattatatagttgcaataatatagagtttttagttaagatataggttttatacatgttgtcttaaatagttaaattaaaagattattttgtaatcttgtcaagatagtgagatttttttggatatttactcaaaatctgccgaaattagaaaatctatatctagagggattatatagtccaacaagaaagctatatgtatatctcatatacaaaaactttgctaaccctatcatatacgaaactaaaacttacaggaaaatataaaatatatatagggaggttgacaaaagataatatatatataggaaatgtatggtggatataaaaccgatattttctattcttctatatatactggccattcccttagttgaaatcacataaagcatcagaagaagaaaaagaaaactacaaaatcaatcaaagagaagtaagagaaatg

SEQ ID NO: 451 - DNA, 2879 bp, Unknown
  misc_feature (1)..( 2879): cDNA_ID_3038771_gDNA_ID_1591076_Annot_ID_150482 3000 nt of promoter + ATG
  misc_feature (2)..(3): n is a, c, g, or t
  misc_feature (2524)..(2524): n is a, c, g, or t
anntcgagcggcaagttggtgatcgaagtttcctactttggatggcatattcattctgagacacatgatctttgtgatgagacaagttgtcctgtggccattggagatttcttggtagcgcactcgcaagttcttcccggatatacccctcctgtaagttttttctacgtatctatgcgggttttgttgattaatacgaagcattttggatataatgacatgatgatgcattatgctcatttgaagttgatgtaattctattgcagtcataacaaattgcctagtgtaatcgaatctgtttagttggataactgaaatagactgagaagtggtttaacttggtttcgatagcatattatgagttccatgtggaagtattatgtctattaagcggctaaagtgaagaagtttaaccttcttgttgtcaagatttgctggttatggtttctatagttatatgtttgtcataccaaactttcgttttgtgtttctgcatctaaggaaggaccagtctaatccttttctttctcatagggttcatactcactaaaaatgaagatgcttgatggacgcaagaaggagttaacttgcatcaagttctcatttgatattggatttggatcctccgtggccgacatgtagagctgatttgctcgacgggatacaccatcttgttctataccatggaaccactctcatttattttgtataaaatacactctcctgctatacataattgttgatcaaaaaccctttgaaaattctcattctggaccattcatgaatccccccatttatagaaaaaacaaagtaatgaattattgattaggttttatagagctgtggttagttctagttgcaaccttaaagctgagcctactttaaccaatagtacatcattacatccacgttcatggaattataaagacgtgacatacatcatcattcaaccaaacgtaaaccattaatgacttatcagaaaagatgaattttttcatagcttcaatataccaacatgttaaaagggacattcctccccttttgctatgtatttggacaaagttgggctaaagttgggtaaattcaatgttttttgttaccctaatttagcttatcggttatcttctttagtactacaatgacccgtcaaaggagaaacttttgaaaagctaacccacaaagtagcttttttgttcagttgagtactcatttcgtttttctcttatccagtctcatgtttgtcaatcttgattaggtttttgcctctcctctttcacaacttcttatcaaaggttgaaggttgaagcaatgatggatatgaaggagagaatggtgaagaaacttaagcttattacatctcttgggaacttgaagcaggcgatagctctccacaaaagcaatcttgatcacacaatctttcatcaaatagatgagaaagagtgtcttacgccaacgacaattgaggtttctgaggataaacgacttcaacagaatcttgatgagcttttgtgggcttttgaagagaaatgtgtagctggtgggcaagattctgttgtcttcttcacaacaagtctacgaggagtgagaaagactttcgaagattgcagaagagtgagattcttgctagagaatcataaggcatcattccgagaaagagatgtttcaatggattgtgagtacaaagaagagatgtggagattgcttggggagcaagttacacctcctaggctcttcataaagtgtaagtacattggtggagcagacgaggtggtgtctcttaacgaaaacgagaagctcaagaagcttctagaagtgttttcatcagctaagtcgcggcagtgtgagatgtgcgagaacgaaagatttttgatatgttcgaaatgcaatgggaggtcgagagttgttgcagagcacgaaacctggaagagatgcatagagtgtaatgagaatggtcttgtgaaatgtgctctttgtacttaatccaagattccaagtgcttaataacaatttatttatatgactataactaattgttttatatgaaacaaaatgctatgaatatacaaggaaaattttcgaaaacaatactcaaggagttgagtgagttttccaaaatgttaaaccaaaatcaaccaaagtgaagaaaaaaataatgttctattgactcttctaaaatccttctactacggaacacgtatggcgacattcgcacgtgcgatacccgtaggtaaagacacgtgtcattccttcaatgggcaggaccgtactttcacttgcgtacttttccttcttcttccgacaacaaacccagaaacagtctttctctcttccgactccgtttactagatcagccttctcgcaccgaaatctcaaggttcgtgttcctcttttctgtctttttggattgaaagatttttctcatgtttatatataaatcttcaatccaaatcaacaaaagcatgttccatccgatgaacttatttggggactttcctctgtctaatccacactttataaaaatcgnacctttgtattgtgttcatagaacccaaacgctgattagagtaaatttgttgttctggcaaaaaacccaattagctctgaatgcgtctacacatttcttgaatcggtcattctattgctgctacacactcaaaatcgatatttcaatgtctttgtgaattggaaaacatattgaaaatctttgctgctttatcagtttttcattcgattcatcgctgagcacattcacaacaaaaacagatcactgattattagaattgtattgattctgagtgtctctccaagctaatggatctatatgatgttgtgtctaatgtgtaatgtgaatatgtttccagtgatttcagaccacaatg

SEQ ID NO: 452 - DNA, 3 bp, Unknown
  misc_feature (1)..( 3): cDNA_ID_3062300_gDNA_ID_1591080_Annot_ID_150487 3000 nt of promoter + ATG
gca

SEQ ID NO: 453 - DNA, 1770 bp, Unknown
  misc_feature (1)..( 1770): cDNA_ID_1693072_gDNA_ID_1591090_Annot_ID_150501 3000 nt of promoter + ATG
gaaatatttaacttggatttggttttaccacatactgtatgtaactttcctgtcacaggtcattattattaaacgtattttagaatttaatgcaaagaatgtgacatgttacacgacaatatataataagtgtgttttttgattaaagattattagtctttttcacgaggatataataagaggagagattccaaatgtcaagtgctattttcaaattgttaaacagagattgaagatctttagcataaaatgttaactatgacttgtctattcacaaccaaagtcttacctcaatgtataaaccgacgtctttccaacataacacatttgtattctcatatatttaaataaaagtgaagcttttctttgatctagatcgtggttattttaaaaatataataaaatcaaataactatggttacttaccaaagtaaagtggggttattttttgctgtggtgatgttttatgctttgtataagacacttttgcatctctagtttatttctaagcattttggagtaaagagagaacaaaaaacaaagtataaaaatatccaacaagatgcttttgggggaaacactgcattgtggtctgtggggacaaatttgctggcacaaaaattctgcagaagaaaatgaaaataatttgatatcactataggatggtccaaaaaagtactaacaagtttaaatatttaatttgattcacagcatcctttttagcaccgtaaatttgagtcttatgtagtactgattattaatacaaaactaacaagattatatatcgataaatatgaagcatcctattcctatggttgattatatgaatcttttatgtcacacaccctattacgacaggttttaatgatacccacatcacacgtgtataagttaaatgcaatgataacatcctttactctgaatacagatacatttgtggctaaaaaattgtaaatgcaaatctttggactttggttcagaaatgaaaacaaatgtattttttattcgaaactgtgtcttaaaaagaatccaaagtggaaatgtccaacctggaaattcagacgtaaagcgaacccaaaagaaaagaaaaaatgaaaaatggtaaaaccgtaattaagtgtaaagtcaagggtagttccatatttctcccttgttggtcgagcgagaccagaaaattcgcagagagagagagagagagatagatctgagagtagtggtggtggcattaataatggcgtaagtggaagaaaggaacctagccgttagatcttctcaatcgctacaaacattcattgttcaccgatcgattctctctctttcttcttccccattgctccttccttcgtacccctctctctgtcttttgaggtttccgggtcgggttggtgagaaaactccagcggcttaacggatcttccactggtagttttctgttcctcacaaggaaatcgaaaatttgataaagcgaaagtgaaaaaggcgtgtgttttctttgtaaaggctccaacttttttgatgaacagcttgtgcttgttgtgaaggttgttactttttgtgtattggaatttgggttttttctttatgttctgaggaggagaaaggaggaagctttcttgaattggattcaaatttgagctcatatggtgagtttctagggttttgtttgtgattcctggaagaatctgattccttttctattagggttggagagaagtaaagcagaaaagcttttttgttttggagcttagtgagtgttgtggataaacaatg

SEQ ID NO: 454 - DNA, 677 bp, Unknown
  misc_feature (1)..( 677): cDNA_ID_1693098_gDNA_ID_1591092_Annot_ID_150508 3000 nt of promoter + ATG
gatttgaacatttgatagattttaacaaatgttatttgggagaccccaattggagtttttttttcttttcaaatttgatttcaattctgtagcaacatggaaattaattagtatgaaatcttcgatggttgaaaaaaatactaatttgtaaattatatggaaaagaatccaaaaaaatatgatttgacccatacgtcggtgtttgttgagtaaaaatcttcttttttttccgtgtttaaggtaacaaaacgcgtcgtcacagatttggaccgtattaaaaacaattgacaaccgtgtatcctcccttaatttatcaataatgcaacattttgatatattcgtctacttcatcaataagaaaagtgtaacacgggaaataattaaatagtctaaattctcttctgttttttttggtttgttcttagaggaaatctttatcttggaatctttaatctatctagaattaaaagtttatgctcgtaggattgtctacttttaaaagtcaacatattcgatacagatattttgtatatttatataaagtcgaagaccctgaaacttatcttcacggcataataagaccaagaagaaaaagaaaacattaatttcaaccaaagcaaaacagagagaaaaaaatagagagagtgaatcaatttcggtggagaaagagaagaatg

SEQ ID NO: 455 - DNA, 947 bp, Unknown
  misc_feature (1)..( 947): cDNA_ID_3055919_gDNA_ID_1591099_Annot_ID_150517 3000 nt of promoter + ATG
gctgcacttggtgattcagtacgctgcagtataattcatatccttctttttttgcttttcctttatagtgaaatcttttatacttggatacaggggcctggaattttcgaacctgtgcatggatctgcacctaaacactacgggaaggttgcctctggatcttgatatgcatgatactgtatgtgaaaccactcgtttaatatcggttgcagtataattatgtcgacattgcgaattgcaggacacagtgaatcccattgcagctgttctatcagctgcaatgcttttgagatacggattgaaagaagaaaatgcagcaaagagaatagaagaagcagtatcggatgtcttggaccgaggattcagaactcgtgacattcacactcctggaactgtaagtctcctcttctcttggcaaaaactgcatgttgtttctagttatatggaaaaatcgaatttaattttacatgaatgatgagcagtttggtttttggacagacgttggtaggttgcaagagaatgggtgaggagatattgagatcccttgatgctaaagtctctgcttcgactggaaacttggtttagctgcaaaaactataaacaaaaatatgcagagagtgacattgagaaattcaatgtttgtttctatccgataaattgataagttatatatacatatattcctaagatcgccgcacttgaactactacgatgasccctccttcttctgtgaggtgctgctaataaatggatatatatgttgtatgcggtaacgtaaggtgtccatttacaaaattaaaaactttggggtcaattctgaaaataaaacaatgtgaaaaaagsacccataaatgcaaagaagtaaagtctgattgtactagtagtatccatttgacttgcggtttcaaaatccgaaaaagaccaatcaatcctttctccctgaaatg

SEQ ID NO: 456 - DNA, 3000 bp, Unknown
  misc_feature (1)..( 3000): cDNA_ID_1008780_gDNA_ID_1591112_Annot_ID_150538 3000 nt of promoter + ATG
  misc_feature (782)..(783): n is a, c, g, or t
  misc_feature (811)..(811): n is a, c, g, or t
  misc_feature (892)..(892): n is a, c, g, or t
aagaagtattaacatacccattgtcaatttgacgtcttggtgctgttgaggcagtcaagaaataacgcccgtctggagaccattcacttgtcacagaccactcggctttattacttcctagctgcttcttatttacaacatcccagaaggcctgaaatataaccatttagaaagaatcgtttagaatgtcaattgctgacttattgtcacccgagaactgaaaaatatgaacaacacaagggatcgttatttaccatatcaccaggcaagttaccgaatccagccacacataaaactgtggaacatcgattgaaagttacaaaaacaggtatgtacagaaatcctctgtttaagaagaaacaaaaacgagaggacaacagaaaacagggatgaagaaaagcatcatacctctcccttttgggttccatcgaagagtgttataaggaccttcgccaagttccatcaatggtttacaattcttgtcaaagattgtcacacaagcaggcataactgaagtcggagttgagggaaagcaatgccagaaggagtatatagatccaaatcgaaataacatcttaacaagaacacaatgatattaacatgtcaatgaaaaaacattattcctaaatgaactcgtagagataagtcgttatagctgatggaaaaaggatacagccatatacaacagcaaactctgaacccgaaaaggaccactgaacatcatgaactggtccttctttacctgttaaagcaccaaagagtcagtacaaccaacaatcacnncagcagatacataaagcttaggacttangtaatggaacaaggccctcatgtgtgccgtctattgtaaggtagtgtagcttcgtttccccatagtaactttggttggtcntgtcaacatctgattgtacaaccactaggagtccagtggaaccatggttccaactaaactgcacagaggaacatcggaaaaagctacgtcgagcacttggctggctctgcaattcttccccacatccaaaaatctggacactgcctggactcccctatatatgaatgaattaacatgttagagttgcttgtctatagaggaaacatttatacacatgatgttctgcaacttcaggaatgaaaatagactactttgtgagagagaagactgcaacagatttaacatatagaagaaaagatgtctttttttgctattcaaaagtataatgcgatagcccaagcagtgaaaagtacctttgattctggaacaaacacagcaacatgggaagctggcgttttagaaagctcaaatgcagcaatcccaggaactctgatccgggatgttattcctttcgagaaatctttcgggtcaaagaattggacctcatttgtagctaaccggcacgcagaagattcatcaggacagaagcgaattgatggcctatagagcaaccacagaaacactcgttattataaaagcagcataataagcacaaggactatctataattgatgcatcatatatgatgccaataaagcactgagacctgcttaccatgaggctttagtaatggatttttggtaatgactgtgtgctagatcccctgtctcagtattccaaatggagacattcttctcttggggagtagtgggtttttgaaaagtctgaagataagtcccacatggagatagctcagcagctgtaacatttgctatagtgaatgaccgcacttctgtcaagctggtggcatcatagatactaataactccatcagatttcatcgccattaacttcgatccatcaacactgaacttcgtgttagagcatgaaacctcgttcaagcttgagagtgggctggccattagtaaatggaggaccattccacacagtgaagccttcagcttctctaactacacagaaaagcgactttagataagagagagacatttaaacataactcgaagaatgaaattgagtttcagagatatgtacctaaaatctccaacgacggtgaagaactcattgcttacttgatacacctaatatataatgcaatgatgaaaattaaaatcccagaattgatacactggttacaaattgaagtcaacataaaagctctcaaatttgtactgaacgtataaaaccctcatcatcaattacacagtgatcgcggtagaggaaacgataatcaccaaattactttactggattgaagtaaagtaaacaacttttatatcacaatttctcaaaggtgaaatgcaagaacaggaaaatctgaaactggagaagaagaagaagaaagcacctaaatgaagcacgcaataacggagacgatccggtaatcgacggcgagagaagtcggtcgctgtagtggccggcttaagctctgaaccgtataaagagataccctaacttaaatttcatcagccttttgaatactctaggtaaaccagaaggttactgtatatttataaccaaagagaaaaaaaatcagctttttttataagctagaggtttttagttctctgtgtggagtacggctgcattgtttctaccaggtgaatctcttgctaattcgattcaaattaggtttttttccttagagaatcatatctgtttataaagagtcggctttgagttgtggtacgatttcgtatttggtctctttactagatagttcaccaactgctcgacgtaatttctcaatgaatccctactctctttttcataatctccggcgaaactacctgtagattgttttagatattcatatataggttattgagctttattctgtctgttatatactgtcactttctcaaaattcaaaattttggatatcagaagtcccaattctgttcaatgttttcctattgtaaagaaattgactttttacttcaacaatccaaatttcttcaccatttgtctgatatttgtatatatgtttacttattggatgatttcatcagtaatttgtgggatttccaagctccagtttttcgaatatg

SEQ ID NO: 457 - DNA, 2146 bp, Unknown
  misc_feature (1)..( 2146): cDNA_ID_1693205_gDNA_ID_1591117_Annot_ID_150547 3000 nt of promoter + ATG
attttccactcaaaatgtcaagcttgatcctgtgaagattgtagtcttgcagagaagtaaatactaaatagacaatgttctaattgttcagtttcttatgtcaaacagaagaatgtttcaatagaagggaagtttacattttgttatagtgtgatgtctaccaaaactagttacaggacaatccaatggaagctttagatgatcttccttatacttaacagacacaagacaaagaccatgaggcgacgcaggcaaactagtatactttgcaagcaccctcctgtctttggtttcgagaatcattgggacaatgtctgaatccagtgcttcttttccaatctgaatcagcaaagctacctgcatatgtaaagaactttagactaaaaaaacattatatcgccatgtcaagcatgtaaaagagagtgtagaactaaccatgtttctgacttgtctgtacaaaaagccagaaccttcaacttcaagctgtagaagagatccctaaacaccaaaacaccaacaaggtcaaagtctgatccttaccctaacttctccagaactaagatctttcttctttaccatttgaatgacatcgaagcgagatatagttttcaaaggatcaggtactccatcttcccgagtagcgttagcaaatgcagagaaatcatgctttccaacaaaaagatttgcagcttcccgcattttagaagcattcagtttataagcacagtggtaagcccaatgacgctggaacgggtccatgaaagtgtcgttgtatatctggtagcgataaaccttgctagaggcagaaaaccgagcatgaaactcaggaaccgctgcactcagctctctgacacggatatctttaggaagaagaccgttcaaagcagcgtgaaagctatccaaactagtatagtttgaaaggagtgacaaaatgagctacctgaagaataacggatgatttagtttgtgttgagaagttgagaaagagagagttgtgactttagtcaaacctgaccccaagcgtgaactcctgcatcggtcctgccagctccaataagctgaagctcttttctaccgagctctgtaatctgaattaaggctttttctaacattgattggatagttggtggtgactcctgatactgccaacctgagaaaccaaatgcgcggatataaggaaacaagattttgatagatgcatcaaaaacttaagaacacaagttttgtgagaagacgaacctgcaaaacgggtgccatcgtaggctatcacaaggcgccatttataagcaccagaatcactaacctttaccgaactgttcaagttggtcatctgcaaaaataaaacaaaagttcagattacatcaccaacaaaactttcttggcatttccaaggaagtagagaagaagaaattgcttttgtggcgcttacggagatattctgaggagacgaaagatacccattagtaaagagtgaaggaggaagtgctggtgtaacgcaactcatcctcttcttcttcttcttcttcttcttctttgtttgctgccctgtctctctgtgtaatctcaagattctgattagggaaagactttaaaacggtgcgtatacggttagttagggagcggtaaattggtcagaccggaccattggttattagattgatttggtttaatgctactctaattcttaggttctttctaaacgcatcgttttgatatcacccttttctctctgaggccgtacgtggaagtttcaaactctcaccatctcctctctctctctcggtctgcagaagaaaaaaagctcggcaattttatatttttccatcgaagagattcccaattcttgagctttctcaatcaggctggcgtaataaacggtactccaatgtcttctttctgaccctagatttaacctggttcagttcgatagtagggtttgtttcccccttccgatcctcatttttgatgtcagaattgtgatctagtattcaatttcagattcttttttggaaattagggttcataacttaatagaagtttttaaatttcgtacagtggccatggcgttggctgattttgataaaattgtgtacattgaggtgtgatatagagcctgatttggttttataggtattgtttggtcatg

SEQ ID NO: 458 - DNA, 969 bp, Unknown
  misc_feature (1)..( 969): cDNA_ID_2182487_gDNA_ID_1591154_Annot_ID_150595 3000 nt of promoter + ATG
aaaaaaaaaaaaaaaaaaaaaaaaaaagaaggaaatgctgtttacactcgagacattggagatctctgcattttcctctcaaaatctgaatctttctgtgtctctgcaactagtagctacaaatccgttccttccctagtccgtaaccacgtctatgtccaggcttacgacgagtatggattcatggatatcgccaagccttttgacgattcctgggtcattcctgcctcacctgatgcgaacccgaatcctttctatattccacctcaaactatagaatatactttatctacgatgcacccggatctatgaattttttactttgtcgtctcccgttactagttttcgtacccgtttcaatgctacttagtcaggtagttctagtagcaatatatgtattattgttccaattaataaattcaactcgcttaaaaactaaaactcaactaaacatttttctataatacttttgtctaatcctagcaatacacactccatttactaatatatacattacctataaactgtgttgtatactaataccccatattcaccagaagacttatagagcatttcagtttggttccgtgtataccacatcatcagccgaatcaacaagtgtaaaaatccacgtgtgcatcagactgccacgtaatcaatcgtaaatagttgatttcaatagggatagtttcgtattttaattctttttaaggggcaaaaaaaacatttttccgtccattgaggaagcaaaggttttcgatattaataaaatccgagagagagagagaggaagaaggagagaatctgaagaagctgaaccagacgaaccataaaccgaggcgagagaggagagagcgagggaggtgatctcttaccacctcttcgtctccggcggcgagaaattcagtttcaatcggagaagagaggaaaaacaaagcgatacgcgagagaaaaagttgtgcaacgatg

SEQ ID NO: 459 - DNA, 41 bp, Unknown
  misc_feature (1)..( 41): cDNA_ID_3594363_gDNA_ID_1591156_Annot_ID_150599 3000 nt of promoter + ATG
  misc_feature (5)..(5): n is a, c, g, or t
  misc_feature (15)..(15): n is a, c, g, or t
  misc_feature (23)..(23): n is a, c, g, or t
taatngctagggatngttttatnactccaaaaggcaaaatg

SEQ ID NO: 460 - DNA, 969 bp, Unknown
  misc_feature (1)..( 969): cDNA_ID_3435522_gDNA_ID_1591159_Annot_ID_150603 3000 nt of promoter + ATG
gtttttgattgatgggttttcttgatttagcaatttttaagatttacttgaaagattccgtaattttgttctgattcggattctttgatctgtgctcactagctctaccaaagcagcttcctttctgaatccctagtgttcaattatgtgaacagattgtttactttagcttctcttccttttcattctagttttgcagagattttaggaggaacatgattgtttgaattgggagagacattggttcttgtaaaatgcgggtgcttggtttgagctcaagcttatgctctggtgaggataaggaagaagaagagattaatggagaaggctctctcacgcctgtttatctcaacgtctatgatctaactcctgtcaacaattatctctattggttcggccttggcatatttcactctggcattgagggtaattgtggcttcttctctattacttactagacctaaccaaacttttccctgccatgttcattattagtctatctatcctgccgattcatatctgccgagtctagccttgaataggaacaatgatacttctcaattgtagttgtgacttattgattaggtgacaaaaatgcttggttctttagacaatggtgtttattatattaggtatggaatacagaattacaaggaaaaagtggaacttgaggaatctagaatggaatgccttttcaaatcctgccttattgtcctaaaccattctcttgcaataattacaacttgcctgatgagtttataaatatatttctgctgaagctgttattgttgctaaatgtttatctaatgtggaattgttttcactttgctatgtctactactagctcatggtttcgagtatggatatggagctcatgagtattcgagcagtggggtatttgaggttgaacctaggagctgtccaggtttcatctttaggcgctcagttttgttgggaaccaccagcatg

SEQ ID NO: 461 - DNA, 3 bp, Unknown
  misc_feature (1)..( 3): cDNA_ID_3012422_gDNA_ID_1591193_Annot_ID_150647 3000 nt of promoter + ATG
aaa

SEQ ID NO: 462 - DNA, 445 bp, Unknown
  misc_feature (1)..( 445): cDNA_ID_1693477_gDNA_ID_1591208_Annot_ID_150667 3000 nt of promoter + ATG
acctcaaaaaaaaaaatctagatatttccaattagatgcgattgcgacatacatttgtgagacctgagagcatgaaacacaacaacatcatcaaaatgactaataattaatcagaaaattaggaagatttgattattatttatttttaaaggaggggagcccacaatatgattgtgaggaccaataagaagccataacctaaataagaattcactgaagagacaattaagacacataccaaatcggaaactgctcctttttgggtcgtccatttacttcacttccaagccctcccattccaaagctactctctctctttcctctcatctttgcttcttcgtcttccatctctctatgccttttagattctctaaacccatatcttcacttcttctcctaaaccacaggaattctctctctttcacatcatcatcatcatcatatg

SEQ ID NO: 463 - DNA, 810 bp, Unknown
  misc_feature (1)..( 810): cDNA_ID_1709992_gDNA_ID_1591235_Annot_ID_150700 3000 nt of promoter + ATG
ctkgtggctcctaatctctagagactcgtagcgacttggcagattccaattggctccttggatctccaccgttggccaaatcagcttgaccgacttgatgtggaaggaaacaaagttaggacatgccatatctattatctccaacatatcaccaaaaaagacacctagcatcattcgaagataacaaatggttaagagtcataatctttttaacaatgctaaacagtgatcatttaatttttataattgaaatcatgagacgatgagagaaacctgaacagttagaacatggcaaaagttaagaatcaagataaacattaggctaatggtcaagccaaagagctactaaagtttccagctttaccaaaatagtagtagatgatacaaaaatagttagaagttgcacgtttcagaacctaggtaacatgtggatgggtcctatagaagattacataggaagaggtgtttacacttattgaggaagaaagagagaaaaagtagtaactattggtgccattgcaaagatataagaagacaattagtttttttctttctttcacatttcgtgctggttgatgattccaaagctgtaagcatctctgcactggaccccttctcaaaaactcagccagccacaagatgatcactcaacatcaaacccacaaacttctcgccacgtgtccagccctcagaattctatccttcctttccatttccattcaacaactaatatagccttcttagtcccctgctgcctttacatacgatctcactcaccatcaaacaactacaacatctgcggttagtatg

SEQ ID NO: 464 - DNA, 692 bp, Unknown
  misc_feature (1)..( 692): cDNA_ID_1693546_gDNA_ID_1591237_Annot_ID_150704 3000 nt of promoter + ATG
acgtctctcacttctcagattaatcaacaactatctattgatatatcatgcagaattttaagaaaatataagaaacatcgttaactctgttaaaatacaactacatattaacttattaagatgagtccaacttattaagctgaactaaatgttggcattttagagaaattcaaaatttgtatctataaaaagttggttatttttgaagaattttgaaagagttgaaaacttataattatgcattagttcttcatttccataaaaatgttagataggaaaaagttgttaccaactttgtagatacggtaaaatcatagccgttcattggtagacggatcaaaagtaaccacgtcagctatccacgacaaaaactttttctctctttgccgcttcatgaacttatggcggataacaaaaagcgcaacagaaaattcgaatttttcaatatttcgaaaaagaaatttaaaataactcgcgcattaaagtaaaatagatctgaaccatccattcaccaaaacccttcatcgaacagcactcatatctccacgtcascatccgcgtttcagtatcttaactaatcagatctcttcctattctcttatataaacaaacacacaattctcgaagataacagtatcaaatcaaaaccatcacagcaaaaataactcactccctagaaaagtttgaaaatg

SEQ ID NO: 465 - DNA, 22 bp, Unknown
  misc_feature (1)..( 22): cDNA_ID_3056128_gDNA_ID_1591256_Annot_ID_150728 3000 nt of promoter + ATG
agccaagttgttttcaagaatg

SEQ ID NO: 466 - DNA, 2149 bp, Unknown
  misc_feature (1)..( 2149): cDNA_ID_1693605_gDNA_ID_1591257_Annot_ID_150730 3000 nt of promoter + ATG
gacgaattctattgagtggacacctcactcgtggtgccttgcagctcaagtaatcaacattggagccgaagtkgartgagttttggakcggacacccgtcgccacgccatcacccgagacacctatcgcctgtgggcgaggcacctgtccgaacatgtggcagcgggcggtgcagtcttgccgaccttggacggactataaataaagctctctccgcccaatttcatttttcaaaggcaagagagagactacaaggctgtccgactgataactcgtccgtaaccgagaaaaacttgcccaaattcagtaaatcttgcccgtggtcgaagaaactttgtccgttactagagaatctttgcctgtggtcgagagaacttgacggtgagtaaggtatcgtcgaccgtgattgaggagtttcgcccgagacccaaaaaactttccggactaccgaatccgtgagttgtggtcgaattgtgtgtttgtttacatgctttctagagctagtctttagatcatatgcatgcttactcacttagacttaactaatcggaagtcggcttaagttaaaaattgaatcttaaaatgacatgggcgtatgaggaacttgatatcactaaggaatggaatggactagtatttgactaggctaaggtgaatatggacttaactaattttacttgatgaattaagatatgattcgagggcttacttgccttgttagattgttatacttatatgagatatgctatgaggttgtgaataagtccttgatatattatgtataactataaatacgtgaattagttcttgatagtattataattgtttggggtgtggtaaaatacttatatagtactacatgaggttattgtgtctaagtggtattctaggtttacccgataccatcatgcttagaataagctactgccttcctttttgtgttatgattgtgtaagtaagtcttgatcctgagtggtcacttacatgatggcacaagactcggagcgtctgccgggtaatgcatgacgatgcattaaagtgatgttccgattataagcctttgtggctatagctcgggtgttcacagttatgtacgtatttgtggtgtgggtgtgcacgtacgtgtgtgtggtagcatacatgtggagaacatgtatacatgtatgcgggagtttgtgctgatgttgtggtgcacctctttggtaaggttggcagtatgctgggcccaaggttcattcatgtgtctaatttggctccatattctagtattattataagtatatgataatatgtttattacgtgctttgtgatctctgatggttaagtttacttattgagttgattaaaccctagagatttatttgtgcatagacccagctcagtgggtaatgttagactcatgattctacttgtcttacaggaayccatagtggaatgaccatagcggatgacgaacactacgaaatgccggaaataagatgttttgcgttgcttctgcaaaattacttgttattatgtaaattttaacaaggagatataaagatatatttttgggtaactctttgcaaagtacaagctatatactatgtataaagtgtttttgtaaaagcagccgagtgtttaatgatataagacctagtctgagtcgctcaacactagaatatcatgatggttggcaagcctaactggtgttcctagtgggaagagggtcgattataatttggttaagaaatcggattcatttggaacctttactaagttatggtcgatcatcttcactgtagcgtaactgggtcacccgtggcttgtccgaccatagggcgattcgtgggcgttacaagcatcatctaaagagacaggttgcctaaaggtgagttcctcgcggaacctcgaggagaaccacaggccgtcacgaagggcggctatggctacctccttgtttaagtttgcaatctttgatttaattgctttgaattttttgacgtaagattgcaaggattcgttctgaagttaagtcagaccccagaggtcggcttcagatgtcctatttacgatgagtaccgagtattgttttaaaaaggcgacagcgagctggtcgaaggtatcgatagagttcccttcaaaactagcaatatattcaggggcatg

SEQ ID NO: 467 - DNA, 2741 bp, Unknown
  misc_feature (1)..( 2741): cDNA_ID_3056141_gDNA_ID_1591259_Annot_ID_150737 3000 nt of promoter + ATG
aaaaaagtttggcgaaaaaaggtgataggtatcaataactagttgagatgggatagagataaattttaaaaaatggaccgacctattacaaacaatttaataaaagtaacacaagagtacagagactaaaacagtagctatggttttcttttggcgtctctgtaataaattggtttctggggatcttcgtcctatctcccatgccattcactatcaatacatttattgatgccttcattatcatctttcttttgtttttttgccgattcactttattttttttaactcgtaccatattctatagcattgatcctcttgtagtcgtaggtcgacttttgtttttatttgatagtaacacttatgtccttggtgatatgtatttttcagaaatgctttttcgatttatttaaatgtgtacccttttgtcgaccaaaaaaacaaatgtgtaccctatctttagtgtttactttgtagtttgtacaaaaatacgtttttctgttcgagcaagtttacttttgacaaagaaatgttattattataataataataatatattgaaatatcaaaattttgtgtgtaaatttattaaattatttgaaaatttcaaaaattttcaaaacaatacgagtatctttgcttaaatatatctaaaaatacacaaaataactaaaatatccaaaaaaatcctaatattttctatatataagtataaatataactaatatatacttatatttgagatatgttcgaattttttgggttttaaagtttagaaccgttcgggtattttaaaagtttgggttcgagtttggatcggatttttcggatcgggtttttcggatcgggttcgggtattatgcactggcctagataaaagaaagaaaccattcatcacctataacatttttactgcatccaccgttattatcagtatacgaacattacctcagtttcagcattatagcttagcaataaatagctgaagaaatgtagttggtattattgttatagcttagctagtggtggcaacatgtttattttctattcaccaggtgatgatggcttatcggatcaagtcttgattcgaacattaaatgatttacatggatcgatatataaacaagttaaaattggctcacatccatagatcgatcccataatctatgcgtttatacattcactgcactgtattaatttaacccaatcatatttgctcatctactacattaaattctgtcaaagtttcaatagtgtgttacacaataacggtcaaacaacaaatgattctccaataacaactatttagacagtcaaaaattttagcgtgagactagacggatcgatagggcataatagcatatatgtatagcccatagattaataaatagacattactacaaaaaatttggtgctaaacaagttttttcttaatggacccttttattagattaccttaaataaaccgatgttaaaaatcttgttttacaaaagtaataaaatgcggttggatatcaacatttcgtgctaaataatccgmttttaacattttaacttcaaaaaattaaaaataaataaaaaaatcaaacacatccttatcttcatgaatcgcctctaaatacgtagcaaagattggtcactttgttgaaaaagacaccacttttatcaagtctgaggagtctgtaaaagaacgttatttcttgtttgtcttcatacatcttattgttcatacgagtgaacgaatgcttccacttatgtaaatagacatgtgagacttcttcgtaggttggcatcacctatagttggatattttcttgttggtaagtttttagatagccaaaatactattaaacattcataagcaagtgaaaatatttatttgaacgatttaactaaaatgttgttatgtatttatacaaacatatatatttttttatacatatacatgttgttattttactaaataacgtttttgtccaaagttttttttactgaataacgtgtaatcaaataaaataataaaagaacaagggatctcttcttaataaaatattttgatttcatataaaagtaggtgatatctataaaataaatttacaaaatgttttagtttgtgaatgaacttcagagtaaaattgtaaagttaaaagttaattttacaaatttaaataattagtttagttatttagcagatacatatagtcagtctgctatcatagcatttaggttgaagcctttaagtttatcttgttcaattttttatataatatatatatttttttaatctaggtggtaaacaagctttatcacttaaaaggttaaaatgagtgggacaataatagatgtagctcataagttctatgttgaaaaagattaataccaaaaatcaatcatttacttataatcaaccatggagtagaaaagcaattacacaaatagagtaacttctaaaatatttacagctttttaggtagtgcaattactattagtactatttcttaattctctcaataaaataaaataataaaaaatcatatagataatcccaatatccccaatcttccactataattgaacaaaaaagactcctttttaaattcaacctctcccaccttctctctgcaactctctcattttcttaaaatctctttctcacagaaccaaaaaccaaaatctcagtctctaacaaacaacaacaacacacgagtcacgaggttgaagaagaagaagaagaagcaaatatg

SEQ ID NO: 468 - DNA, 1256 bp, Unknown
  misc_feature (1)..( 1256): cDNA_ID_1379239_gDNA_ID_1591265_Annot_ID_150751 3000 nt of promoter + ATG
aataaaaagagatgttgacaaaacgataaacaatccgacatcaactgcgattaatttggccttatgatgaatagatattactttttagatatcgaaagtgtatgttactttgtttgttagccaagtgcttatctttcttcttattttgaaactaagcataatcttacgagtaaaaaccaaaatctggctaaagacctataacaacacttacttactagccgttacatatgtttcactcaaagcataaatttttataataacaatttgtttttattctcgtatcaataatttttttaaaaaaaaaggggaacagcttggcgaattattccatttttttaatttaaaagtaaagaactgaaaaagggagaatctcaacatcatcacatcacatggcctctttcttactattatgtaactcaattattccctctgcaatgtttttctggtccctaactataaacatcttttgtgatgtttggtactaaatgatattttatttatttacaaatagataatgattctagtagtagtaccatactagaatttagagaaatatatgtggagactggagagagaaatacaatttagttatgcataattatgtagaaaggttttgaaagtagctagtaaggtgaagttttattgtcaaaatattagtatgagttttggaacaaaaactagttcatctcttgtgtaattaaagcgtgttatagtaatagtaggctagcaaaagaaaagagatgcacatatggacacggattcgtacaaaggttagaagaaacacatgttaaggtttgaaagaagaaaatccacccctgtttaatgctcctatacacgaaagagctctcaacgcgtaatatctgtcaaattttaattcagaggacgtgttaaattagccataactttagtttaaagctaaatttgataataattacaataaattccaattccatttgttgagggaatagaaagaaatcaaacgaaccaactaggaacggtcatttagccagaaaatgacacatgtcagttaactcctttgaacaattgacagaaaagttctagagtggattaccggctatacccggtaaacagtcaattactataaaaacgcgttatagccatatttatgatccaaaggggtttttggttgtccgtgtcgttcgtcgtctctctcgccggacttgttcattcagatttcgtctctctctctctctcgcactcttctttaattttgtcctccgtaaaatcttgagatg

SEQ ID NO: 469 - DNA, 446 bp, Unknown
  misc_feature (1)..( 446): cDNA_ID_3056202_gDNA_ID_1591291_Annot_ID_150790 3000 nt of promoter + ATG
agagattttatatattttttaaataatatcctttttataacattttattttataaacacttaaaatgcctaaaaccaattaaacattttaagcattagacaataatgatcaacacatacttagtgactatcgttttcttgaaaattgcttcatgtacattgagtggaattattatagttgattagtcttcattcttgacttttcacccttcaaaacaaaagtttttttctcactatgagtcatttgataattaattgaagaaaaagaaagaatcaataatgcatgttgacagaaagacatattaaataaataaataaataaactaatgattcttcttaaaagtccaaagtaagaaacagtcaacaaacgttggctatacaacaagaaataaatacatcacatttttcagacaaaactccaatttcacagtgaactcaaaaacaatg

SEQ ID NO: 470 - DNA, 1110 bp, Unknown
  misc_feature (1)..( 1110): cDNA_ID_1012213_gDNA_ID_1591294_Annot_ID_150794 3000 nt of promoter + ATG
tgaaaggaacgttcccgacgtatcttggtcgtccttggaaggaatattcacggacggtgataatgcaatcggatatatccgacgtgatccgacccgaaggatggcatgagtggagcgggagttttgcgttggacactctaacttatagagagtatttgaatagaggaggaggggcaggaactgcaaatagagtgaagtggaagggctataaggtaattacaagtgatacagaagctcagccatttacggctggtcagtttattggtggtggaggctggttagcgtcgaccggttttcctttctcgttaagtctttgaaattaaaaggttgacttattattttaataaagattgtatttctctatctacatgtatcattaaatcgatgttcataggttatcattctcaagttgaaccaagtcaatgcataactcgggctggtatagttttaaggcctaaataaccggactttacggggtttattgggttgattacttgattvtaattcataaattaagataaaccgggaatcaaackcaatgttggtgttgtgtcacttgtcggcattaaagcccgaaagagatagagatagggacgccacatgttagagacgcacatggccattttaatatttgctaagataatgttctttgttttcttttaatttgtagacattttcatgtgtttttttttggttctctccaatgtgtatgcttgaaaaatataccgaggaacccatagaattgtaaagaatgttcgctttctatggacctactacggatgtagacgactttgacatatacataatacataaaaccattttttgtctttaaaccaaattacaatataatcaagttgattaatcaaaataattacaacgttatcatgaatcttcacatgcaagatcctacacacacacttagacgacaagaagtcaccgtggaacaagcgcgtcacgttcatcattcacatttacttaatcccacttaaaaaggcaaacaacaacatgtcttctctaacataaacaacagaacataacaaagcccaaacaatcttagtaataatcccaaaaaccagaaaaaaaggagctttgcttttgtaggaattaatg

SEQ ID NO: 471 - DNA, 3 bp, Unknown
  misc_feature (1)..( 3): cDNA_ID_1710148_gDNA_ID_1591295_Annot_ID_150797 3000 nt of promoter + ATG
saa

SEQ ID NO: 472 - DNA, 2792 bp, Unknown
  misc_feature (1)..( 2792): cDNA_ID_1693769_gDNA_ID_1591299_Annot_ID_150804 3000 nt of promoter + ATG
gacttggagactatggggcaatgggtcaccgttagagctagdggatccatcctttcgtgataactatcgaataaatgaagtttcgagatgcatccattgaccatatcgctttactatgtgttcaagaagaagctgaagatcgtccaaccgtgtcagctattgtccagatgctcactactagctcaattgctctcgcagtkcctcaacgacttggttttttcgtccggagtagtaaacatgaacaagtaggatactaggattagtggatcgtctatctatcaatacgtccgctctttgttcagtagatgatgctttccattactaatgtagctcctcgttgaagacaaaagtcgcgatatatgatttagtctattgaattaagcatcgatcgacaacaaacaaaggtttagttgttaattagctctttcttaggttttatagtctgtttatttgttagcattaattatagcgtttttacgattaaagtaaagcaaataaatggtgtaacatatattgtacatgaaaatgtgtaatggtggagggagggaatcaaaacctctgaacaatgcatgtgaaaactttcttctttttagtgttyttattgagtaactagattatatttaccaaataaagagagttgaagtaagacacaagcatatgcaatacttttgatagagtgtcttgcaagcaatatatataaaatatagatgttaatatacatacatgtgatgtatgcagatacatattagtctatatataataatttttgtagagaaattaattgtgttaccttttaaagtcatagatatgataaatgatgttatctaataacttttttcttttcaagattagatggagctctatagtagtcgtttttgctaaaatataggatattacataacttagcaaacgataacataattgatgtaatcctagttcaattatatttctgtaaaaaaaaattcatacataactttttccaacaaatatgaactaaactatcgataccataaaaagtaaccccacatgtgtttggtaccaaaagatgctgcgtagatatgagtgcgagactgagcttgacacacaaattttatgaaaaacaaacacacacacacactcattatataaatatgtgtatgtgtgtgttgataatgagagaggagagaaagaaagcaaaagggtttgaaaaagaaaaccacatgtttgaaggatcatatcacatggctccttaaccccacacttttgccttccctctttttcttcaagcttctttattcactccttaatacacacataatctcttatatagaaaccacatgttgccaaacatatatatacacatattttccaatatatatgtatggtttgttcactaataatctatattttttgttactaattccaagaacattaaatgtggtctaacattgacaattggtttatgtaactctaatcctaattaagaagtagtgagttaaaacttaaatctaatgtttttgccttttggagatgtgatagaatagttgaaaaccccacatttgtttgatatgaaacttgggacatgtctatggtatcaaattcattggatgatgaacacatttgacttttgtaaaatttagaaaattacttctaaaattttattcataaatttttcatgatatatctaatttccgcattatgggtggttgtcttttttttagtagatatatttaggtgagaaattagacagtttttgcattagagttgaaaaaagttactaactaatatctcaaattcaaatttaaattttaaactttttagttaatgggactgagctacaatttaaaattgattatggaagaaaatctgaaaaggctctaacttttcccctcaaaacgggaagacaaatttttgtcttctaatccaaagttcatcaaaataataacccaaactaaaccgctaaccaatataaatcaaaccagaccaatattcacaattttattaacttatacgcttttacaaataattaaccaaattagtaatgtgaatgaatgtaactatttttccattatcaggaatttattcattaagaagtggaaaaataaagataattaggataataaatcgtcaaaccggaaccgaaatctcggtttgctccggtcttcttaaaccgtaacgtcgtttacaaaaatttgatctttactttaagttttgtgccttttacttcatctctcatctcttcttctgctttgagaagaaggaacaataaatgcagttgaagtcacactctctctctctctctccaagtcgctctctttcgaatccaccattgctgaaactkgatccttctctgtaagtcttcaaatctccagagtgggttttgcttccgggaaaagtactactcgctgaatcatcttccaagattcttcattttgttactcgatcgtttgatccgatttcctgtcatcggtattaagagaaggatctagatatagcttggtactaaagtagctagatattgaagtagcttcagcaatgtatttacattttgttcactgattttgttttgtttttgctgattcatgaaatggagtcaatttgagtaagaaagttgctaaatttgggtcaaactgcgaaagtcttggattctagattagaacttgtagtttaagtttttgggcttctcaaagatgtgacctttaaatgcttgattggtttgagaatgttggttttggttaccttggatccatttgctcaatgtgaatgatttgtttgtgcagagaatctaaatggtagataattttagcagaatg

SEQ ID NO: 473 - DNA, 10 bp, Unknown
  misc_feature (1)..( 10): cDNA_ID_2687382_gDNA_ID_1591309_Annot_ID_150822 3000 nt of promoter + ATG
cacaaagatg

SEQ ID NO: 474 - DNA, 121 bp, Unknown
  misc_feature (1)..( 121): cDNA_ID_1375975_gDNA_ID_1591317_Annot_ID_150833 3000 nt of promoter + ATG
tgagcttctccatttccatttccatcgccatcggactctctcctcttacaaacttttcatttttgttagctctcatctctacgtcgaattgctttttctcttcttctccgattcgaaaatg

SEQ ID NO: 475 - DNA, 3000 bp, Unknown
  misc_feature (1)..( 3000): cDNA_ID_2144243_gDNA_ID_1591323_Annot_ID_150845 3000 nt of promoter + ATG
aacttaatactattatttataggctaattagtaattgctcatgtagtcatgttactacttactactattatagtagtattgtttattaccgtgatgccaacaggcaacaaccataatcaagtctcttaaaataattttgtgatctataatactaataagataattgaatataccgtatgttcatcttcagataaaggtaaggtcaaatggagtgctacacgtcaagacaataagaattaaatttgactctgtagatccggaaaacaaaatgaaagaaagagtaagaacttttttgtggatttttctttttgattacaaatttgtaataattaatttttttgggggaatggaagatagagaaaggaagagcattaagaaaataggagaacatatggaaagttacaataaatacttggtacaaaagttgcagaaaataagtaagaatatgatccagaaaagattagaggaagaaaagattcttccaacgtagattcaaattattcaatattatacaaagggtactttggaaaatccacaataaccacataagaaaacatgcatcctcatctttcgactttctcactttttggtgattggtatcttttttttcttcgaaccttccgtgtttgatttatcgccctcttgttcttttgtcccttttatattgctggtcctaatctgatgaagaaaattaatcaagaaattagaatgatttttctttaaatcaggatctttacagttaatgactgattatttctataccgttttggcgtagccttgctgggccggatacccacgaactgaatgatgagtacaagatatgttaatttccttcaaggttaaattagttaattacatgaatctcaaataaccaaaactcctatatatatacacacctggtgcaccagaggaagaatccatagttgagaaataactaaacaaggaattgtgagaagagtagattcgttaatgataagaagcttggttttgttttgaagatgatgctcgatcttcctatatatatatatatataattttctacttttttttccttagagacacgactcataattggtttgcaattttgcatacaaagtcaaaccacacttgtttattcataaaaatatagatttatgagaaagtgtacctaccatatacaaaccaagaacttaacgtgttgagattatactcgccaataatctaaaatgatgtaatactctacttaatagtataagtttactacaaacgtgtacccggattatcatatatgattgttttttagtaaatttgttatcttcaattgattattggggggcaaggtctcctgtaaatataacaaataaaacacgatatagagtggctcttaaactcttaagttagaaatagaaaaataataaagtgaaagactattaggtgagtagatgagagagtagaatggaaaatgtcggataacataaagaagaggaggtatagtcactccatgccgatgaaggatggtcaacgatgtatatgttaagttaagaggcatataaggtgaaataagtaaaaatgaaagtgttaagtagacgaaggcgtgacctagaagtggtctttggatgtgaccgaaataggtcggaagtacgtatgagtgaaaactaaaggaggttttgcgagcgaagataaagaaaggtgtttatgctctctagaataatcatgaactagtaactaagtgaaagtttggatccccttctcgttaaaaaaagagttgtaccacgttggcttagtatattggtagacaaatccggatcatattcagatgcatcgacttgtgcatgtactatgcactcgtgtagttatcacctaccacctttgtctttatctccctataaataaactagtgaatcccgagatgtaaggtgatatcatctctataccgtttgcagtgcaaaatgcggcgggtcagactatcactatgtggagcaaatatgatatatcaaccaactaacccctcatataactagagagatcttaaccggaaaaaatgatccgcagtttcatacaaaaagctctatagtttgttctttaagcagattaaagccattgtaagtcaatagcttttgattaagatttcaataaaaagagcaatttatattcctactttacttaaatgaattatttgtggaactttagtatctacggaagtgacgatgggacaatgaagtatggtgacgtatgacgattgttttggttagattgcaagcacacgtaacggaacaatccaaaatgatccaaaaatttaacaaaaataaatgtcagccaatgataatttattatattattcttaggttattattattgaaaaaactttaaaattcataatcttcctaaaattcacttaaatttatccaaatttaaaatccttcaaactaatccttaaattatttgtagctagccaaccaactacattagttaaatttaaatgcattgcaagctcacatgtatcaattatatataatgacatgttgtcaacatcacattaaaaacaaaaatattatgttttctgcgtagaaaaaaaaagctttgtggttaattttttttaatatcattttttatttcaataaatattttatggataaattaaaaatatgttaactccattagacttaacactaataacagctaaacacaaaaattgtaacatcttttgcaattcattgtaatgtttgcaattagtgggccttcttttgagccttcttatgaaccgaatatttgcctatttgggctttaaaacatattgggccgataaaaaagagctacaaaataaacagctaaacaatttttgatttaccatagttttttagtttttacccgacccggaaacaaaatccggattttttcctccgacccccccaatagatctgactgaaatcaaaattttccgactctttctttctctcacactagtctttcattttcctcctcaactctgggcttgcttcgttctatgtttctccactgcta

SEQ ID NO: 476 - DNA, 620 bp, Unknown
  misc_feature (1)..( 620): cDNA_ID_3095417_gDNA_ID_1591346_Annot_ID_150858 3000 nt of promoter + ATG
gatgaagagctctattcgaattcaagtgagttctgtctatcttcttgtctacttctcaattttagggttatataatrttatctattaaactctaattaggttcaatttagtttgactttttttttcccttttactcaatttaggttctatttgggtttatgtgagacattgtgtggttttatttccagggagaattggtaccagttttagtttcgggttaattcttctcattgtttatctctacttccatgattggtcttcttcacttatgatctcaaagatcaatcttttcaattgctcttggattctgagtttaatggataacaagatttgctatgaatggtttcacactactgttggaagatctatagaatgagcaatattgctcgttgagcagagaatatataaaatatataacaaagaaacttgatagattaaaatcaaatccaatttgttgttattttcgttttcgtgtgcagatgtttccagttaggaggtttaagtctagttattattacagtttcttttttacttgtttgctaattttactctatttcataaacttgttatctacagatattcttttgatgtttggtgcttactagttggggatggaaatg

SEQ ID NO: 477 - DNA, 247 bp, Unknown
  misc_feature (1)..( 247): cDNA_ID_1693908_gDNA_ID_1591351_Annot_ID_150861 3000 nt of promoter + ATG
gtytttgagaaccccgccrrtgttttaagattttttwatcatatatgatatatatatatatatatatataagcgcgtatgaattcggattatccaaaggttaaactacaagaaccaaaacgacatagtagttttgtcgtttagaatctataagcgcagacaaaagtcaactttagaatcaacccaaaaatagaagtcaaaattaaaaaccaaaaccctaagattttagagtagactctcttcgaatg

SEQ ID NO: 478 - DNA, 144 bp, Unknown
  misc_feature (1)..( 144): cDNA_ID_3056264_gDNA_ID_1591352_Annot_ID_150864 3000 nt of promoter + ATG
ccaraaaggtmcgggttttgtwttgcttacaagaacaatgtttattaaggatatattgatcttacaatgtgtcttgtatcatcatttggcttcagattttatagacgaaattaagaaggaggtgaatttcagagtttgtcaatg

SEQ ID NO: 479 - DNA, 1018 bp, Unknown
  misc_feature (1)..( 1018): cDNA_ID_1025094_gDNA_ID_1591353_Annot_ID_150865 3000 nt of promoter + ATG
ggttgttgttgcgagagtttgctttatccctgtgatttaatttataaacttcaaatctaccaatattttagtatgcaaaatgttagtgtgcaacatacaataatatgatggtacgaaccttttgggaagtggatggaaaaaatacagactabcaataaatttaggatggtacgaagttgtatgttcaattacatattactagtgaaattttttaggatttgaatggttacggcagttgaggcggacaaaaccgtcaacggatcagaccgttttttatttaccattcatcaattatagtccgcagtggtttggactaaaaaaaatagaagaaaaccgatgcggaccatctgccgaccgtttttacatacaaataaacttggtccgcagcggtttattgtccgccccaaaaatgagatgaactaaaccgcagacaaattagaccgctttgtccgctgcctccattcatagccctaatctatattaatgcatattaatccgcaatagtgaatgatgaattaaatacgggcttattcgatttcagtcagatttgcatcatactacacaactatttatattttagatttggttaaccaacttataaaaactttaaatactacacaaccatttgttttttagatttggttaaccaacttataaaaacttaatttatataatcttgttggtttttgttaattttcacatagatgtccaattgttcccacacatctcagttttgatatccatcttcttatcttcgttaaccacctaccaaatgtcacgtggacgctccattcggtttctatccggattcgcggtggattctcctcccaccccaatcatcggttcatttcagcatttggttatatccaaataattttaaccggtttataccgaaactactcgaaccagacaatctttgattggtagaaagagagccacgtaagattatctcttctaatggcaaattaaccaaaaacgtaactgaagatccaaagagagagagagaaaaaagacgatg

SEQ ID NO: 480 - DNA, 56 bp, Unknown
  misc_feature (1)..( 56): cDNA_ID_1693928_gDNA_ID_1591354_Annot_ID_150867 3000 nt of promoter + ATG
tcatatattcttgaactgagcatgcgtatttttgataggcaagaaatcgtatgatg

SEQ ID NO: 481 - DNA, 422 bp, Unknown
  misc_feature (1)..( 422): cDNA_ID_3439599_gDNA_ID_1591360_Annot_ID_150880 3000 nt of promoter + ATG
aatacaaaactatagatgtttccaaaaattgtgtatagaagtttaattaatgacttagtttgactcgtttgaattagtgacaaagtaagaatgattagtaaatgacacgaatacccctcaaacttaaggtttggttgttttcgaagatgcaaaaacagttgaagacaaatgtaattttcgtcttttcgaaaatgaactcagccttttgtgctgttgaaaacaaagttgatctctgtttctgacatgcaaatcttactctcttgtttttgtgtttttggtttttgtctaccaaaaattatttagcaatagagtccaaaatatttgtctttgtctgtgtattctaactcaatcagtcaaattagcagctaagctgaagttgaattattcgatcctaaagtacttcattatgtgtaaaacagatg

SEQ ID NO: 482 - DNA, 322 bp, Unknown
  misc_feature (1)..( 322): cDNA_ID_1694019_gDNA_ID_1591381_Annot_ID_150901 3000 nt of promoter + ATG
ctatgaaataaatgatggatttttttccttctaactctctaatgatacaaaatacaaagattccaaaacatataaactttaattcatttttaaaaaaaaatagtattttacatatgagatgagatcagaatcaatagagtacaacaaaacactctgtcagattcccacttagttttgaggattccccaaaaaacaaatttggacaataataatgctcaaaatttaattaataagtttcctcaaagtataattaccaaattatgaatgaatagtattgctctctctcagaatcaaaacactgaaggagaaaaaaataaaaatg

SEQ ID NO: 483 - DNA, 712 bp, Unknown
  misc_feature (1)..( 712): cDNA_ID_1694031_gDNA_ID_1591383_Annot_ID_150906 3000 nt of promoter + ATG
tgttaaaaatgataatagtagcgataatattatataactaactaaaaatattttctattattttttcctaaaaaaactttttttaactgtaacaaatttttaaatttactcaattttatcgtaaaaatagaaaatggcacgttgtacggatcctaatcaaactawactttgtttttttttgtgtgtatgtgaaaatcatggttttaagttcgttaaattcgcatactttccagatgtccggttcaaccgatctaaccgaaaccaagcaagaacgaaatgggctttaaagcccagtgaaccaatcaatgaatgtagaggaacgagagtttttctgaactctgttaaatttcgtttgcgtcttctttccattctctgaattccttccatatctctctctgtgtgtcttttacaaagaccagatctctcatctgtgttttgttggtttatctcgaccaaagcccacacgtcacgttacgttaggttacaaaacaagttttttcccttataaaaaaaacattgataaaatcgaaaaatcaattcctattttgtttccaaagcaaatctatatatctattacccatctcgaattcgaccgaacccatgttctaatctccttcgcaacattggaaatctattttaaaaatccgttcagattwaaaattagttatataagtagtttggtgactcaattaggtttacacacaaagacatg

SEQ ID NO: 484 - DNA, 1737 bp, Unknown
  misc_feature (1)..( 1737): cDNA_ID_3036089_gDNA_ID_1591388_Annot_ID_150910 3000 nt of promoter + ATG
cagctttggatgctaaaggtaaaatatttgaacagtcaattggttattgctcgaaaggaatacagcaattgtctgaagcaactgcttacaagatcgtcttccacgatctgagcaatgttctctgggatggtctgtacctcggggaagttccttcctcaaggattgagccgtttcttcaagagctcgaacggtgccttgagattatctcctcatcggttcatgacagagtccgaaccagagtcatttcrgacatcatgagagcttctttcgacgggttcttattggtcctccttgcaggtggaccatcgcgtggcttcacaattcaagactctgctgccgtagaagaggatttcaagtttctatgcgatcttttctggtcaaacggagacggattgcctttggatttgatcgagaaggtttcgacgactgtcaagagtatacttccgctgctgcgcacggatacagattctttgattgaacggtttaaagcagtgtgtctggagaatcatggttctgacagagggaagcttccgttaccgccgacttctggtccgtggagtccgacagaaccaaacacacttttaagagtattgtgttaccgttacgatgaacctgcgactaagtttctgaaaaagacctataacttgccgaggaagctaacctgagagtgacctacttactacattggtacaaaacccggtttagtttgaaatgtggaatatattttggttaaagcggctagcgattggtatttggcaaattaaattacttgtacaagaaagtagaaacgttttagtgaaatattcttcttttgtactaatcgaaagcttgtgggctttgttacatgttgtcaactgttataaatttgtatatttaataccttttgtttttcatctttctttttcaattttatcagatttctgattgataatttcagatttctacgatgggtcattgaatggtcttttaagaactcataatgtttatgtgatgggtaacatatatcagatatatgatatggttgaaacttgaagtcatgattcatgatccgtttagaaacgtttgaaatgagtatcagaaaatgattattgtagatatcaaacttttcctgcagacacgttctagtattttgctaaaataatagtttgttgcttattcaaccaaacaaaaacacttgttcaagtagcgcaatatcttcgatagttcgattcattattattatgatacccttcttcgacttctttgatttcctcgagttcttctccatacgtcacatgactcacatcgtcagcgatttcatggcaatgttacatgtggtggacgacatggagtatccgcgaccgcgagatgatcttgaagaggtgtttgctttatgaactgtgacgatgaatcggctctgttttcctgtttccaacggttgtaatcacaccatcatcgttgtcttcatctatactaatattcaaatggtcaattataaagcccaataatctaactaagcccaaaaatgaaaacacacggactcagcccatacaaattttaacacttaaggctaatgggtctgtcacgtgcggaatagactgaaaacagagcatcgcacgtgccgcatcaaaatttgaaatcacgacgacttcaaaaaaatcccaaatggtaagaaaaaaataataagttgcagaaaaaacagaaaaccctcttttctctctcttctctctctctcgaggaagaaaggcaacaactatg

SEQ ID NO: 485 - DNA, 77 bp, Unknown
  misc_feature (1)..( 77): cDNA_ID_3056319_gDNA_ID_1591391_Annot_ID_150918 3000 nt of promoter + ATG
gattcttcaaactcctctctgaaagttctcatttttggtttacatttcctttgagtccactgttacttactaaaatg

SEQ ID NO: 486 - DNA, 131 bp, Unknown
  misc_feature (1)..( 131): cDNA_ID_3056323_gDNA_ID_1591392_Annot_ID_150919 3000 nt of promoter + ATG
ttattcaaaatattttcaccaactaaaaagagatacatcgaaacaaatctctctaatcatatctaagttatacctttttctttataaacaataaacaatagctttgatttgaagcaagaggagcaacaatg

SEQ ID NO: 487 - DNA, 241 bp, Unknown
  misc_feature (1)..( 241): cDNA_ID_3056342_gDNA_ID_1591402_Annot_ID_150935 3000 nt of promoter + ATG
agatgaaacgtaaaaatgctagagagaggaggagacatttataggttcctcctgatcctgaaaagctgtagaaagaagaaggaaaccttgagtttgtttactgagaaagtggtgggccttatttgggctttattattagtttaagcccatttggcttcaaaattagattctgatcaattagaagcgagagtggcaacgaatcagatctgaatttgccgattactcagaaaataaaaaaatg

SEQ ID NO: 488 - DNA, 172 bp, Unknown
  misc_feature (1)..( 172): cDNA_ID_1694109_gDNA_ID_1591404_Annot_ID_150939 3000 nt of promoter + ATG
actttggccgtacggaaacagcgtcgtatttggatgtctcattgtctttgtggcaaaaaggcagcgtgctaaatccgtcctttgccaccgttgagcggccggtgaaccccaagccgaatcaccgtctctcccacctctctctctcccctctctatctctccttttttacatg

SEQ ID NO: 489 - DNA, 1839 bp, Unknown
  misc_feature (1)..( 1839): cDNA_ID_1694121_gDNA_ID_1591406_Annot_ID_150943 3000 nt of promoter + ATG
agaacgagaaaaaaaaaacaaatctttaccatcaatgtgatcacgatggtgatgtgtaacaaagacaattagctttctaggtaaagcatcaacgattttcttgagctggttaagacaaaaaaaaatgcagttgtgaataatttaaaatgcaaaatgtaaagaccagatcttctgtaccattcgaaaaagaagtaaagaatatagtatgaagagcgaaaacaacacgtagctactagctagggacaaacctcaacgtggagtttagagagacatccaggatccactatcaacgcatccccatgagctacaaaatcagccccttgatggtcccccaaaccattttctggagcaaacacaaccaaatttgttgtcctgaaaggtttcaatgttttgctatgcatcggcacaatcataacaccaggtggatattcctgagataataaagacattaaaaagtaggattctagtaaagaacaacatcataagatggaaccgctttgatgaagtaagatgaagaagacaagtatagatacttagatagtatggcaacaagagacctggatagccagagaagatgacaacttatgcttcatagactgacgggaaccatccccaagtccaagtagtactaatggtccaacgcgatcactgcccaattttacatctataagagagtcgaagcatgattccattgacatccacttacagttgtctgcacaaaaacaaaactttttgtttcagtttccaattctcaacgtttctttcgaatcgagtgaagctatttccataagctctgaaaatgtggaaatcaagagagattaatactgtatactatcgaattaaggacgaccttgtaaactttgatctgtatttaagagcttcccggagataaaacaagtacggacacaagagtcaggtccaaactcaggctcttctacagacctgacgaatctccactctcctacatcgctaatatcaatccctaaattctccagcagctgcatttactcggaaacattaattcgcggaaacaatgagaaaaagaggacagtgctaaactcataaattaccagaatcagtgtggattcgaagtcgaaattcatcaaatcaacctcctccgagcatgagtcaagtatagaaatactaaatccggacctcactccgtcttccagagcctgtaaatctgttgacggtaagtcccagagatcggaatcgacaaaggaatcgtaagcttcatctccaaatttcgccggctgtttttgcttctcgagtaggaactcaacgtcgtctctagggctcttgatgatcaaagcaagtttcagatttcccatttctgcagaatcggaattcacaagtgtgaagaagctcgccgatgaaagttttccttgtttttcaaagtttaagcggacccaaaccaaatcggttaaaccgttgggttacggtttagcttggtttgatcgaattataccggattcagtcagattataatttgataatcagatagaggcaaaaagtgttcaactttctttcttcttgggttgtgtgttgttgttgttaaatgtgtgacgtcatctcaaaccaactgtgcttcttcggaatctgtaagaaaaaaaatcgatcctttcgactagggaccgcctaaatcatacgcaaacaaagtctcttcctttacccgtctacacgttcgaattttttctccgggtcgggtcaatgtcaagaacgacgagaattgtatataatcgtcgattcacgtggccgggtttatcatttactgctggatctcgttttcaattttgagtcagattccccccaattgagagattctagggttttaagatg

SEQ ID NO: 490 - DNA, 254 bp, Unknown
  misc_feature (1)..( 254): cDNA_ID_3038249_gDNA_ID_1591418_Annot_ID_150961 3000 nt of promoter + ATG
ttactacaagcctaaattagatctaagcccattcaccgaggcaaaaacttttcttaccaaaatccgcccctaaattttgaaaaatcaaaatcaaacccctgaaaagtcaaagcgacggcgaaaggaagaagaagagagagagaaaaaaacgagacgacggtggcgatcgaaaccctgtgccctaatttaaacggaaacttggttcgccgccgttctgcgtcgcccggcggcggaaatgtgcgcttggggcgatg

SEQ ID NO: 491 - DNA, 1735 bp, Unknown
  misc_feature (1)..( 1735): cDNA_ID_1694223_gDNA_ID_1591434_Annot_ID_150981 3000 nt of promoter + ATG
ttttgggaacaaaggctgattggttctctgatattagctcttgcaggacatgttgcagtcgcttagaaagaactttggcaatgatcttatagaacaccgtacatagagcaataagtctgtaatctaccattttttgtgggctttgaatctttggtattaatctgatatgagtgaggtttatctttgcaggaaaaatacttgagaggaagaaagattgaacttcagaaataaaaagagatcccacagtgtcctagttggactagaagaaacaagccgagaagccgtcatgttctggtgctttgtcaggatggataaagaaacacgccacttttatttcctcagcagttggtatggagataagaatgttatttgttgtgactgaaatgcttggttgaatcacctcccttacaaaatcgaccctttcaccatcttgagaggtaaaccgctgattgaaatacttagtaatgactcgcaaaataccttcctcttcaaattgagggagcccctcattatcttcaataactgaaaacttgtttactgtcgctcgtcctttggttatagcatggaagtaacccgagtttatgtcccccaaagcaagccataagtgcctgcttctttgtttccagaagttctcttcagctttataggccacaagtagggtttggtttatgttggttatcatgttttgatcatgatcagagttttccattgcttcctctagtttcttcccgttttcctcaataatcttctgactattaatatgcgtttcctttgtccaagagatgatttctctacggcatctattgttcaggacattccacttcattttggtatgatgtatggtgcccgcttggttgtctttacaaactcttgggacctcgtggaacaatggatatgggaatcaccatttctgcaactgttgcagaggtcatggaatctcataaaagacagagacacataattgctttacttaatcaaatagaagatcacattgagtctactcgccaaggtagaagagatgagagagacaagtctatctggaggcaacatgctgacagttttaagagtatcttctcctcatagaaaacttggcaataaattcgcaccccaagccaaaattacgattggtataaaggagtgttgtttcctttctcaaatcctaagtactcttttgtaacatggctcacttttcgcaatcgtctagcaacaggggatagactcagcaaatggaatatgggagctcgggttgaatgtgtattgtgtggagaagaagaattggagacacgtgatcatcttttttcttctgcccctactcctctcaaatttggctctccttaaccggcggcattctcaaccggagcaacacttcaagttggcaatcaatcacttctcttctcctcgattagaaccagccatacatccatgtcttcatgatacgctatgtttttcaagtttttgcaatatatgtttaaatttcaatattttccattgagttcggaatgtttactcttttgagatgatggtttattggtttctattcaaaaatttggtttttaatcatattcatgaactctgaaactatttaaaacttgaaatgtttgttttggaaagtgttaattggaactagcaattgtttatggttgttggaaatgaaaacttccaagtaattgaactttaaggtgttgtgtagtgagctcaaagcatttcgttagggatgattgttgttattctaatg

SEQ ID NO: 492 - DNA, 235 bp, Unknown
  misc_feature (1)..( 235): cDNA_ID_3056421_gDNA_ID_1591442_Annot_ID_150996 3000 nt of promoter + ATG
  misc_feature (4)..(5): n is a, c, g, or t
  misc_feature (26)..(27): n is a, c, g, or t
aatnnaagaccgttactttattcagnncttgtatgtttgcttgtgaaatatttcttcattctttcatgcttatcttctcaagatgatcctgggagcaaataaagtcttcttcttcttctaatgtaatctaaagtttgaatctttttgtttataaatccattttctcagcacaaaaaaaaagccaaagtcttctctcttttctctgtttgtcaatgttcttgttcagctgaagatg

SEQ ID NO: 493 - DNA, 2191 bp, Unknown
  misc_feature (1)..( 2191): cDNA_ID_3056425_gDNA_ID_1591443_Annot_ID_151000 3000 nt of promoter + ATG
  misc_feature (147)..(147): n is a, c, g, or t
  misc_feature (202)..(202): n is a, c, g, or t
atatgttctttagcattaaacctgttattcagctatgaaataaaacaattgttagttataatatctatattaaggtgaatatatatttttgtattaaattagataatgaactcttatcttcttcttttttaaaaaaaaatagtaatnttaaattagattaaaaaaaatagcgtttttacaacgagtgcaacgtataacagtngattgaaatcagaatgtagaatgaataagctttgtgattactttgaagccagcattggaagcaggcctcatatcgactgtccttctgtcgttgaacggtccttcttatcttcttttttgttgataacagtacttcagggaatgatttcccaaagcttgaatatattcattttctatgtacaatcatctaaagattagacaaattgttttgcaaaacaatcatctttgttctataaagaacaacctactacaattaaaattataagtttcttttctgtattaaaaatactggaaataaattagttttagaatcggaatggtcaatcggtttaaatatatccatggggttacgattcatatttaaaatgaaactatatttacaaacatcaacaaagaatcaaaatcacttacacatcaattgacccgaaagtatattcaacttggacctttagcggaagctattgacatgtagaaccgattataatcagatcatgttcttcaaactgaaggagaattttggtttccaatttggataggagagaattagtttccaattcatcagttagataactttttcgagtatttgttattaattaataaataaaatgatgcaaagaaatttaagaaataataatgttaatataaaacaaatctaattcaagaaaaccatataaaatacaaaataacattagaatacataatcacggaaactttacgactaattaacattagattgaaaattttaaactaactcagaatattttaaataaaaatattattaaaaataaaagaaaaaaagaaataagttttagttaccatgggacgagtttatatgtgagacagatttatatggtgagatgagtttggatgagagagattttttgttggtcttttaaaaaacaacactatagtatatcaaaataagagttaatcttctttcacacctctaaatgttaatcttctttaacacatctaaatatataattgtaataaaaaattattaaattacctatgttctaagggtaaaattaaaaaatatagaaattttaaattatataatttaaaatacaaaaatttgtgaataaaacatagggtatacgggtcatatactagaagataaaataatattagacttactaatatcataaacttatgacttaataaaaaccgtacacaactttatcaaaaattattaatcaacacaaacaacaatagacattgtacacaacaaattcttcattttgtaaaaatttaaaataaacaaaaacttaacccttggtgtaccacgggtcacattctagatacgtataaaattaggagatacacactttgtatatagatgcgtataatatatatgcttccggaactatacaaaaccatataaaaacatactaatataatcactaagtgtaaatagatataaacaatgagttttgataaattgaatatctaagatcattatttaaatatagatgatattgaattgaaacattaaattaattcaaaacgaaaataatcaagcagctgtgtaccgcaggtcaatatctagtttgttacattagcagtaaatagtcatactttatttcattatctataaaaattgtacccaaaaacaaatttagttagagaaagcgagataaatggtaattgttggtgtgcatatcaattgaagatttcataaattttgtgacccgatttcaattttaatccgattcgccaatggtattttggataaatactttgaatgaccaaggttttttgccaaatattccagaaaaaaaactaatatatatttgataggtcttatccatttccaaatcttgaaaattggacgcagatgggaaatataaaaagtcatttccaaagtcttgaaaattggaagcagataggaaaagtaaaaagttattttgaccgttttcaattgtcattatcttctctatataatccaccatcctttacaacctcaaatatacgttacattattgatatg

SEQ ID NO: 494 - DNA, 747 bp, Unknown
  misc_feature (1)..( 747): cDNA_ID_1694307_gDNA_ID_1591445_Annot_ID_151005 3000 nt of promoter + ATG
  misc_feature (563)..(563): n is a, c, g, or t
ggctaatcaaaagcgagatcaaacacactagaagagtaatttagtttggagggagtggatacgtcacctgatagagctcgggcttaagattcgctgataagagttgatgcagcgaatcatagccgcaaatcgatcttcggcacttgtttctccgttttctgatatcatatgatccattttttcacgagtctttttcgatcacgaaaccaagatggcgatgacttttatgacaacagtgatcgatcggtttggtcaattgattacgaattattttctgggaatcggaatctaatattttattttagttaggctgtccagacctaaagcccaccagattatattttaattcttaaaagaattattgggcttaacaacatcctaaaaagcatctatattggtggtctctcgttcaaatctctcatctacaaaaataaaatagtaaataatgttttttttaattaaaaaatctctcaataaagatgagtgagtctctcatttgagagattacaagaaacttttccaattgtttagagaaactgtcctaagagaataatattacatcntattttattaatattttttgtaagtgaaaaatttagaaaaaagtgttccggcccattgacgatccatcatgttttcgtccttttaatttttagatctgtatttactctttaccgataaaataataaataaattcaacggggagagaggaaaaacgaaagggaacaaaaagaaataggggatatg

SEQ ID NO: 495 - DNA, 1950 bp, Unknown
  misc_feature (1)..( 1950): cDNA_ID_1694325_gDNA_ID_1591458_Annot_ID_151013 3000 nt of promoter + ATG
tctctttttttttttgtttggttcacgtcctatggaaggcttcataacttgagccatcgcccagtcttcttcgactcccgcgaaatagaaaacaagagtatgcaatgaagaattgccttggaaaacaagagtatgcaatagagaaagtctcgaaagtgttggaaggttgaagataaagagaatacagagaggtaacggaaaaataacgactgctttttctccaaaatgacgacgttacaatcatctccattacgacgttttactcttttttcagtaactttttctgtagtttgtttggcatcacatagcaatgaacattttatgaaatctgtggtgtctgctttcttctcaaagcacaactatccaaaactccaaactgttggggccatatatattactaaccaagttgatagtaaaaaaaaatacaaatccaactcataatttagtcttgaagttataagaaagaaactcaacggaagtctgaatcatagtcattcaaaagacagcagaaaggggaaaaaacaaaatcatctaagacaagggtatataaaaccatgatagatcctgatttcataagatcttcaaaggtcttgcacactcaaacctgaaataaacaattggcaaatttaacttagatagagatagacgcatgcgttcatggaccaaccaaaaataacttgtgacctaaacatgccaattaaaagtgtgtgaattatagtagattaaccacaagactattcgaattcaaaaaccaaaatccaacaatattatgacactagaactttcaagtgatgaattactcaaagctaggaacatctatccaatctaacaaatgttatgagataagaggtttcaagtgtgtaatgtttgggctgagtcacagagagagagagagagagagatagtgaacctggaggaagagactgcttcaacttatcggccttctcttggtcgaagacacatagtgtgtagaggtaccttgagcacctgaccttgaacttcacaatgtccttgcttctcttgatcttcacagaccttgcatccttccttctcgccgtcaaaaggaagtccttgatctcatggatttgcttcggctgcagattatccaaaccaacatccattttcaatcaatacaaaacaaaacagaacacacaacaagacttcgaccaaaatgttactgcatgatgaacacttcatacatttcaagatgaaacttaaaccaatgggtcaattacgaggaagactcttatctactagattatcagtaaccaaacaagaaacccacaataagagattgattactttcagctcaatcatgcaaactttactaaaatcctagtcgtgagaacagataatcaaacaaataatatttagcttcaataatcctcctgagaataataaaactgagaggcgaagaaaactttaccattgtcggatctgatttagtggctgcaactttcttccactcaagagaacaaacagcaaaagcaagaacccagcgtctgaaagaaatagagaaacctaaatatgaagaaaaccctagactctcatatacgcgaatttccaaatgtaccccttaggcccattaatccgaaaagttggccattgggtttagtggcccaagttgttttgtttggcaaatttcaaaaaactcggatccaataagaaaagggtatttaagtcattgcgtctatttgcctatgatttcaacattagcgccacaaaaagttttttcccgctccactaaaaaaacacttcttcctctctccaaaagcacacaaaaccctaccgcttcgtctctctctctttcgctctgcagtttcctattcaaaattgattggtttctctaaataatgtaacaccttcgawtcgataatccttctctctcaaatcaacttagtatctccatctctgcttctttagggctccttgttcgaaggaattaaaatg

SEQ ID NO: 496 - DNA, 3000 bp, Unknown
  misc_feature (1)..( 3000): cDNA_ID_1694329_gDNA_ID_1591458_Annot_ID_151014 3000 nt of promoter + ATG
  misc_feature (605)..(606): n is a, c, g, or t
atagtccttttcaaagacattgcgtaaatcatctgagaagcctgcaggttgacacatacaggcaataatctttcttcaaaaacaaagggaaaaagaaggcaaaactgtcgaaaataaaataataatcaaagaaagttaccagtaaacaagggctcattgaaattttgatccttccttgactggttattcattctccaaaactttaatttggatgaaggcatcttctttctcttacgtagagtatcactaggatccttaagcctttcacttatgttcctgttcaaactatttgatcagtacggaacagctaatgaaataatcaaagccacatgaagcaacggaaaagttattacttgttggttaatactgtgacaccatcaaagttcttcctcttccttgcccttctttgtggttggggaggagatggctgaagcaccagttgaggtgatggatgcacttaacataaagaaaaaagtgttttaaatagataataagagagagaatgtagtggttaagcttcaaattatcagactatgttgctagctcaccaaaatctgcacgttcttcctcagaaccagcagaagaacctggagatcctgagcgannaaacgcagaatgccttccagaatttaacatttcttcatcaatactagggatagtgggttcttctcattcaaagtttcatccaatgactcagtgcgttcaactctgacatcctgttgttgtgcagcaaatgatggatgggacgtggggcttagatcatgtgcagcgtcacgcattctctcaatctcgggaacagttccaggagaagtggcatcgtttctctcggaattgggaatgcgctcttctgtcaagttactttgtctaggatcctggacttcagtgaattcctctgtgacgttacgaggactataggttccagtatcgaaagcaatattggagtctcttggctcattgtctggtcctgtctcatgagccgtttcaacatcaatttctccggtatgcctacgcacaggttctgttgattggctgctcaaagcataaaaatatgtaacaacattattaaagaagatcaactaaacagataaggaagattaagagcaaggtgtagtaaaggaaatcaaaactctatgaagagcctcactcgacatccatcgggatagattctgagatgatgtcctgtaagaaaggcatacaaactttcattcaataacaagtgctcggagacatgggaaacaagaagtcagaatcaacttcaatgtcataagaagcaagcagtaatctcacctcgtcgaatgttacagcaacataaggatcaatgccagtaggaatttgatctgaaaaataagcatcaacatcataaacacctcaaaatcatggtatgctgcatctagaaccaaggaaaaaaaacacagacaaaaggtacctgtgagagtgatatcttcctcactccgagtatgattatcgaattccctagaattcacaagaaaagaatgttaaagatgagtcaggctttagaacagataaaaactcaaataaaagcaagaaagaagaatacatgtcgagagtgtcatcttccaagtcgaactcgtccagatttagtgcttgaggcaaagtaacagactcaggcggggcctgtctggcatcctcaggcaagttaacttgagtagaaacgaaagccttagctacccaagtattaaggagattccagtcattgtaaagataatccactttctttgaatatattcgcactaccccaactagaaggtgacttgacgttctcaatgccaatggtacttcaggaaacattatattatctgcaaagccaattgcaaaattctcgaaaagtcagaaactttattaaagcagagaatttcaattactacaatgggttatatataaacaacaaaatcggaatttgatgaatgcccatgtaaaaattcgtattgcctttttgaaatttcgaattggatacaatcaaaggggattcaaaaaaaaaagaagcgaactttggatcaaaaagcgaaaattgaagagaggaaagacgaaccaacagtgtcggggatgttgatggaggtgtactgagacttcttgaggcgttggtgcacatgagcggcgcaccacaccgtccccaatggaccctttcgagccaaaagcgtatgtgaataaaacattttaattccttcgaacaaggagccctaaagaagcagagatggagatactaagttgatttgagagagaaggattatcgawtcgaaggtgttacattatttagagaaaccaatcaattttgaataggaaactgcagagcgaaagagagagagacgaagcggtagggttttgtgtgcttttggagagaggaagaagtgtttttttagtggagcgggaaaaaactttttgtggcgctaatgttgaaatcataggcaaatagacgcaatgacttaaatacccttttcttattggatccgagttttttgaaatttgccaaacaaaacaacttgggccactaaacccaatggccaacttttcggattaatgggcctaaggggtacatttggaaattcgcgtatatgagagtctagggttttcttcatatttaggtttctctatttctttcagacgctgggttcttgcttttgctgtttgttctcttgagtggaagaaagttgcagccactaaatcagatccgacaatggtaaagttttcttcgcctctcagttttattattctcaggaggattattgaagctaaatattatttgtttgattatctgttctcacgactaggattttagtaaagtttgcatgattgagctgaaagtaatcaatctcttattgtgggtttcttgtttggttactgataatctagtagataagagtcttcctcgtaattgacccattggtttaagtttcatcttgaaatgtatgaagtgttcatcatgcagtaacattttggtcgaagtcttgttgtgtgttctgttttgttttgtattgattgaaa

SEQ ID NO: 497 - DNA, 1157 bp, Unknown
  misc_feature (1)..( 1157): cDNA_ID_1028034_gDNA_ID_1591466_Annot_ID_151028 3000 nt of promoter + ATG
tataaaaaatattaaatgcatttgaackccatacaaattctcctaaattataatattgctaaacatatggataaagtaaatggtatcttatgtgtaaaatataatccatttaatttagttaaaattgttaaaattcaaacaacattctcttatagttatatcatattctatggtcatccattcatttaaccaatataaattatctttcaaaataaataaaactaaaatagatacatttttggtaaaatgcttatagatatatatattcctctatctatttctttatatatatcatttatttatttatttatacaaaaatatgcttataaaaaatgtgtatatatataaatatttcattaagaagttattatactattgatctgcttttctttgtatttttaatcaaattactattgatctgctatggtaccaattcgattcggagatccagtgatatggaaaaaaccttcggtttgatgtttgcattgtggtgaaatacatattataaaatcatackcaatcactaattcactatataatggtgaatgcaaggttccccctaaatactagctgcaatacgttaaatttaatagaataacaacaaatgcaaagccaagaacacttgtttaataataagatgctcattcttgccagtgtcttctatcaaagaaaaactcacaaaacatggtgtgtatgtggtttgtttttaagttttaaccaagacaaagatcgttggtcttacggtagacacatgaatacatatgagtgggatttggtacaagaacacttgtttaaaaataaacaagtttaagcatgttattattaaacaagtttaagcatgttattattaaacaagtttcctagatttggtttgttttagcgaagacaaagatcgttggttcttcttaggtgtattataaaaatgttgtaatacgtatttgttcctcagaatctttagtttgttatgaaagtgagtgaaaacgcaaacgtgggtttgtggggagcgtttgcgttctaaagtttcaagaatcgacgcaaaacgtgagatgtgtttttggtaagcgtcgtgtctctctctcttatcctctgttcacgccattcacaagcctgtgtgaccacaaaatacgacagaattagagagaaaagatagagagatg

SEQ ID NO: 498 - DNA, 74 bp, Unknown
  misc_feature (1)..( 74): cDNA_ID_1694368_gDNA_ID_1591467_Annot_ID_151033 3000 nt of promoter + ATG
cckacgttatgchctagaaagagattgyctcacttaaatgatcaatccattttcccgacgatttgacagtaatg

SEQ ID NO: 499 - DNA, 849 bp, Unknown
  misc_feature (1)..( 849): cDNA_ID_1028984_gDNA_ID_1591471_Annot_ID_151034 3000 nt of promoter + ATG
ggaaacaaaaaaaaaactaagcagcaaaacacattccacatcaattaatcccttgtgccattcgaatccagaatcgctatacctacaaagacatcaattccagatctctaacctaaccagaataggtgagctgaattacccaatcgaaactcctcactctttacgaattcgaaatcggagtgaaaaatagagttacgcagaatcttacgttgttctcggaagtaatttttgccttgaaggcgacaaccgaggcgatcaagagcttgaccagtctcacggatccaaaaaccgackgagtaaaatgctctgcctagggttcccattgatcgtcactttcttcgagctcacaggtaaacgaggactcaacactgaatgaagaagacgaaaatggtcgaagctgaagaagagacggaagaaaaaaaatcagcgaaaatggatttcaacaggaacattccgggacggcgaaacaataaattacagttacagtggtttaatatggtttaatcgaaccaaaacaatacgaaatatgaaccaaatctaattcgatatttcaggtagtagtttcattaaaccgattatattattcggtacgaatttattactatattttcactaaattgaacggtccaaaacctgccgaccaaaaatcaaatggccctatcagtaacaatgtcgtttcgtatcgtcgtcacttgcaacgcataacacgtgagaaaagataaacatcgggtaaaaatggcccactggtgggtggagaatggtaataattcagtttaaaagctaagccttctcactgattaactcaatcattcatccgtctctgcaaacaaaggaagaagaatcaagatg

SEQ ID NO: 500 - DNA, 1558 bp, Unknown
  misc_feature (1)..( 1558): cDNA_ID_1694410_gDNA_ID_1591485_Annot_ID_151046 3000 nt of
  misc_feature (1261)..(1261): n is a, c, g, or t
  misc_feature (1284)..(1284): n is a, c, g, or t
cgtttgaggattggaaaaagcaaccaagtgcaattaattagggctcccgttaagtagttaactaatcggtaacttttcttttgtttcgaaattttaatgaccatcttttactggatctgaaagacacatgcatatatccaaatcgttaaactttaacatgctaactgtcttgggttagtgatagggtgaatttttgtatataacagtggatgttacagttttctaaagaaaatttaaatactaatttggcatttcacgcttcattattagtgtggctggtgacaaatctgattaattcatagtaaaatgaaaataataaaatcatataacaagaaattattggaaatgacaacctaaaagacaaatcattttcgttaattattagcctaaatacaatcattttccattaagtataaagattaagagaaactaatggccacgttgcaggttttgtccatgacacactacttagttagggagttctatattaatttgtttcagtagagaattgtcgtatgtcggcaaaagaaagaataattggctatgatccactcgaattttgcgctttcaatgtacggtaaactctctcttgactccaaaaaccttttgagtaaagtagagaaactgtgtccggatattttgatttgagcaattgtcatcctaaaccctaaaatgtgatagccaattagattctccactctttctgataaaagaattcaaccattcgttttcttttctccgcattttgatagatctctcgaaatttcaaaaccagaattaatacattccttatatcattgaccatatgatataacaatacataataaatcaacggtgataaaacttgatttaattaatttgactaagacttatagcctaacggcctaatggttcttatttgtataacgcattgtcataacttttgtacgataaaaaaagtttaatttcatatatatatatatgaataaaatacactcttttttggtaatgtatatgctaattttttttaaaaatgtatatactattttcttggataagatagacctagcaagcattgacttatattttatttctttgagtatgtctacacaaacgttcggatgttgtcaattactagtggatgtatcgcctgtaccacggcatttccacttggctaaaagatgaatctatgaacgattctgttgtttttgtcaaccaagtggatagtgaaaagtgaaaacgatcctatcatcagtatatttgtcaaatggggttatgtggntagttcgaatttgtgagcttccntaaaaagtatcacattcttactgggcttggaggttcaaattgggcctaagtgatttcataggagcccatatataagctatgaatttctctacttaacaaatttcaaataacagagaaaaataaaataaaaaattggaacgagactgttgttgttgtggtctcaatcctatccacagatggttaatgttttttctttatctgctctgtttttcaatggcttctatagttcctcttctccgtactctcttaactttcaaaacctcacgaaatcatg

SEQ ID NO: 501 - DNA, 111 bp, Unknown
  misc_feature (1)..( 111): cDNA_ID_1694413_gDNA_ID_1591490_Annot_ID_151051 3000 nt of promoter + ATG
  misc_feature (8)..(8): n is a, c, g, or t
caaccacnacatgccatattgccatgtggcttcaacccccacatataagtccacgacattgcaggacataacgatcataaaatttggaggaaatacaaatatagaagaatg

SEQ ID NO: 502 - DNA, 2832 bp, Unknown
  misc_feature (1)..( 2832): cDNA_ID_1694416_gDNA_ID_1591490_Annot_ID_151052 3000 nt of promoter + ATG
  misc_feature (8)..(8): n is a, c, g, or t
  misc_feature (353)..(354): n is a, c, g, or t
  misc_feature (1176)..(1176): n is a, c, g, or t
  misc_feature (1192)..(1192): n is a, c, g, or t
caaccacnacatgccatattgccatgtggcttcaacccccacatataagtccacgacattgcaggacataacgatcataaaatttggaggaaatacaaatatagaagaatggaagaattggacatagtaatcgtgggaggaggcattgctggtcttgcaacttcccttgctcttcacaggttcactataatctcctcattttctcaattataaggtaatttaaattagaaaacatatacatgaactattgactaactaaacatacaaatatgattataaaggaagggcataaagagcgttgtgttggagagatcagagtctgtaagatcggaaggagcagcatttggtattcnnactaacggctggcttgctcttcaacaacttggtgtcgccgataagcttcgtcttaagtctctcccaattcatcagtaagtatataaatatttatattttaactaaccttatctagttataatgatttccggtatggtactaaaacaggataagagatgttttgatcgagaaaggtattaaacgaagagaatcggttggaccagcatcctatggagaagtaagaggtgtactaaggaacgacttggttcgagctttggctcatgctcttcctcttggcactctccggcttggttgccatattttgtcggttaagctcgacgaaacaaaatcgtttccgattgtgcacgttaaaaacggagaagctatcaaagcaaaggcacgtttaacaacagtagatatatttattgatcaattattgagtagtgccgtagtggaattttttagtatatactttatattagccgacagtgacatttatgggtcgtgatcggttttaatggtttgtgtttgtttgtttttcactgaaagcaacatgtttagcatgaaatgcatggtcttatatattttgataatatacttttcttttaatttaggttttgattggctgcgatgggtcaaattctgtagtctctagatttctaggattaaacccgactaaagacctcggttcgcgggccatcagagggttcacaaattacccggacgaccatggattccgacaagagtttataagaatcaagatggacaacgtcgtaagcggacgacttcctataactcacaaactcgtcttttggtttgttgttttgctaaattgtccccaangtaattaataacccgncatgctacatttcatactatacatagacttctattgttttcatataacgcactaacgtatttataatttgttttataaatagactcaaacttcttaaaaaatcaagaggatatcgcaagattggcactagcatcagtccgcgaattctcagaagagtggaaagagatggtgaagaattgtgatatggactctttgtatatcaaccgtttaaggtaccgtgctccttgggatgttctgtctggaaaattccgacgtggcaccgtgacagttgccggagacagtatgcacctaatgggtccattcttaggacaaggatgttcggctgcgcttgaggacggtgttgttttggctagatgcttgtggaggaagttaaatttaggtcaagacggtataattaatgtatcttccttctcttcaaggatgcaaatagaagaagcgattgatgagtacattagggaaagaagaggtagactcgtggggctttcgacacaaacttatcttaccggtagtttaatagcagcttcttcgccggttaggaagctattgcttgtagttatgttgatgattctgtttcgtgatcaaattggtcatactcgatatgattgtggcagtctataaatttatcttatgtacgaactgtctaaattgcgagagttgtgtgcttcgtgagatgattgtatcatgaggttggttactcattgttcttgcgaatgtttcctgtttgttcgcttctgataatttttgttcgattattaaaagaactatgatattagtctttctcacttgtgagttgtgaaagacaaaagaagtccaatcaaaaacttatttaagaaaattatgggcggtatcatctgcaaaaaaatattctcaaaaacattttaatccaattaataattctggattcaagttttttggaccaaaaataatcaataattattcaaatacatttttcgtatattttgatgaaggaagagaagtccatatcatttgttttacaaaaaccccaccctagttgataaaagacttaaagtctgcattataacataaacagaaccaagaaaatgtagagagaaatgtcaaattatccagtagcccactcaaaatgtagaagctgaatcaatggaggtgatagaaaacttatctagagaaaaccagaattgcaaaggctcaattcgaagatgttttttttgatgatcccatctttattcttatatatatcaaaagtttaatagtatagaagatcgattttttttttgtcagtttagatttttgatatactaggaaaagccaaaaagataagtattgagtcacactcactataacaagtacacaaattgatattggatggaactagttgttttatccaaaagccgagttaatgtaagtggcgtcatggcttgcgtcaacggtcaagttacttcataaacaaagagcgcttgtttgactcgcaaagacccaccacactcacgtaaattgattgtctcccaagtaatttaattgtcttaatgaaaagtcttcgctgttcctctactctatataaataaattaaaaacactatactacatgttacctatagactacagatattaaaacaactacccaaacaaaactttagatctgaaaatctcagctttgaaatg

SEQ ID NO: 503 - DNA, 1266 bp, Unknown
  misc_feature (1)..( 1266): cDNA_ID_1694432_gDNA_ID_1591493_Annot_ID_151062 3000 nt of promoter + ATG
ggaaaaaaaaaaagtgaagacggaaagagaaatctaaattagggttttgaccaaagggtttaaattgataaagtgataaaaaaaagattgagactttcgacacctgatcgaagacggacacgggttcttcaaaaaaatataaaacccagatccgatcgaactttggctgagaaaatttgtttgtggaaaattcgaagagaaaactagcgagcaaatccgtccactgtcccttttttattattttcaaagcaatgtccacgatttcttaactcgatagataagacgttgtactttaatactttaagcactttccaatttaatgttaaacttcctaataattattgtgaatgaatttttcttaaataaatgagattatcttccaaattaataaaatatctgtttcgaataaatataaatttatggaccaaaaaagtcgatttaacactattattattgggtttactgcttgatttatgttaaaacgcttttattggtaagtcatccaataatatattcccacgtaagcatcagatctcggcggcgcgaaactacgcggcgttcgcttagcacaaaaacgtagcgcagtttatttaaagcaaaacaaaaaattctgttttcacacttttgcattgcagcatcttgtagctaacaacatcatcggagagaaagcagcttccccttcccggagatatcgtacataagctaaagcaaccttaaccttccttctccactgtaaaaccctcaaattaaggtcacgatttcgtcttatttttccaggtttgattcacaaagaacttcgtgttttaacgatgctattcttggggtaggatttagggttttgtttctatagttcatcgatcctgttcagtcttaagctaaatcatatgatttgcatcggttgaaaaacgcgatagttatcgggagtagggtttgttgtggtattcgagaagtttcaggaaagtgagagttttctattaatggcttttttttgtatcccgaattctttggggttaattggtgaaaagaatgttctttgtacgaaattatatccaattttccagctttacatgtttttggagatttctggaataagtctgagatacttaagaacgcatctggagattgaaattgtggcatccaatgtagtttcaatcgattttgtctataaattttgtattcttattagattgagtttcgtcttggattgagcgaatttgtttcattgatgattttagggatagattgatcatggcaactgcaactatg

SEQ ID NO: 504 - DNA, 399 bp, Unknown
  misc_feature (1)..( 399): cDNA_ID_2186680_gDNA_ID_1591495_Annot_ID_151066 3000 nt of promoter + ATG
ttggccatcaaatggccgctccatgtgatagctcgattgacctcttggcatgaatttatctttgctggtttcctttttttttttactctttttatcccatcttagttccctccatggacaagatccaacaaatttcaacacctaaaaatgactacaatatgaatatgcaatgcatgtttaatgacgataaaagacaaaatataactaaaatgcaatgaaaccaagaaaatggtgaaaatctaagagttaaactaggtaaaatacaaacacatcaatttcccatacttgcctttttatttgtaatcaaacaaacaatgcaacaaatttttttatgaaaaaggtttaaaagtggagagttataaccaaaatgcgtagcttaccatttctaagctcgagatg

SEQ ID NO: 505 - DNA, 767 bp, Unknown
  misc_feature (1)..( 767): cDNA_ID_1399782_gDNA_ID_1591502_Annot_ID_151078 3000 nt of promoter + ATG
ttagcttggcctgcgttgaagctcatgctctgactgttgttagacattttctaatcttctcttcgaaaaaaacttgatttgattttagagaactgtttagcttttgtaattgtgagttgtgtgatgaaagagcattacgggtagatgtttatatacttgtggggaaccttgtagttacgtccacgtggaattttgtgattgggtgtcagtttagtatttgaaacgtgacgttgttagattagtactctccggttgaatagggaggttttgaccacgagacaagcaaattccgttgtagactagttccaaatgtgctaatattagcatcttcacttcttgtaattctttttgcttttaggaaatgattttctttgaatcgacatctactatattatgtaagaatacttagttttgatgttttctaacgattagggtgcggtcgattttgttcacctagtctctacaattgatgttttgctaatatgtttacctaaatataactttaatgaaactggctaattgaacgaacatgttcttgcatggccaccataacaaataaaaaaaacagtagacatagagtgttgaagagaaaacaaagacctaatgttggatgtatatcaaatattgggtcacgggtcagctaatcaaatgtatataacactatattgagatatgacactataaaatggcgcaaagtgtgaaagttgaaacatatcctcatatttagcatcactcctctaatattattttttcaaacaagaacaatg

SEQ ID NO: 506 - DNA, 25 bp, Unknown
  misc_feature (1)..( 25): cDNA_ID_1694566_gDNA_ID_1591526_Annot_ID_151114 3000 nt of promoter + ATG
cagcaacagccaacagaagaaaatg

SEQ ID NO: 507 - DNA, 729 bp, Unknown
  misc_feature (1)..( 729): cDNA_ID_1694584_gDNA_ID_1591530_Annot_ID_151120 3000 nt of promoter + ATG
wgcattatggtatttttcaactaatatacacccaaaacagtatccttattaaacagctctctctctcgttttgttcaaactaacaagagaaaaatgtcagcttttgttggaaaatagataaaaattatgacataaaacccaaaaccaaaacgtcaacaccatttatcataaattacatttgtagttagctaaagtacaaaaacaacactgtaaatgatccattgaccaatcgagtagtcattaacgaaagatcacaacttaacatcacccagtctaatcaaaactccaagaccataagaattttgctaaagcagcagtatagtgataaacacacaaaacgggaaaagttgttttacaatttagaatgtcatatacttaaattattatttgcatagggaaaaatagaaagagactcactccccaagtgagggcaaatagaagcccctgctccctgaatttcacagcctttatcatcaatgctcctctaacctcaaacactcaaaatccacacatctatacccatacctctacatacacactccattttctctctctatctctattatatcttcgattcatgtgccattttggtatataaatatataatcttgcacacaataaggttatacttcccatcaccttttgtatcattgctatctttgttcttccttctggtgtctcttcagtgtaacaaaaagtctctttttcagttatattaagtaaaagatg

SEQ ID NO: 508 - DNA, 1108 bp, Unknown
  misc_feature (1)..( 1108): cDNA_ID_3056536_gDNA_ID_1591531_Annot_ID_151121 3000 nt of promoter + ATG
gatggtcgcgaatggcgagattaatccctctcttgacgtggatcgtgagcaatccaagaggcttttgatccatttgagaagaaagactttttgactaggtccggtgctggagatggtaaaggaggaagaagaaaattgtaagaagaatttggagatgatgctgaagatgaattggtgcttgtaatctcgtccccaactattcaacacgttctcgttcccaattgctcttaatttttcttttataaaaaagtttagcgaattatagtatcattttttcaaatgattgggtaacttgttgttcttaaaatttatttattcacactaatcaaaaatgattaggagtttaggacacgagactaatctaataatcgactcgagagataaaacaatagtcatggactgaacaaaagaaatatctcgtcacaatgggctcgacgactccctttatagataggagactaatctaatatgggtctacttttgaacgtcaatgaagtattactaccaacttgtaataaaatcacaataatgggcttgagtacttgattaacaggcccatttaaaagattttacgtttaagaatctttcaaatttaacaaacaaagagattattgcatggagagacggttttggtgcttgtaatgggtttgtctttccttgcggaagaagaatcgggtcaaccattctcatccttcctctacatcaaaaccctaatttctatattacatctctaacctcattcatatttgatatataacaccattcatttccttgatctctcactcatcaccctcacccaccaccaccatcaaaccctagttttgtttttcccccaatttcgtttccttgatcgtggatcattcttgttcagatctctgttagcgtctttgaatggtagaaacaactccgatcaccagagaatatttgctttcccattgcacaaccgcaagggcgagctttttccttcgtcgtctctccgccgcatcttctttcaaatttggcttctccaaagaaggctggtactaccgttgcatcggcgtcgacccttgaactcctcaacacggtttgtttttttaataaacctttctgattttgaaatttgataatg

SEQ ID NO: 509 - DNA, 1739 bp, Unknown
  misc_feature (1)..( 1739): cDNA_ID_2730950_gDNA_ID_1591533_Annot_ID_151125 3000 nt of promoter + ATG
tacaaaagaataggataacakaactatatatatatatatatataacgtagtgtcaaataaattaattagtgtgttattttcaaatatacccataaaatccttttattttctaaagaaaacacaaaataaataatcgaatttaagtatgatttttatccattatttttgccaaatagagggttctttactgcatatattccttaaataaaggaaagaggtgactattatcctaatttcttaagtaagaatgcgattgtgaaggttttgatatatcckactttacaaaaaaagaaaaaaaaagcattgcatgtgatgagaatccatctcccccatcctcccacccattctttccaactcaaccatctcctttctcttcctattaataaagtatcatcttctttttgtttctctttttattttttaatgaaaaataaaacttttaaaaaaatttgtatttacttcaattttcttacagttccacttggatagacaaatgccctttaatgagatggtggtggactttaagtatatgttatacgcacaacacacacacacacacttttatagacatgttttttaataaagaaaattctttcgaacatattccagatctctaatttttcttttgtttgagatgttatatagaattggtctcagctgacactcaaaaaccagatctgactctagggttttgtgtttgttttttgtttttcttgtaagaaaaactatatattggaaattttctgattcgtctcacttgtgggcacagtattcttatttgattaaaacctatttcttatataaaaaggcatgagatgatggcaccacattgtatatttgtatatatacggaaacataaattgggtatatgcatgtgtcttatattcaaaacaaatattctcaagtcccttccctttttaatttacaccagccctatagctaaaggctacacatatatacatttgtcaccattaaaaaacatgtactgttaaacatcaaatttccaagattccgtttatatttttcacctatccttttttttatttatctttgaaaaacaaaacttactcactctgatcgaatattttatgatatgaaataataatgacttgtaattgttgtgtagtgaaaggggatgtttttttgtttcttgtcctgatgctaatgtgggctccaagctccttgtcccactctctttatatgtataaacatctctctccatagatatgttttgtgtttgtaaacaaacagtgtacagatagagaagagagaggttcataactactctgaagaagattgaagcaccaaagaccatacaatgcatttctccatctaaggtgagaggtcaatgaaacaattaacaaaaagttgaaagtttcatttatttttttcttttccaagaaaattataaaaagttggatagtaaaagggaatagaaaagctattatccctttatgtgagaaaaaaaataaagatgatttcagaaaaacaaagccctttgtttctctctcttaactcatcttatactttcttcttctattagtaaagatgagtactctctctaccaaataaataaggaaacataaaaaacaatctctccttctttctctacatgaaaaacaaaagattcctcaattttgttcttatttttcatttagtcacagtacctctctcactataaaccacactgtcttgagataaaatacaaaaagagaagagattaaaaacctcatccgatg

SEQ ID NO: 510 - DNA, 1006 bp, Unknown
  misc_feature (1)..( 1006): cDNA_ID_1023870_gDNA_ID_1591537_Annot_ID_151132 3000 nt of promoter + ATG
tactaatataatacttttctattttagactatatgttatttaactacttaagttttgaaaagaaacaaataaaatttccaccttactctcattaatatattccatcatttcttatattggttaaatatattagagtaatagatatataaaacgagatatttttgcactaaaataaatataacgatattctgaaacaaaattaaagatataaaacaaaatttaatatgaagcggatggaattaatcatgtttttttcacctttttcacaatattcatgtatgggtttgattatggagttatggcctataaatataaggttataattatgtcaaaagaaattgtaagaccttaaagttaagtaaattgaaaaatccaaaataggattatccatccatcatccttacttacacatcattaaaatccacaaccccatcattgcccatcactaatcaataaaggtcattactaaacccaaaaacagattatcgaaacatacgtgggtccccacttccccaagtccttttccattttcataaagtatgtttctttcccattatcacacatagccttacgtgtttcacttaaccaccgtcgattcagatcttaaataatcaaacagtaagcataagagcagcgtaggtacactcgcgtcgcagaagatcaaagtcaacgataggtcagagtaaggaaacctcgccatgaagtgaaagttaataaacaccgtagctcccgaggtacaagaaacaggaaaaaaaaatatttatgtctgaaaacttgaataaaataataatatttttatatttaaaaatgttgggaatattattaatttattaacaagaacacagtaacgcaatcacagactccacagtccaaggagttttgcatactcaccaagccacaatcatttctctcttctctatctctctggttttgaatcggcgacgactgagtcaactcggtgttgttactggtttcgtcgtatgtgttgtaactgattaagttgatg

SEQ ID NO: 511 - DNA, 997 bp, Unknown
  misc_feature (1)..( 997): cDNA_ID_3087914_gDNA_ID_1591538_Annot_ID_151136 3000 nt of promoter + ATG
caaaatagattcaacgtaggttagttccaaataccattgcaaagtaaaactatgtttgtttcaaccattttttgtaatgttagtacaactggaaayactaagttggtattatggagttcgaatttgttttttctcaaaactcaatgaaaattaaagacattgaagaagtactagtaatcatataaaattaattaagttagaaattttaaaattaaatcgatttcacttgtttttagtagactcagtaccacatatcccttatgattttaagcccactttcaatataatcaccaacttagaatgaaaatctcctaattttatatatttttaatttttgaatggacaaaacatttgaaggtctgtaaatataaagttcagttcagtgtactaccaaataaacaatttgtaaatatagaaaatactactaaacatgaaatacmcggaaagtaatactatttttttcacaaaaagtaatactatttgatagattggtactaccaaaacattgtgaaatactatgttgtaaaaacctgcgcccatgtaaaaaataaacggcgcacacgtggtgaataaaatatttggtttccccccaaatgtattggcgcccgacaaaatttgagttttcccccaaaaccaaatattccaatttttagagcactttcttccccctaaacattttcgatctctctctcatctctcatcttcttatttcatctttcatctttccccttttcattattatctctcttctcccatctcccatctctcatctctcatctctcatctctcatctctcatctctcatctctcatctctaatctctcatatttctttcatctttctttgataatggatagagagtgtgagagacacccgatctacaatcatttgaaagaggcgaagaggatgatagagcaaatggaaatggtcgggatgatgcaagggattcctaagatatgtccttgtggtgatagcatcgtcgacaatcgttatgatg

SEQ ID NO: 512 - DNA, 948 bp, Unknown
  misc_feature (1)..( 948): cDNA_ID_1694638_gDNA_ID_1591549_Annot_ID_151148 3000 nt of promoter + ATG
tgatccaggcattgcaattctttatgtttgaaatccaaagcaggtgggtcgcttcacttttatcgggtcgggttaaacttccctcggaggagcaaatgatggaagatgttatagctttctatgcaaagcttaaatctttgggtattcccaagagatttactcattttctaastgatccgcaatggactccaatgttcgaaaagcttaagccacatgaagcagttttgatctcacaaagtgagtatttcaactggattgcggaacaatgtggttgctcgtccatcgaacgttggagagaggaacagtataacatagccatcaaaaaagatgatgacaattttcgtgatgaatgggatgatgatgatcaaattatacaagaagcgtaccgagattttgctaaattcaaaccgagcaaagtttggtctacataaaccaatctttccaaagaaagtgcacttcgaagatccaagagttgatattcccatgttgaaatgaataaaggttgaaaaaacttttttgcagtccaaaaaataaaatgaaaatgtcttcggttggttccaattccaatctaagggtgattggcaaagtttgacttatgtaatatcctttatgtatttggagaatatattagcactactttatttaaaataaatattctttatcaaaaaagaatatatgaacactcaaataagatctcgatttagtcaattacagcataattgttgcaacacgttaatgtttcattttctgttcttttttgttctctttgttgcgtatctccatgtcactaaattgctaacactcgtttttagttgggttttaatttcatttcttaattaagactaaaaaattgattttttttagaccgaaccggttaatccgaaccgaagacgttcctatataaacccaattttgagaacagagcatcatcatcacacaaaaaagatg

SEQ ID NO: 513 - DNA, 855 bp, Unknown
  misc_feature (1)..( 855): cDNA_ID_2990159_gDNA_ID_1591559_Annot_ID_151167 3000 nt of promoter + ATG
  misc_feature (279)..(279): n is a, c, g, or t
  misc_feature (507)..(507): n is a, c, g, or t
gagatccactcaatgtagcagctatgttctccagattcattcgtatttgtaaaaaaatgaaaactagaggtggcttgattgttggaactcgacgagtattgttccaggaagcagccgtcttacttcttttcaataacatatgttaaataaatcgacattgtttgttcaatcatagagagaacttattattattattattttttttttattgtagtagtaatcatgttcattcaaattgagcaattatttgctttctatctacgcccaaaaaccaacttntcaaatgcatcgacatgtaagaaaaattgcttttatgttttaaagttgtgtaacatttctcttggaactattgattgtctcaacgttgcaaataaagtaataaaatcctacaagatactaataatatccaaactgggcttataatcctaaaaatgacttccataattaaaacgaatttagtttattaattagtgtaatggaatattttgtcaataaaataaataatcncgaaggattatataaaggaagaaaaaaaaaggaaggtgggaattttaaaagggaaagacacctgtctctctgacccacccacccattcatttctgtggctactctatcgtcgtcgtctccacaccgtcggtgccctcacggatcaatttctagagagagagagagcgagagagacgattcgtttttctagattctcgtcaaattttttttccctccttcgatctctcctttttccttattcagcatttccccattttttcacgcaagatccgtgattttccagggattgatctgattgggggatcgtgaaattcgtttgtgttttctgctcgattaaccggagaaatg

SEQ ID NO: 514 - DNA, 1041 bp, Unknown
  misc_feature (1)..( 1041): cDNA_ID_3056611_gDNA_ID_1591574_Annot_ID_151193 3000 nt of promoter + ATG
ttcaaggtttttttttacgaattatagtaaaccaactattatttagttttaaacttcagttagtgtatgtgttggttaaatcatcaaactcaaaatatacgataagtagttggttaaattattcttgaaaaagaatattaataacccaatttttatactctcttacaataatttaattgaattgtaagctgacacatcatttagatttccagccacaaaacctcacttactaaatttggcatatgaattacaccaaaccttctcaattaattgcccaaaagcaaacgctattacaactttcatttcattttctctatctatactacttatattttctttgtataaaatgtaaactcgttaacacacacaaacaaaaaaagataacgttgaaaaaaataaaacacatatttcagactgtagtttagatgtggtaaaatatagcaagaatataaaaatatcaatataagtttcaaaatttagagaagaaagaacttcattgattgkgagttctaaataaataatggttagtatatattagtgatagagggttaggaagaagtcgttatatacataaactcagtgtaatgtttctgtcaagctttgctttgatttaagattgtactttcttccttcccactgtttacaattcgtgtggtcgtgaactaatcacgccaagttctctcgtttaattattaatttgatgtttagtttttcttggcaactttagagttatatatatgattaagttttgtaatcaaatacttcatattttcattgattttgcatattaatgcatatgttttcataaaaaaagaaaaacgagtgtaaagttattgatagtttctgttacttattaatttttaaggttatgtgtattattaccaattggaggactatatagtcgcaagtctcaaccctataaaagaaaacattcgtcgatcatcttcccgcctcgagtatctctctctctctctctcttctctgttttctttattgattgcatagacaaaaatacacacatacacaacagaaagaaagatg

SEQ ID NO: 515 - DNA, 538 bp, Unknown
  misc_feature (1)..( 538): cDNA_ID_3056625_gDNA_ID_1591576_Annot_ID_151198 3000 nt of promoter + ATG
  misc_feature (393)..(393): n is a, c, g, or t
caccctagtcaggtcattgcctaaagtacctcccatctttattgtcatttccgaaaacactttctagtcaatttgttaccactcaaggcacttctcatctcgtatttcactagttaaagcatttccaatgtaagtcgatgctcaaggcgtctctctatcaggccgacaacatccaagccgcctcctactaggaatcatggcaagctatctccatcatatgttgccaacaaaagtacactccacactccacactccaaaagtgttggtcttctactcttctttgctccttcgagaaatcaaataagttaatttcttcattatttcatggttgccgacatgactttccaaatacgagtattaaccgcaataaataaatagttcttataaaaagtnagatgacgtgtcatgtattgctcatcaataaagtaacgctttttcattttatttccattgaccgacacaacaaacaacacgttctctctcatttttcttcttctccgatcaatctagggtttactctcaccggcgacgaacaatg

SEQ ID NO: 516 - DNA, 248 bp, Unknown
  misc_feature (1)..( 248): cDNA_ID_1694780_gDNA_ID_1591579_Annot_ID_151206 3000 nt of promoter + ATG
caaacgccgacttgtggaccatttctcagaaggaaagcgaaccacttagaactgtcattgaaagattcaagaaggttgtctcgaatatagccataactgacgatgcggctatcggggctctatgaaacgcgttaagttttggatcacggtttcgagaagacctaatcattgctcgaccatcaactttggatgatgccttacaccgtgccaatcgatacatcgaaatcaaagaagagaaggccgcaatg

SEQ ID NO: 517 - DNA, 858 bp, Unknown
  misc_feature (1)..( 858): cDNA_ID_1694796_gDNA_ID_1591582_Annot_ID_151212 3000 nt of promoter + ATG
attaatatatttagatgacttatatagtcaattagtcatttcgatgataaacacaatgcgtgattaatgctgatgcaaaagaaaaatcgcgttatttacttcacagatctgattagattttggtatttgtgacaacctttattaaaatgtacgacctctattgtcaaatgtaaatagtttcaaatgcttctttgaaatctaaacatatataatcaacccaaaaaagagagagtctaaatctagtcaacaccgacgcatttgttttgatgtaaccatatataaatgtgacttatccaactttgttagttgagattttttaatttttggtgtgttctagaatgttaatgttaggctaatgtgtgtttcaactattgctaatattgtattaagggacaattattaaaaacaaaacttgaaaagagaggctaaataattagtgagtggggtttgtatgtaattacaaattaggctgcgtcatagaggattgcttccatcggatctcaaatgtggacctactaccgacacttctgactcatgcttagtctccgaacacaagacttcgaatcttaaaattaattttcttagatttgtctttttatttatttttcttttatttttaaatataacaattccctccaactataagatccaacggctgatatcattctaaacctttacagctaaatctgaatctccaccgtccgattcatcatcttccttcttcttcttcttcactcactcagatctcaatccccaccgaaaaagataaaaactcacactttctctctctctctctagaaaaagaaagaaagaagaaaaacttattgttattcccatttcgcccctatccgaaaaatg

SEQ ID NO: 518 - DNA, 573 bp, Unknown
  misc_feature (1)..( 573): cDNA_ID_1694799_gDNA_ID_1591583_Annot_ID_151216 3000 nt of promoter + ATG
tgactgtgggatcatcctagactagagttttaatctcttgatttgatttttcctcgacgagttgaactaaccagcttgtgattttttttagcttctcgggttgtggtagattttattatatatcacttggttgtcctatcacttgaactcgaatatttacttctacgaattgactttgcgaaataagctaatatactagtattatggtttcccctgcatatgtattttacattgtatttaacctggattttgaaatcagttttaaaagtaactgttgaaaacataaattaaacaaaactttttttaaggctcaactatactttagaaggaaataaatgtgtttcctagtcaatttgtgtcgatgaacagtacacattgactttgattgtgtgcgatatcgcgttagtttgatttaaaatgattgtgaccatacacttcagaaatcaaaatgcaatttgaccggaaaaaaaaaatggtccagtataattattattccatggcacaagtagatatggaaacaccattgtttataacccaaagcgaacgttacagagctatacaagaaattatatg

SEQ ID NO: 519 - DNA, 336 bp, Unknown
  misc_feature (1)..( 336): cDNA_ID_1694818_gDNA_ID_1591589_Annot_ID_151227 3000 nt of promoter + ATG
tactaaaatactacacatgtgtaaataattttttcagaaataaatggggccacttttgtaagtaataaatcagcttacattaattattttaccacccaataaaaagattccacagacttggcatggaagtcatgaacattcacaaaaatctaagaaaaactgaaaaccgaaaaaaaaacaaattattaaaaagcaataaataaataaactcagaaaaaaaagctattaagattccacaaaaactctgtattgtctctttctctctcactatctctctctcttttgtgagctcagatctgaccagagagaaagaaacaaccggagaagaagaagatg

SEQ ID NO: 520 - DNA, 360 bp, Unknown
  misc_feature (1)..( 360): cDNA_ID_3056654_gDNA_ID_1591590_Annot_ID_151230 3000 nt of promoter + ATG
ttgtttattcaaccgaacaaaaaacttgttttaaaatgaacaaaaatccaaatttatacagctcaacctgtatgtttttttctaaatttagcaacagaaaaataccaaattgaataccttcacatgatataaaagataaacatgaattgttaagtaagaaatttgataacccacatgcatttggtcattatttaacaacaaaaagcagactcaattttaatagtatatctttagatcgaatcagcataatgacgtatctttctgacgtatagcttttgtcttagttgttctttacgcatctataataactaaacctgtgtgaacaagacctaaaacagagagaaattcacaacaaaaatg

SEQ ID NO: 521 - DNA, 746 bp, Unknown
  misc_feature (1)..( 746): cDNA_ID_2172319_gDNA_ID_1591610_Annot_ID_151258 3000 nt of promoter + ATG
tttatttgttaatttkatttctgttaaatttaatttagaaattatcttcttcttttttaattttcgttaggagttaggaaattcttgtagttatcttttactttttgctactatatggtgcttttactctctttttaaccaatccacaatttcctttttccgtcccaaaaagtaaattacatataattaatagatagtggcaaaacttccaatacaagtattagattaatatgtaaaatgagtatcaattagtgtttaaacttttgattttaaacactttttttttaacactaagaacttgaatggttattgttattagatgctttgacactaattatagaaatcgcatcataccattttaattctttgtaagtcaaaaacttatccataacattaaaatattttgttttataaaactttatatttgacagcatttatcctctcataccaaaagtttatgatatcaaactagtataattatttactacgctaaactattattctatgtgttttattagtttaaataaattttatagcggtaattgattcgcttatagatgtgttttggtcttggacatgaaaatacaaaggtccatataattcttctacttcattttttaatttcgttttttcccttaatgcctgttaggtgttcgatataattccgcagagagtgtgggtatatacagcgacgttgtggaacacggaaactcaaaatagctccatatactctttgagatactatg

SEQ ID NO: 522 - DNA, 16 bp, Unknown
  misc_feature (1)..( 16): cDNA_ID_1694927_gDNA_ID_1591617_Annot_ID_151270 3000 nt of promoter + ATG
kggtaaggctgaaatg

SEQ ID NO: 523 - DNA, 881 bp, Unknown
  misc_feature (1)..( 881): cDNA_ID_4255182_gDNA_ID_1591624_Annot_ID_151282 3000 nt of promoter + ATG
tgacattgtatctatcggagtgttgtaaattatgtaacctcttttgataaagacgagactctttttcatcgcaacaatgacatatcctaattcttagaaatccttatttggctgctatagaagaacaacatatttttttctttttccaccagccattctcccatctactcggtggtgcaatattcacatggaaaacagttggatttaaaggagattacaaaacttaattcataaaatcgaactctatatatggaaattaagggtgacatattaaatgcaattcaacccaactaaaaatgttgcaaccgaaacaaatcaatcaaactaaaataacatgcaagtccaaatatatcataattaataaatatgattcttttgtctaattaagcatctggttctatggtgtagtggttagcactcaggactttgaatcctgcgacctgggttcgactcccggtagaacctcatttttttctttctccaaactaaattttaaagttctaaacaaacaggtcaacagctatcacatttgggcctagtttgaattagtggactccaaggcccaagatacgtaaaatcgctatttcgttttaaggttctaaagataaattatctgtactattaaatattttaatattaaaaaagaaaagaaatggttttatgatccgatcccttctcaatctcacggaggggaaaagattcctccaattcaaatctctgtctctgtctctcaactttcaatttctgagagagtcggaaatattctccagatcgcctaaggcaaattcgttttccgattcggcctagcgacggcgagagaggagaggaagaggcaagttgattgaccggagaagaagacgaagccgttcttggagaaaatg

SEQ ID NO: 524 - DNA, 2128 bp, Unknown
  misc_feature (1)..( 2128): cDNA_ID_1695023_gDNA_ID_1591639_Annot_ID_151305 3000 nt of promoter + ATG
ttgggaaaacatgattcgagatattacgacgagatttaactggaaatacgaaaagcgaaagccacaataccagaaacgctacatgctccatgtccccacctctacccaagaaggtcgaaacccatgatttttggctcacacgcctgtctgtgctgctattcatatgctggattcttacattctccagtttctttaccgaatctctcgtctccgaggtttctaaaggggcaaagaccggagagcccaaaacggaaaaccctagaagcaccattacatcctctaaagttatggttgcttcaccccaagggaagacaaacgatttggtttcagggcaccatttttcagaaacagagagaatcagagatgggtttttggtgatactgtaagtagatactttaattgcttcaaaaatcccagcttttctccatgtttgtgcgtgtaaagcttccatttttgcaagccaagatacgaaaggagcatctacaacccaaaacccagagaaagttctccgcaaagagaagagctttagtagctgcgaagaggaaacagagagacgttcatcacggcggggaagctcagccacagagcctccattgatggaggtaacaaagggttttaagaaatggttttttctcaagcaacgacctttatcagttaccattacttcttctctctcttcaatgagaagactcgacgatgacgatgcgttctccatctctcaagatgatgaagaagcaaatgattcaggaaaaactagggattttgaaagtcaaaatcggagacttgaagaaggaatcagtttttgctaagaaaggtgcaatctttgttgaagatgagcagagaaaaatgtactcaacattttgctttttatcattttatggcaaacaaaacaagttccttcattaaatctaaatgatgactgtacaataaattaacgcaacataccatgtgtataattttttctaaatttaggaatgtacacaattgacgaaacatcattttcataatttgattttttaggggaaaatcattaatacatacatacacaaaccaagaaaatttttttgtcattgaagagattcatggtcacatcatgaactaaaaatcacagagacggagaaaccaaaccatgtttcttggtcatcaggatctctctgaaagaaaactctgatatgcaacacaccaagaagctattagttagctcataatttagtacgttcaaaaaatacaaattaaacacttaaaaccaaaccagtccttaaaaagatactaaaagcataaacatcacccagcttatattgatcttagattactctacttgcatttgactaactcaaaacaagatttaacatgcctaaatccaacgagctgctgctaaatttctctctattacggctctcatttttttcaacgtccatgccacatttttctgtgtttccataatatactcctttagtgataatgccataaccttgagttcttgaacttttttcgtaggagtcattagcagcatcagcttcaccaaaatcattaagatattacagttaataagaaatgatgcaatgatgatagttttgagagtggctaataactcgctgtcaatcatgtcaatataaagtaacaagactttgtgacataaaatgataaaaaaaaatatgtgccaatatagcattttagtagaattgttgggtcaagtagaataaggtgttcagaaaaaaaaacgttaaagtaaagtagtttatttattttttaataaaaattggcaaaaagaaagggctatatttgtaaatagtcctttttagaattaataatccgaagcttcttttttgacagagcaatgcaatctttatcatcttaggttttacagtgtgattagtataattaacactaaagatttaataataatagaagcaagggtttaaggctaatacacacaaaagagcgtcttcaagcgatggccacaatcttcttcttctgcttaagctttccttctcaggcagacccacttgcttgaaactagctcggaacgataacgacaaaattcgccaccataaaccctatttttaatctccgactctgtcgtcacttctccttcaagctgggtagattaagttcgcttatggccatg

SEQ ID NO: 525 - DNA, 2088 bp, Unknown
  misc_feature (1)..( 2088): cDNA_ID_1695097_gDNA_ID_1591653_Annot_ID_151332 3000 nt of promoter + ATG
tggatctcaagaaagacaatcgtagctcgaaattctaatattattggagatcaattgatggtttccaatgaacaaggacttcaaagacttcgtttgagaatacttttctcagtgcttatcaaaagctctttaatattattaatcaaatcaacaaccgaataatacaataggcctaaggtggctatatataataaaagctcaaaaccctaaaaatagaatattctagaataaataactaaaagataacaataatagatatttgaaaatattccaaatatcttgttgcatcaacacgacactggaagtagagcacaacacttagacaataagctatcattataaactatacgaacaacactttgaataatagagaacacaaactacagttagattacaaagtacggttaaattactatttctccctaagttaatttttacgtttattataaagtgggttaagttgaagtttggccacaaaacaaattaaaagcccaacacagtagactgcatcttctccaatctacacaagcacgattccgatcaacatcaccagccatagacaatggcgactaaggccatctccaaaggctacagtttcgcttctacttggaaataggtaatctgagctcggctttgatcaattgaatgatgctcggttttattgaaatatactgaattgtaattagcgtgttgcagagagctcctttgacagagaagcaacaagcaactattgtttctttatcccacgcatttgctgaatggccatttcctcccaatcttgtgagtctgaggatgttttggttaatacgaatcaggttgttattccttctccaatgcttagcacatttgcacatctagcagtaaattaggattattatcgaatcattcagactatgacttgtttttctatgatcatgtttgagtaattttcttgttagggttacagtttctcattagggatttagatgatttagtagattgcctccttgctaggttatctgtaggattcttcatcttgattgttcttaatgctagttctagtgtagctaactagaaattgatcttagataataagtatgaccaccataggtacctgctaccagaactatcatagatgggcctaagtatttaagaaagaacaggtaggctcatagaaggtctctggtttagatactgaggtgaactaatcaaacttgataataatgcatgtttaagtataagatttcaacgctccactggaaatcttagctctaggcatagtgagtttcgtggaacaccactggttattctaatattaaagtttgagtttaagaacggttcgataacaacctagctattactatatctactaatcatttgtttcctgagaataccctaagcctaacgctttttatcttgtcttacaacctcacaatttgttattgcttactttttgtttctttttattttcattattattttacttagcttaattcgataaccattagtttattacgtgatttgagaactttgtgaattcggtccctaagttttgtaactgacctctttatttgagagagtggtctaagaattaatttaacctacatcaaatttggcgccgttgccgaagttctctttgattcaccattagactaggtgtagaatctagactaagtttttatttttctttcttttgttactcacgcattttctttcttctttttcttgtgacaggagagctaaaagatggaatgcaacaaactgctggcagatttcgacgacagtgtcgaacgacaccaacagagtgtcgatcgacaccatctgcaaaccaaaccagctaccataggcgacttcaacgatcgctgatcttttctactcaaatcgatcaacgatccagctacctccttttgcaagagaagaatttgctattcctgcatactataatcttattccacgaggaaagtttcgaagagctcctgatgaatcaccactagatcatctggaagtcttcgaagacttagtgtcctcaatcaaagcagatggtgtacaagctgattatcttctttgaaaagtcctcccccactctctcgcgggcagaggaacatcatg

SEQ ID NO: 526 - DNA, 121 bp, Unknown
  misc_feature (1)..( 121): cDNA_ID_1695124_gDNA_ID_1591660_Annot_ID_151346 3000 nt of promoter + ATG
rttttcttctctttgctcataagaacccactttaatgtatgtwcasstcttcttcttcttcgtcttgttgctctgaagagttggtcctgacttgggatttagggatttcgttttgataatg

SEQ ID NO: 527 - DNA, 521 bp, Unknown
  misc_feature (1)..( 521): cDNA_ID_3056750_gDNA_ID_1591660_Annot_ID_151347 3000 nt of promoter + ATG
tagaataatacttacaacttgaagaactctcttgtagtcttgtgtcattatgatcgtgttggcagtgaaacgcatattttgttgacgttgccaactacttcttcattctcaactctctattagttctattcaagattttaacaccaagtttttgaaagataaagagtatacacaactctcagtactaatggatgcaaactaaatgtaactgatccgaatttaaaccataccaaaattattgatttgataaaaccgaatccaagagaaaataaaccggttctgtttttatttttttccatatcgaaagaaatctaaaacccactaaaagagttagaaggtttcgactactatttacgcaacgcaaccaacctatctgggccaagtccaagcaaaccaggaaatagctaaaaccctaatcctcaaattgatcgacaaaatcgaacactgaagagttgtttcctatcagatcagatcgtgtttattttcagtacactgtctagctcaaatcctctacaacaatg

SEQ ID NO: 528 - DNA, 467 bp, Unknown
  misc_feature (1)..( 467): cDNA_ID_3056765_gDNA_ID_1591662_Annot_ID_151354 3000 nt of promoter + ATG
gcttcctttcattcggtttgaatctttgcatcggcgtattagagaagcttgcctttattgaaatgtggctcttgtgtgattgtttgctttgctttccactttctccagaggaatttctcacagaaatacttgacttacttgagcttgtgtttgtgattctaggtcaagtagttccagagaactgcattgcatattcaccaacatcttaggttcctaattcaattagcccactgggatatgccagagagaattggacactgtaccatttgaacatatgcgtatgggtcaaatataaaactttcttccttgaaattccgaggcaagagagctgtccattacaggggtactcgtgtttttttaaatacctgttgagtaaagaaaggctggattactagattgcatgctttgtcacagttgtctgtgaatggaagccgaaaaggtttgctggtgagttcagattattgatg

SEQ ID NO: 529 - DNA, 1969 bp, Unknown
  misc_feature (1)..( 1969): cDNA_ID_3056776_gDNA_ID_1591665_Annot_ID_151361 3000 nt of promoter + ATG
tcaccccacgcattcccgacgcaaagagtaaagattggtggtttgacatacctgaaattcaaagataaggtaagagttgattgttgcattgataattggtcgttctccccaaaatatgctggatatgaaaactgtctccaagtgcaattttgaatatttgggaaagcagtttaagtatccaagtcttgttatcgatgctattacgggaagaagtaagttgaggaaagagatgaagatcaattaccccatgacatcatagattgcaaaagcctcagtatcatagcccaacttttcaccattctgaaaagggagaagataaattctcttaaaaacagtttgaacgataggtaatgatttctaagcttttagtcattcatttgaaacaaaccacagtttcaattttactattcagtatgcgttcttaatatgatggactacataatggaagcctaccttggttgtcccagtcgagtttatgtaaaggtaaataggcttttcctcgtcttcatactgaaggtaaagaaactccgcaagtatcaactcagtaactgaaggtacgagagacattcccaaatatacaattcggttcttgaacaaatatgatgccaaatcaggaggaggttgttcgtgtgcacttccctttgagaaaggtataacctgttgataagacggaagcacgaagataagaatcatataataacaacaataaacaaaagactatatgtgaagaatatagcagcctccaaattctctatcataatcataatcagagcaattgatgcatattataagtggcacacacaatcaagtgaaacctctgccacataataactcaacttcttccttaccagccaaacacacagcataatttcttccgaaactgcattatttaatcttcatactcaactctctaactaaacatgtaccatttccgatcaattaaacaacagaaatgaatgagccgtctttgctatctaattgcatatatcaatagtaactctaatccattaattcgccgtttaaagctaagtagcaaccgttggtaagattcgacccataaattttccctcaattcaccaccacagaagcataaatctcagctatagaatgaatgagcattactcccccttgcaatctaatagcctatatctagagtcaatctaatccattggttcaaaactaaggaacaccatttctcgacaaatacaatttctgaaaattcactaccacagaagcataaatctcagctatagcaacgaaaacctcaatttcaaaatcctaacagaatagggagctcgttaattaagaaactgaaaaaagtataaattcgagtaccatagtgacaactccgcgtttaggcttggaactggaaaaatttaacggattaagcgattccgcacgaagcttagcgccgcataagtcactagagatgcttcctccggtatacggcgaaagaaagccattcgaaagagaagctctgagagatgaagatgaagaaaatctcggtttagatctcagattacgtgtagaagacgggataatcgctgacgtacgagctcgaagcgttgtgaagctcgtcgcagtcgctgctgctacctccatttcttctttgttgcagagagagagaaagagtgaaagtccctgtgaccccgaaacgataacgatctgtctcaaatcgggcttcataacattatttatgggctcaacaaataggcccaatagttgtagttttttttctctgaaaatattccggtttcgactataatagtaaccaaatcaaaccgaagtaaaaccgggaatttctcatttttcgaaaacgtataatttaatatgaggctaccaaataaataatctactggccactgcagagaatcatctgtcgtgttctgtttgttctcacttctcacttctcagatttttataaacatgaatgaaacctgaattgttccactaactctcagcaaaaatg

SEQ ID NO: 530 - DNA, 3000 bp, Unknown
  misc_feature (1)..( 3000): cDNA_ID_3056773_gDNA_ID_1591665_Annot_ID_151362 3000 nt of promoter + ATG
tggtcgaataaatcttcaggtaaaatcaatgcacagttccaatagaaagttgtattcttgcaaaactttcatggaagagagtagaatttttcatgttgtgtgacaacagtctcttaccattgagggacaaaaggagccatccatatgacatcaccagcctgaactggatacctaatttaaagacaagaagatcacataaaagttataatcatttcttctattctgtggaatatagctgtgtttgcagttttcttttggaacatgcttctgttcactttacatgaccgatgtagaaaactattgttcttggttgtgcatgtggtgtgttgctggaaagttatcaattatattcacaatttcgtttattaataatacagtgttgcgtaccagttatcacccaagcgataaatgccttgcccctccagaagcaacaaaccatgctggttataatgaacttcctgctcacattgcaaaatcattgagaagacgaaatggaaaaggaacagttaaaaaatctgcttatggtgtcaagtcaaactgttatgtaccttaacattcagaaactctccaggctgaaaatccataatctgcagatgacagacacatcagtaattaagctttagaggtctcaaaaagcgaawggattaattcaatcaagtgaagtgcttacatggatgttgaagtcataagcaacggacatcggaagaagtttccgcagttcaaaaacctgtaataataacaaaatatatcttcagagatgactaattttaggaactagaacttgcattacaaatgtaaactgaaatactttcagatgtattctgagaaaagtggagaacttttgcacacttacctcaccaggagtctcgagtagtggttgcttgtctgtggagccaacaataagctctgtggtgtgacttcctagatattcatacctagagatgtagcagtattgggtgactttttaagttaaaacagtagagagaactcaaaattttcttgtcatattaagggaaaggagaaaaacctccgctcgaagacaacaagtgttgcagactcaacacagtccaaggaatggtgaaagtttggaggtaggtacgcatatgaatcaacctacaggaaaaatggattatcagcagaaaatgataaaactaatggagaaatcttgcaaccatttcaccatcaaatctgggcagaacgtgatgtaaccagaagaatactgtggtaaattttcctttgtacaaatcataccgtcaatttttttgaagaactggatgtgttagtgagtgtcacagcaccctcgaccacgaatataagacttgaaaaagattcagaatattgaaaggagttaaaaagcagattatagatcataagtgcaagcatatgttaaagatagagctcatataagtaataataccgctctatgtcttgtggaggcaaacctgaacttgacatttctgcaagagacagtagaatcagctagatgatctccaaattctacgagtagatcatataaaacagcaaatctttaaacccttaatcactcgacttgttctgcgcaaagcaagaacaagtgaatgttctaataatgatgagattggtgtagcagcacactttaggacataaaggtagttcctaaaagattgactctattatcgaaagatagaagaaaataatcccaagaacttgacgttcattacttgtgagaagagattggtttcatacctttcattttcgccaagtacatgacaaaatgggaacccgttgccggtgtgatcaaatacgcccctaatgtgtttgtcctgtaaatttgagcaacagataagtgcaagagcttgccaagtttagacttcttttagctataaaatcaagaaaagtagggaaattataagagagtcatgtaccagtcaggtaaagggctgtatacatgactttccggtgttattaacgcatgatctcgtttgtatacacttcgtgtgaaaccaggcaagtctacaaaacaacagactcataaatatttctgcttaaacacttgatgaagatgcaaatacaaaacccccaattccaaatttgattagaaaactaatctaattatacacagagagagcgaactctcagaaagagactgtatatacagaactgaagttgaatgcttccatggttatgtctaaatctaattgatcaaaagttaagaaatttttgcaagacatgagccagaaaccctctcagattaaacactaattaaagtaatcttaacttttcaataacttaatctcaaaatcaatcatatacaacaagacctcgaacaattgataaaaacagcaatcaaacttaaccagcaaaagtatcaaacttttaataacacgaagctgtaagaaacacttgccttggaggtgtgaaggagagagtgttggattcgtggctttccaataaatgggtttcgtcttctcatccgattcaacaatcgaaggcgctgaacaaaacccatcatcgcttttcgaagctttaacaagacctttgataacaaataagaaagttctgattagtttcacagtatactcaaaagaacttgagaagaatctaaaagattcgtacttactaataacgatgaagacgattaagtaaagtgatcgcatttttgctgagagttagtggaacaattcaggtttcattcatgtttataaaaatctgagaagtgagaagtgagaacaaacagaacacgacagatgattctctgcagtggccagtagattatttatttggtagcctcatattaaattatacgttttcgaaaaatgagaaattcccggttttacttcggtttgatttggttactattatagtcgaaaccggaatattttcagagaaaaaaaactacaactattgggcctatttgttgagcccataaataatgttatgaagcccgatttgagacagatcgttatcgtttcggggtcacagggactttcactctttctctctctctgcaacaaagaagaa

SEQ ID NO: 531 - DNA, 1028 bp, Unknown
  misc_feature (1)..( 1028): cDNA_ID_1695180_gDNA_ID_1591679_Annot_ID_151381 3000 nt of promoter + ATG
  misc_feature (4)..(4): n is a, c, g, or t
  misc_feature (22)..(22): n is a, c, g, or t
  misc_feature (25)..(25): n is a, c, g, or t
aatnaataattaaaaactaatntgnacattttcaagcaaaaaaaaagaagaaattcggaacattttcaagcaaaaaaaaaactaattacaaatatatttaacaaatcatggaacatagataatccttagaatacatattcaaaaaaattcacagcaatagggtaaagtgtaaatatatggtcttaattttgtagaacatatcaaattagaatttctgaaacttttagaacatgtcaattttaaaatgagtagaacatgtacaatgtataaaaatacatgatctaaaatatttagaatttagacaaaaattagagaacatattctaaactttttagaacgaatttcaactatttttaaaaaaaccagttttcgacaaaatcataaattttcttctctaacacttcttcatcattattggtcaacatatgttttctgatctgaacttggcataaatgttaccttctttttcggtgatatattgtgataacctggtattcactaaaaaatgaatgaagcgtatagctctagacattgaagtctcaaaaatgggaaaggatcaacattgctttatcatcacaacgacaagatttttccactacttagcaggatttgcaggacaaaaccaatctctgttttcaagattctactttgattaatataaaaacatagctgttggttatttgttacttaacataaggcgttttactcatttttatatatatgagaatgtcaatgatctatccaaataatcaaacaaacaaaactctatttacatcatctagatgaattagcaaatgatcaaataaacaacattcacatgctggatgcaaataccaaatgcaagcgaataggcccttaaaacaattcaagtataccaaatgatcaaacaaatagacccttaaaataattaaagtgagtccatttaggtttgggccctccactaaattatcggaacagtgaagtcctctggtccctctgtattcaccaccacaggctcattgacagaaagagagtgggagagagacatg

SEQ ID NO: 532 - DNA, 1666 bp, Unknown
  misc_feature (1)..( 1666): cDNA_ID_3056812_gDNA_ID_1591696_Annot_ID_151407 3000 nt of promoter + ATG
ctaatattatcaatttatcataataatatattgtatttttttcttttaatagtaatatattatatttattttggttattttttatttaattactatcgcacccgctggtttatcattcataaaactcccgcaaacgcactcattatcaaacgcttaaccagttgttcaaaacgcttgattaacgcttgaaactgcaaccgcccgtttccgcaaactcccgcaaccgcaaccacacccgctgcgtttaaaccagtcaagccctaaaaactagggttttgaataatatcattaaaataaaatagaaagaactagggttttggcgtcatacaccgcctcattcaattattaacaaagctgagtcttcttcacggagaaatcacggcggagctaggtctcatataccttacatcaatatcttgggcctttacttggatcggagatacatcaaacataaaatacttctcggttttattttctctttcattatgtatatatgtgaatgcctttaaaaattttgattgcctttttctcgttttggaatagtcatgagaagctgagaacctatatataccaaaaaggaattatttctcacctttgcaactagctagatggagcttatggatgcaaaattcgttttaaaacacattatattcggatgatgtcaaaatatttcacattctatagccaaattcatgtttatatattccgatataaagtttaaatattaaaacttatatgctgtagattcatatccgggtgaaaacacgaaaggacttatgatggaaccattatatggaacgacgtcatgtggaatatcaagttatttaacttctcgcaagttaagactataaaaagtaataaaataattagtaactaacaatatcagataacgataggcagatgatttggtaatactattttagtatcattagatcacaataaatcataatagcatatgcgatatacaaattaataaattatcgtgcttaaaataaaaaacctattatcaaccaataatttcttcgcattagtggcgacaattttttcagccccagaatgattctttgaagaatagtcaacaaagattcctaatttcaacaattctattcaaggaaaagtacgaaacaaattctactagtagctagattctctcatgtatatctaaattctactagtagtaattaagatctttgaaatcatggcaactgctacatttattttctcttgaaaatcccaactacctattgtctatttctttgcaatgaataaaatgtagttccacaacaaagtactcaagaaaattaagaatttagactttagagttcaaaccttgaatttagagttattatgttttaaattttgacagttttgataattttcttcatttttaaataattttatattttccgtaattttttctatatttcatgtattaaaaaataagtaatggattagtagctaaacacaggaagtgtgacaagacccgacaatttaatacgagacgcgttgaccttgagcttgacttttcgtcagcacaaaaccaacctctgtttcacgttatctaatatctacggtagtcactgagagagaacaaaacatcaaatttgtttcatatatcactcaaagcttgatgagaagatacacagatcaagaaagaccaattatg

SEQ ID NO: 533 - DNA, 481 bp, Unknown
  misc_feature (1)..( 481): cDNA_ID_3056846_gDNA_ID_1591719_Annot_ID_151436 3000 nt of promoter + ATG
  misc_feature (190)..(190): n is a, c, g, or t
  misc_feature (201)..(201): n is a, c, g, or t
catcatggttgggtcaactggaaccagattcattaaccaattggactgatacaaagaatgcattcatgaatcacttcttcgatgaatccgtgacagaggaaattcgtttgcaaatctcttctttcactcaggctccagccgagtcccttagagcatcttggctccgtttcaggtcttatcagcgtgaatntccccaacatnggcttctaagaaaggccaactcatcaacctattctacaaagaaatagacaagcgataccggaatcaacttgatgcagcgagctactataacttcatgacaagaactactagtgaagcattactcctcatcaccaatgctttaacttgtctttcaacgcagggatttgacaaagaacgaagaattttagctgagatagccaccgcgagcaaagagactcctatttcaacaatttctgctcctatccaagccctccctccaccctcatcagagactagaatg

SEQ ID NO: 534 - DNA, 3000 bp, Unknown
  misc_feature (1)..( 3000): cDNA_ID_2708714_gDNA_ID_1591721_Annot_ID_151437 3000 nt of promoter + ATG
cgactacagctccatgagacattctgatggaccttacggcgagaatatcgccgcgggatgggtccaacctaaggaccaaatgagcggtccgatagcggcaaagtattggttgacggagaagccaaactacgatcatgcgaccaacaaatgcaaagatgtttgcggacactacactcagatggtggccaatcaatcgttaagtctcggatgtggctcgttcaggtgtcatgagaatgagttgatttatattgtatgtaactattatcctatgccagtgggtgatgagaatacccgtccttattgattatattgatgcaaagaaatgatccatatggtaatgtgatttgacaattattaatatgttaagttactgatcaatatatatgtataagaatataaaaccaagtttatgatatacattggtttgtataagttgctgctgtgaaatgattcagaataaaatgtgatgttcaattggttaaacaaattgtgattacatatatttgatataataatatatgaactttttgttatagatgatttataatattttcgtaaattatattcggagttattttcctttgtatttagtccgttggtatctagagcaattgtgaaaatgagtagctaagacatgaaaaattgtgcatttagataatgatggtttatgtttctttttgaagagcatgcccaatcaatatacaaatagacacagctctactgctctagcagaaaatatggagcaaatttctgtcttggggagctttatgctgcggttaaagcggctatgagactctaagcatcctagtagagtagataacgaattctatagactatatagcgtgtggacatcaacatgtctttaactttaaaatgattaaaagttgtctaatgggtcggtttaatagcttatcatcttccttattttaacttctaagtactagagttaaaggaatcaaatgatgcgtatgctttaacttttcaagaaacacaatgatgcatagttttaagacactgtaactgtaagtgcaaatgaaccaaaaatgatgctttaacacgacgttgagttttggggaatcatttcatctgacatatatgggaggacatgttttgtttgtatatcgaaattcggaaaatgtatggctaagtgggaatattggatatcacataacttattagaatcagaagagattgcaaatttgtccaagaagcatatatcaagacactgtaagcgcaactctgaaaatttcattgttgatcaaaaatacaatatagtatgtggcaactggcaagtcatacaatcacatttgatcgtactagtgagcagagccatgccaaggttaatggttgacggaggcggtcaaaattttttttccccaactaaaaaaaacgatgcttataataatagaagtaaaaatgtctacaaagataaattgtcatatgacgaaaatacgaaaaaaaacaaaacataaaaatagttctaaagcgtaattcttcttcctttcttcccaacaaaatcattagccaaacgttcaaagtcaacttctctaaccaatgctctttcgatagataagatcgccaagtcacttaaccttttttgtgacatactcgaacgaagataagattttatcaatttcagctttgaaaaacttctttccgcagatgcaaccgaaactggaattgtcaacaatacttgataagcaatccatgaattaggataacaaccttcaactttttgcaagaagtctaacacttcaataggcctcctaacttccttgggtaaagcttctcttagaatttttagttcataaaagagatcactagcaagaatatctgaatgtgttccatgagttaaagcatctttaaggttggtacaagatgccatcaaactatcatcactcgccgactgcaactttttcaaatcaaacaaaaacccaaatatttgttcatacctttggaattgttcgaatcttgtctcaagcgagtaaagagcttgatccatgatttggatgaagtagtcaattctgtaaatttcgaacataagtgttacaaaatttctgattctaatttgggggaaaactacaacatgtataattaagaattacatcaaaccataggatagaacaaggataaataaagtatcaaacttactctaacgagtcaatgttaatacgttcaaggctcaagagtaacaggattagaaaaagtcttgtggaaagagacggcgattaaaaaataaaggaagaggattctctaacctaacttaataatgctttgttctgtttgtttccttattctttggatttttttttatttttattttattttcttattatttagataaatgcaaatgatctgtaatattggtctattaaactaagagtatcttatagaaaaatatgcttctaagttttttttcaaaaattttggacgtaagcgaaggtttctttcttatgccttgaggcacggctctgctagtgagttatagtttcaatgaccaaggagttccatgcgatacacaatgcaccaaatttggtgtgaagaagtaaacgtaacttatcaattgttcgaatttctgtggattttatgcaatcagtattcgtaaagtaacttggttttataagtctgttctcaatttccatggcatcaaaagaaaacgtttagtctgtttacttcgttatctcataatccaaattcaacggccacgatcagctagactactgtaaatcaggtggtcgtgacagcacaagatcaacgatctgagttcttccttcttcgctcatatgctaaattctgattgaaacatctgkcgaattcgttcttcccctttctaatttgattctccttggaacaaacaagctctgttacagagatcagagtcgaatccgtaacaccattgttgattctctaaagcatctactgatttcaatcgtgaaattagccggtggtgcatggaagctcctttagcggagagttagtttcaattttgattcatcaatg

SEQ ID NO: 535 - DNA, 206 bp, Unknown
  misc_feature (1)..( 206): cDNA_ID_3056855_gDNA_ID_1591722_Annot_ID_151441 3000 nt of promoter + ATG
  misc_feature (1)..(2): n is a, c, g, or t
nncatcatgtaatgccgtccagtttgaataaaatcaattaatttcgaaggtagacaacatgaatctcgtgtttacctatctaacaatgtaacgaatttattttcttgggagaaactctttaccaagttttgttactgaatcgggtcaaagaaatacaaattttggaaattaacgacccaatttcagacggcccatgaaatatcatg

SEQ ID NO: 536 - DNA, 175 bp, Unknown
  misc_feature (1)..( 175): cDNA_ID_3098254_gDNA_ID_1591745_Annot_ID_151460 3000 nt of promoter + ATG
atcccgaatatataatgctaagatgtgactcgtgttggtcttgctaccaccaaatctcacaaccatctaatcaaatccctatcacactcacttgctttataatgaaaccaacatcggaaagatttcaagaacgcaaagtagtgagatcaagagagaaaaaaggggagttacaatg

SEQ ID NO: 537 - DNA, 1011 bp, Unknown
  misc_feature (1)..( 1011): cDNA_ID_1009364_gDNA_ID_1591752_Annot_ID_151470 3000 nt of promoter + ATG
  misc_feature (886)..(886): n is a, c, g, or t
tttatttatttacttgtttttaaacaaaaataataatacgtgttccataatcattggaccatgtaatgatatgtgaagtgaaagtagctttggatgggcaacaaatacactgaaccaatcgtataattatataactaaaaacgtatatatgaatttctgtttttatttatttatttacgattttatgaatattttttattcactggatatgagtcatgtgaccttgattttatttttatttttgagatatacgtagacgcatgcaatttctttaaagttaattcattttttttaggatctctcgcagctgtcagataaagtaaaatatctttcgatataaaataaaaaacaaaaccagctcatattgtatagtatactatgtgtcacatattttgagatgatcagttgctacacggatctgttaaaacttaaaaggtagtattgaataaagtggcggtcacatagaagtacaactaatatctatttgttaaattttgtcaatatgatatcaaatacaaaatgataataagaaaattatataaaattggaccatattcttaaatttttatacataaagctaaaacatctaaacttcattacaaggtaagagaaatttgacgaatctggaagttattactgagttattttcgctcgaaatagtaagttaccaacttaccatttttgtgaagctgcaaaaatagtgagacgtgaatcacctattggactgggctaggcccatcgattctctgataaactttcattaaataaacgtttgacttttgccaccacaccgcatgtttgattttttgttgtcgttgaaacaattatatttttcgagacaatacgaaattgattttcccagtgattatgtggctgagtggctcangttttgtttttctccttaattttcttggccaataaagaaaataaaaaacatgaaatcattactttaaagacaaaaaaaaactcttgctcctgtgttgagagcctaatccaagattctcttccatg

SEQ ID NO: 538 - DNA, 17 bp, Unknown
  misc_feature (1)..( 17): cDNA_ID_1695405_gDNA_ID_1591755_Annot_ID_151471 3000 nt of promoter + ATG
attattatcagaaaatg

SEQ ID NO: 539 - DNA, 498 bp, Unknown
  misc_feature (1)..( 498): cDNA_ID_1695417_gDNA_ID_1591762_Annot_ID_151476 3000 nt of promoter + ATG
  misc_feature (32)..(32): n is a, c, g, or t
aataataatataaacaaatgcgaaaagaaaanaaaatcatagcaagcaaaatttctgcttcagcgctctcgttctgttttggtatttggattttcaatcatggattgagcgattgttctctttttacttgattgatttcttcgataaactctggatcttttgtgtgggttttcataatttctttttttccgatcaatctaatccaatccagagattctgagtctcaaagttttgcttttttgagtctgttttccaaagacatgtagggctggattctaagcttgcaacgtatccatttccctggtctttcttggtgatccggaactgaagtgaaggctctctggattgcttcatttagatcaatatagaggtttatctgacttaggttcttgatgagtttatgttctgtatcagagtagatatatgtggaggagatagttttagttttaaagattagattttgctgtccattttatacaggaattgaagtgaggcatg

SEQ ID NO: 540 - DNA, 211 bp, Unknown
  misc_feature (1)..( 211): cDNA_ID_2187151_gDNA_ID_1591768_Annot_ID_151485 3000 nt of promoter + ATG
tcaagtcctgtgatggaaatggaatcatggaaattgagggattcagggaggattgattgattagaatttcatatttatgagagaataagagaactgatgtgtgtttcttttcctacttcttaaagttgtgctctttcctatttctataagctcttgtggataacaacagttgattaacgttcttatgcttgtttagggtacaacaagaatg

SEQ ID NO: 541 - DNA, 3000 bp, Unknown
  misc_feature (1)..( 3000): cDNA_ID_3056900_gDNA_ID_1591774_Annot_ID_151490 3000 nt of promoter + ATG
catcaggcacttgtatatatgaacacctaggaaaaggaggcggcacggagagcaataatgggtagaatttatgcccatcacgcatacagagcctctttttgctctcaaattcatatctgcgtttccagacttcaagtgcgaagttatactacaaatccgcgtttcgcccgccgctatgattttgaggttattttccattgtacctttgcaattgaaatttccgtctaggcttattgattgattcttacaaattgttgtttatacataacaggaaaagttgtcgcctgatgttactgagtcacaggaaaagttgttgtcacctgatgttagtgactcttcgacaaggtattcaattcattttacctctcgatcggctttgaattagcgacgaggttgttgctcatatgtgttagtgtttttcacctgactcagcgtagctaagcagtttcaatcaagttcaaagatgcgattcctccacaagcacaaagcttttaaaatgaagaagaagaagaagatgctcgtgaagccaccatcacctaaaaaaaacttgcaatgctttattaagacttgaaaccttttattttatttttttatgtaatgagattttcccttgagaaatctttgtctccccttgttcttcaagatatgtaacttaaacctgctatgcttagcttaagtatgacttaacaatccttttatttcttatctttgtctcactctattattgctaagacatttctcgaagagcattctccaacttgatctatctacttgtgctattcaacttagaaacatgaataaaatagcatgcataatttgttatgcttccatgagatagctagtttgtaatcacaaagaagacaaaaccctctgccttgccaaatctccgttcagctttgcttacttgtgcagctgccagtttcatctatacctctttgttttgtagttgcaacacttagactcacttatcatcatgtacatatacgcttaagagcaagaagcatttgtacacacgaaacactaatgatgccattacatgcattcaagtatccatgaggatttcgtcggattttttgtcatgtaaaataaatcaaagataggtgatgttattattgggcccatcaaaacaagtctcgttttgcaagcaaagtagttgatttgtcgtatccttacttgtgcaacaagatgaacttggatgaagaattaaaaaatggtcttggagttgctgcattttgattgtctgattcagattaacgagaaccttatatggttggccatgaaggtctcgctgcttcgatcttcaccttttcgattcgttgctctgctactgtaatccaagatttcggatttccagagcttttatttataaatgccgtacctgtgtaaccaccgtctcggcaatccatggcctttttaatgacacatagtttcttgcctcggcatagttcagtgtctgtcttactctcattagcttgtaaaaggattccattttttttgcaactagcataagtaatgatgtgttcatctcttgacctatggaattcacctgatcactcgctgaacctctgattacaagtaatgcattgatctacctctttctagataaacacttgccaaggtatagcggaatcttctgagttaaccaaaactgcttcttctttactttcatcttccttcttaaccgaagaatcttcactttctctagaccatttttggtgttgcatccccaaattgaaacaacaaaactacagcacttaggcgaagatagtctaacataccgtttgtaccattctattaaatcatttttcgtgatcaagcttagctccttcttttcttcggagtagaaatcaaatatgcaactgaaaataaatcaaacatagataagttagcgacttcaaacattgtcatgttgcatgatttcgcatatagaaactatagtatcaaagtttgactaatataatccagggaagttaactctaaatttatgaaaaatattcaaatcattctcgagcgatgaattcattacctttctcgaacaatctcactccattttgtcttcccactatcatgtggcaacttcgaacttacaccatttttgaaatctttaaacattttgtcagacaaaccttcctataaatataggaccaaataagtgaaatagaaccaagctaaagaaacttaccaacaacattcatgaaattatagacaaacttaccaagcgaattccattcatgaacttgtagattcgccttaccaaatgacaaggattgtaatctgaagaaacaacgcatacatagaaaccaactccatgtatcaagcgagtttcacattcaactaagtaaccaagcttttcttcgatcctagtagcaaaatagatttgaaactctgtgagtttcagtgcccagcagttgcaagctagcataagtacaaattagactaaaacaaaataaactatttgctttcaacattaccttagcttattatagacgctatcacttataatggagacaaagagatttaacaatgcagtttgccttgcttcttgggctttttcacacttgattcgaaagtatacctacataacaatgaatttcataagcatataattcatttgtatctttaacaggccaatagcagacaagtttatgttcgtacctttgctagagagttagattcgaacttattttttacctttacatatgttttacgtttggcacaaagaaatacttccctttctctcaagctcatcggagatattggcagacgctgaaagtcatgggtatcacaaaataatattagagtactaaatccaggaaaagaacaatgctcccaggcgactttcccgaggctacagtttgcaattcgaattttgaatcgtagatctggttttcggcttggtttcgaagctccgacgggtattccggcgcttctgtaccctctttcggcgctcctccccttattccccttcgtctgaggggtcccagaacctctttgtttgtt

SEQ ID NO: 542 - DNA, 360 bp, Unknown
  misc_feature (1)..( 360): cDNA_ID_3056917_gDNA_ID_1591790_Annot_ID_151508 3000 nt of promoter + ATG
actttaggcaaacaacagatttgctctgtaggaatgatgcaatcatttacgtttgctttttatttatttatagattcctgcatttggagcatacaaagcttctggtcttagtaagggattattgtcacacggttcagaggtgatcaaaattgtaagttgcatgcacttggatagtaccatcagaataaaatgaaaacttcggttctcattatacatgagaaattcaaaaacgtatcaaccgaaccggattaaaatcaacgattaatgtataaccggactcgagtcgattcaatttgaaatgaaaggataactcattagacacagagacgagctttttagtttgagctctctctcactatg

SEQ ID NO: 543 - DNA, 18 bp, Unknown
  misc_feature (1)..( 18): cDNA_ID_1695476_gDNA_ID_1591793_Annot_ID_151514 3000 nt of promoter + ATG
gtcatcaagaaagaaatg

SEQ ID NO: 544 - DNA, 83 bp, Unknown
  misc_feature (1)..( 83): cDNA_ID_1695517_gDNA_ID_1591805_Annot_ID_151531 3000 nt of promoter + ATG
cgccatcaccatctgccatgaccgcgagctgccaactcgacttgtccctgatttcctcactggggacagtgatgttcaagatg

SEQ ID NO: 545 - DNA, 347 bp, Unknown
  misc_feature (1)..( 347): cDNA_ID_2730313_gDNA_ID_1591814_Annot_ID_151541 3000 nt of promoter + ATG
cccccaaaaaaaaaaaagacaatttagttctagcctcgataaaaatcaggcatgcccaattgcccatcatgtcagaccaaaataatgtcggataaaaaagcccatcctagaaattgggtaaaatatgaaaagactgtcaagttaaaaaagttatttttcgtttgaccaatccaaaaagaaaaacttgagtctgacgacaagacagtagtagtagtgcgctgttctgttaagtaactgtaaggttagtgtttgacttcgagaaatagtaaatgtgtctgtaaaacctccaaatcgtgaggaaatccagagttccatcagatctaactctcttagatctgattatcatg

SEQ ID NO: 546 - DNA, 76 bp, Unknown
  misc_feature (1)..( 76): cDNA_ID_1695594_gDNA_ID_1591833_Annot_ID_151567 3000 nt of promoter + ATG
aggctaakaatatctaagttttgaagaattcaaacacagaaagaaaaagagagaaaataaatctgaaagaagaatg

SEQ ID NO: 547 - DNA, 325 bp, Unknown
  misc_feature (1)..( 325): cDNA_ID_1695678_gDNA_ID_1591854_Annot_ID_151606 3000 nt of promoter + ATG
aaagttctcgggtatgaagagccacgattgtcatgtcttcatgcaacggttacttccatttgtatttcttgagctgttgccggcaaatgttcatgacgccattgaaggtctgataatttaattactcagttcttttattatacgtatattaaccaataattaggttaacaattataaattctatttgtaggcataggggcatttttcagggacctctgcacaagaacattaacaaccgacggcatacaacagttagacgagaataatcccgatgttactttgtaatttggagaaagtctttccgcctactttttttgaagtgatg

SEQ ID NO: 548 - DNA, 343 bp, Unknown
  misc_feature (1)..( 343): cDNA_ID_1695701_gDNA_ID_1591858_Annot_ID_151612 3000 nt of promoter + ATG
  misc_feature (6)..(6): n is a, c, g, or t
  misc_feature (82)..(82): n is a, c, g, or t
acgttncaggtacgtgagacgcgtgcatcataggttaatagtgttgaatggtgtggatttgatggggaatataataaataancggtcctgctttgtaataaatatggttgtgctgagttcggtaattctgcctaaacctctctacctagttagatgttattgttaatatggcctttgaccaagaacaacttcagccgtgttaaaaaacattgaaaccaaaatcaatggttatataagattaacttgcactactaggatttgatcacagaagaaagaaaggggtttattaatttggttactgtatcttactctttttactttcggataacttcaattggcaatg

SEQ ID NO: 549 - DNA, 524 bp, Unknown
  misc_feature (1)..( 524): cDNA_ID_3057010_gDNA_ID_1591860_Annot_ID_151618 3000 nt of promoter + ATG
  misc_feature (1)..(2): n is a, c, g, or t
nnccttagccctgcaacactcttggaatctcctgttttcctttctaacccattggtaagctacaagttggtttgctttctttcgatgttattatggagctattttttctgaatatctcggtgaccttgcaggctcaaccttctccaactaccgggaaatttccatttcttcctggtgttaatggtaatgcattgtcttctgagaaagcgaaagacgagttctttgatgatattggagcatcattcagcttccatcctgtttcaagatcatcttcctctttcttccaaggcacaacagagatgatgtcagttgattatggtaactacaacaatagatcttcttctcatcaatccgcagaagaagtaaaacctggctctgaaaacatagaacgctccaatctttatgggattgaaactgacaatcaaaacgagcagaacaagacatctgatgtcactacaaacaccagtcttgaaaccgtggatcatcaagaggaagaagaagagcaaagacgcggtgattcgatg

SEQ ID NO: 550 - DNA, 173 bp, Unknown
  misc_feature (1)..( 173): cDNA_ID_1695743_gDNA_ID_1591866_Annot_ID_151626 3000 nt of promoter + ATG
cgaacaacagccaaatcaaagtgttaaccatgagattcttgttaaccaaaagagcattcagaatcttcaacccacgtttccagagactgtggttgacttcttctccattctcctcaacctcagattccggcggattttccggcgattccgagccggaatcatggagaactatg

SEQ ID NO: 551 - DNA, 97 bp, Unknown
  misc_feature (1)..( 97): cDNA_ID_3057058_gDNA_ID_1591893_Annot_ID_151662 3000 nt of promoter + ATG
cccatatgctcgactggaacttaaacgcctttactgaaaatctacttgaaacgataaatcgccgtagtttgtgtttcgatcggacgacgaacaaatg

SEQ ID NO: 552 - DNA, 3 bp, Unknown
  misc_feature (1)..( 3): cDNA_ID_2183387_gDNA_ID_1591899_Annot_ID_151669 3000 nt of promoter + ATG
  misc_feature (1)..(2): n is a, c, g, or t
nna

SEQ ID NO: 553 - DNA, 2630 bp, Unknown
  misc_feature (1)..( 2630): cDNA_ID_1028866_gDNA_ID_1591913_Annot_ID_151683 3000 nt of promoter + ATG
ttctagaatacgcatggrgccwtgcagtgatctctgatcatctttacgactccgcaaaacataactgcgacttcaagtcttcgaactggtcagagccatgcaacgttgctatgaacacagtgttcacaaaatacaaagagattgatatttataacatatatgctcccaagtgcatatctaatagctcatcaggagcttcctacttaggtttcggagtcaataataagtctccggcggttaaagactggttcaagagagtgagatggtttgaaggatacgatccttgttactctaattacgctgaagaatatttcaatagagtcgatgttcgattgtctcttcatgctactacacgaaatgtagcaaggtggaaagtttgcaagtaagttttatgtagaatatatctaagtttcttaattctgtatattaaaaaggttaaaatgttaatctttttttggtttttttctttttttctttttttgtgattaacagtgattcgatattgcaaacgtaccattttacagtctcctcaatgttgcctacttatagtaagctcatcaaagctggcctcaagatatgggtttataggtatactcgacacttctatctagataattggtgttccttttctttcagatatatctttcagatatatagaatgttccaataaccatacatacaaaaaaaactcagtttcgtgattgattgtcgaagaacttttttttgacgttaatatcattagaatttagaaaaaggaaaatgtttggctgttacaaagtagagcctttggctttgaatctttggcaaataataataagatgtttggctgttacaaagatttttttttcaaaaaaagaggctgttagaaagatgaatgatagacatataaccacgagattcacaaagtaaacccaccgaagatattatgataactattattcacccaccaaactcttgtacgtatgtctcttttggatttacatgatctcgttacatataagtaaatatttgaatgattaattagctgtcaaatgaataacctaccgatgtaacccagtgtttgttcattgattttgtatttgacagatactgtcttcatagtctcgaattagttggacggtttagatatccggaaaaccaatgctagatcttttaaaggaaaaataactagtagagtaacaatatctgattttattttccttagaaagttgaaaattgattagttataaatacttattattgtctaacagtggagatgccgacgggagagtcccggtgatcggaagtcggtattgtgttgaagctttagggatttccgtcaaatcggagtggcgttcttggttccacaatcatcaggttagggtttattgtgaaattagctagaaatgtgtgatattttagccaaataagtttatattagtacggttaaagctaattaaagtcttttttgtgtgtgtgtgtattgtgaaggtgggagggagaataacggagtacgagggagggttaacgttcgtaacggtgagaggagctggacacttggttcctctcaataaacctgaagaagctctcgcgcttttccggtccttccttaacggccaagaacttccgtcaagcccctagatactaccactatatcatatagctagtctcttctctctatctttttaccgagtataaaagatacatgcataaataataagtccaatacataatcacatattagttgttactgtctacccaactatgtgagaaatttacaatatataatggttgttttgtttagtgtataaggttggtgaaaaagagagtgagtttgtaatttgtttaagaacaagaatatttctctagtcgtagggatcacaaattttttggtcttggacttgttaattcgtgtgtcttttactttctctctacaacttctcttcctttcttactgcgtgctagacgaagaagcaggaaacactaaaataaaacttctcaaaccatacaaattataagttcaagactttgttagtccaagaactcacaagtcaacgaatcatttgtaaataaaattttagtgggcatttcagtgttacaacttgctgtgttatttcagagtgaagatgaagcaacgatggagatatggttaactagtaagattgatgaagccaatgacgacgacgtcccgtggagaaagttctttacagtgaaatgtaattatacgttttcattttcgatgagtttcatggtggatgaggagaacaaagtggcaatgtgttgtgacacatacatgagaaaagatggtaaaaccaatgtttacttcttgagaaatctgcataccaaccaattagttttgatggggtgttccaagttcggttcaaatcttgtaaaagaatgtgattagtctttatggaaacagaggttgcttacaatattttagtttgactctatatgaatacaaaacaaagggtcttttttgatctattgaaactgtaccgggcgatttgggaacatataaataacaataggggtcaaaatgatattttaataaaagttttcttatccaaaacccaaaaatgtctttgctcttctgctaaaaccctctctccccttcttcttacttcacttcactcgtgctttctccaatg

SEQ ID NO: 554 - DNA, 3000 bp, Unknown
  misc_feature (1)..( 3000): cDNA_ID_1443346_gDNA_ID_1591920_Annot_ID_151694 3000 nt of promoter + ATG
  misc_feature (2504)..(2504): n is a, c, g, or t
ccagcttgtagttggttgataatggagactcctctgataagtccaagctgtttcgtggcgccaccaagcctacaagtttcagtagcataacattcctcactcactgtcttgcaaaaagctcccaagtcctttatctatagagagatagagaaagcacgtacctttacgagttctggagggagaatcaatactaggttggtggtgatgatgatgacgtgaaggaaagtaaaaatggtggaaatgaaaaaagtggtaaagtgcagtgacgcagccattagcttcattggagtttttcttgcttttagaggaacaagtggatcttcctccattgtaccactctcttcccatttctgttaagagaaaagcctgtctctaacgtataatattgacaagtggaaggcgaaaaatggactgacaaaagaagaaagaagaggttgaagaacaaaatctttttttgcaccagcaaaaaagccaaatttgaaattttatgtttttggttcctgacccgagagagctatcggaagctgcagcactgcaactttatctctatattgcattgataatcgagcagagggtggtgacagaaaataattttaaaacgtgacagtaataattaaaaagataaactgtactacaagtaaataaatgcatggtgagatgatgatatttagccacgcattttctttgaaaacagacagcttgagtattacagtatgattccaaccacaccattttctttggggttttcaagtttttgaactttacaaattaagagagaacttaaggttgtctagattttctcttggggattacaattactagaagaatattcttatgaatcgtgagttagtagcttagaaagttacagcttggccattcatgaagggtaagctctacatccacttcacagtggagttcccggactcgttgagcccagatcagaccaaagcactggaagctgttctacctaagccgtcaacagctcagttgagtgacatggagatagatgaatgcgaggagaccacgctccacgatgtcaacattgaggatgagatgaggaggaaggcacaagctcaaagagaggcttatgatgatgacgatgaagatgatgaccatccgggtggtgctcaaagggtgcaatgtgcccagcagtaagtaactccttagagagactttgacccacatgggtttgggctccaaccaatttgtctcttgctttttcattctaagtgtattggagtctttatgggagtttggtacggtttaagaatttgcccacttcggtggaacatcgaaacttgttttctctttttcctctgactttaaaaattaaggccttattacaattttgtgttttttctttatgattaaatttgtagtaatttaatgtctaagaacatatatactgtgtgttttctatattgatatggatttaaaattcaataatttttgtgttcatgcagaacaaatgctgctatatagtctaagatgttcatatttatcctttttgttgtatatgtcaccatgttttgggtgttaactccgatgacatgtacgtacgaactacagtaaaaactctataaattagtaaaaactctataaattagtaaaaaatgtattaataatgttcggacgacgcaattttattaatttatagtgatattaatttattttataaactaatatttattaatttatcttataagttaataaaatattaatttatagaaatatttacgtaaaatataatattatattttttaaaaatgtttcttaatttaattttctatatgctttgttgtttgcatatataattatgtcagctttttatttttctttgacttctttaatttattttttggcaatatcttgtgactgtatatttacgaaattaacgtgaatgtaaacgtaaacataaacatgaaagtttaatccaatttctctttacacaaatcttagcaatgctttctcaaataaaagattttataaaatcaactatgacggatcaaatacgcaaatagttatgtgagtacaatagagatcataccagttgtattttaaaaagagttgtaattgtagcttgaacaaaaattttatataaaattagttttaaaattagcaaaaaaattgtaccaaaccaaaccaaaaattagaaaataaaataaccgaattaatactaaattttataatcaaaagaaccgaactaaatcgataccgaatcaaaatattttgggtaatcgaaaataacagaaataaaaatattttttataactattagttatttctaaactaaataattaaaaatatttaaaaatatatataatagtaaaaatattaaaaataataaaaaatatccgatatatctaaaataaccaaaaatatctaaaatattcaaaaataatcaaaatatctgaaaatattcaaaattaaatagtcgaatgtatattaaatttaaaaccgaaagaatcaaaattaaactgtaaccgaaccaaaatttcaaaatnaatcgaatagatattaaactttagaaaaaaaccccgataatccaatggtttcaaactgaaactgaatagataacatattaccttgcgaaacttccgtaggtcaaatgggcttaagcccatagaaccatagccacacaactgatgtggtggactggttaatgccgcgtagtcagagtcttttctggttttcgtttgaaaaaaacatcatgtaatttagaacgaatagagatagagaagcaacatggagccctggtgctggaagcagctacagctagtttagtgatgagacacgtgcacctaattctaataaataaataaatcaattcccaataagtcaaaacgactaaataaaaaacattttctctgtaaaaaaatctagaaccgttagattgttagatgtgttcagagaccgttggattccatttctttgtcaaaagactcaaaactacccaaaactcttccatcttcaccaaattctctcaatcactcatcaatg

SEQ ID NO: 555 - DNA, 3 bp, Unknown
  misc_feature (1)..( 3): cDNA_ID_3057113_gDNA_ID_1591927_Annot_ID_151709 3000 nt of promoter + ATG
ggg

SEQ ID NO: 556 - DNA, 1898 bp, Unknown
  misc_feature (1)..( 1898): cDNA_ID_1695917_gDNA_ID_1591930_Annot_ID_151716 3000 nt of promoter + ATG
  misc_feature (186)..(186): n is a, c, g, or t
  misc_feature (195)..(195): n is a, c, g, or t
gccccgaaactggagaaagtattggaagaaacacaaagatcacctttcacggcacgcatttcagaagttcgcgtccgacacataacgaaggttaagctggttccctacaacggtctcaccgacccgaagatttttctaaagtctgttagcctcgcaatcaaccgcaatcatttctctccgaagaancgacgcggncagctgccagatattcgtagaaaatctgatcgacgacgcgttaaactggttttcgcgacttgaggccaatatgattgacaactatcaccaacttatggtcgtcttcttgcagcaccattcgatatttatgattaagggtgcctctaatgctgacttgtgactatgtcccaaaaagacaaggagccgttgcgagagttcaacgaacgattcaacaaggttgtttccaatattgctataaccaatgatgccgcaatcgatgccctgcagaacgctgtgtcatacgaatcgcgattcagggaagacttggtaatcacccaaccggcaacactagaggatgccctacatcgcgctaaccgatttatcaaagtcgaagaagaaaaagccgtgatggcaagacgccaacccaaagcctcgcattcaaaggacaaatcatacgacgaacactacgaacctcgtcagcattatgataaggattatagtaaatgagataagggcaagaaagcagcaacttacgcaattggtagttcagaagggcaaccttctaaaccgtggaacaagtattatcgggaaactgataccaaacgtaacccggcctactgcgagttccataaaatctccggtcattcgactgatgattgtcgacaacttcagctcctactcctctcaaaattcaagaaaggcgacctcgatgttgagtacgaacgacgtcaggtagcaacgcacaaggacaacatgtatcacttagttcagagagatgattataaccaacgtaacgagcgtcagcggacagaagagcctcggcaaaacgaatgtgcccgagatgatgattggcgaactaataccccgaaacgaaaccgcgacgagcaacggaatgataacgcccccatccctcagaacaagatccacatgatcatgggtggactaacgacttgccgcgattccgtcagatccatcagaaattatcgccgacaagctgaagtaacacgggattggctcgccaacagtactccaacttttgataacactgaaccgataatcttcactgaagccgacgcagaaggcttgacaggcccgcataatgatccgttagttgtcgagttgataatcgctgaaagcacagtcaccaaagtcctcattgacactggtagctcagtcaacgtcatcttcaaggacgttctgatgcaaatggtggtcgacttgcgctcaaccgaacacaacgttcaacctttaacggggtcgacggcgatattgttatgaccgttggaacaataatgctgtcaatctacgtcggcagaacaatgcattatttcaatttcgccgtcgtcgataaaccgatcgtttataacgttattctcgggaccccttggttacataaaatgaaagcagttgcgtctacctaccatcagtgtgtgaaattccctacaacgcatggaatttatactctaagaggcgacccgcttgttgctcgtatgtgtttcatagtcgagcgtcaactcagaaatgctaaagcttttatgataactgaacccactccttcacttgatgaacgcatagtaccaaggactgaatcggtaatccaagttaacattgacgcaattaaccctcttcgatgtgttggtattcgcgctgatttaccgcaacaattgaaggacgagctcgtacagtttttaagtcagaatgtcatgaccttcgcatagtcaatg

SEQ ID NO: 557 - DNA, 3000 bp, Unknown
  misc_feature (1)..( 3000): cDNA_ID_1695956_gDNA_ID_1591939_Annot_ID_151733 3000 nt of promoter + ATG
ataagatggataagaaacccagcaagatcatgtgggatgtgccttgggaggaacttatggcgttggaattggcaaaggcaggtagccaaaggccctcgcatctcatactgcatctgaagagttttcggaagtcagagagttttgctcaggttataaaatgcagcgtgccagaagacttaaatggactagaacctcaagctgtccgaatctgttcagtagtgcgcaaaatgtggaaagcatatcagtctaacatgaaaaatcttgtgctcaaggttattgctatcactattctcattatagttatagaattgataatttggctatgattcaagtgaaatttacatttgaaattactactcccaagatgctttggtcttctattttatagtaaaaatataatgagaaaacatgttttaagttttctggtttatattccacataacttactaaccagtgtaaattatgcatatattgaagctcataccagtgcaacacacctaatgaattttctttcttctcattgcaggttccttcaagccagagacatgtgtattttgcttggaatgaggctgatggaagagactcaaaaacatacaaaaacaaagctattattaaatcgagagaactttcttcttcaagctctgtctcagatgataaaaagcttgtcaaacatagtatcaacttctcaaaaatctggagtagtgagcgagaatccaaaggtcgatgttctttgtgtaaaaagcaggtaagttcctttccatcgcaatctatatctttgagcttagaaaggggtttccctgttagtacagaaaatttctgattttcttgccttctagattttatttcttttgatgacactcgaaaattttgggttctagcctaagctaagaggtggagaccaggatcaaaatcttaaacccttgtcatcaatacatgtcaataagaatccttgatttataactttatgagacgaaacatgtataattcaccccccacatcaaccgttttgaggttttctttacaattatttcctttttggctttcaggattctgaagatggaggagtttgcactatctggagacccagttgtccagcggggtaagtatagccaaaagagatttaaaattccaaaaatctagtttattatttcttaacttggttatttagtaccctaatggtgatgctgtagctgcattgagccgttgaaacttaagcagtttcgtcattgttgtttgccagattcgtgtcagtgggtgatgtagctcacgttggtagccatcccccaaatgttgctgctgtctacaataacaccaatggagtgtttgcacttcctgtgggttatgaccttgtaagtatctctctaacattttatttcaaccgtaatccgttgcatttaaccgcacagtattttcaaccttgaactcatcgtatgcattaagtgctcagcatccaaattttgagcaaacgcaaactctatcaaacctgagtttgtgagttttagcatgatacatatatgtttattcacttgtcaggtgtggaggaattgcttagatgattacataagtcctgtatcgatctggcatccacgggctcctgagggattcgtctctcctggatgtgttgcagtggctggtttcatcgagccagagctcaacacagtgtattgcatgccaacgtctttggccgagcagactgagtttgaagaacagaaggtttggtctgcacctgactcgtacccatgggcttgtcacatttaccaagttcgaagtgatgcactccactttatggctctgcgacagaccaaagaggactctgattggaaagcaattagagttcgagatgattacaggtccatagaatctgaatcgggaaagaatttgcgtttagaatgaaacttttcacttctttttttttgggcttttgggaaactattacttcatgcaacgaagtagacttgcacacaaagagagtgtttttttgttggttttttgtttggcgtgaaaagagagcttttatgttgatattttttgtacatttgtggataaaattacttgtgctttctaggaaggatgtatctgtacaagttattattattacagaaatttgtcttagtcttaataataataagattgttagaagattttaatttataattaagaaaacagaagactatttctaatttctttttattgttttggtatattttagctcacatctttttttaatcattatatgtaaaaaagcttgaaccaagactagttggtaacattcagagctctctactgattgagtaatttcgattactgaacagaagtatcaatatcgtgtggtgctctacacaacacaattgcgtctaatattataagattgttaggttgatttttaattattacatgttgattgttgataaagtttaaaagcctttagttgtggcgggaacgtgcaaagcttaatacacgaccaatgcactactagagcttaacgcgctactttggcgagtcaattacatcgctcaaatttacatcttgagagtaaacggcccgcgtggacggaattttaggatcaagatttacagagacgagtcttatgattcattgagtcaactctcttgcatctaaaatgagaaaacaatattttagattttgtttttgattatagaaagcaggttgatcactatgtatatatatttctctatattaccctccactaaaataactgaaaagaataatcaattttggccataaccttctttttttaactaaaatttacgaatcaactattatttgtcggtaggagcgaaaaaccgttatgagagcatagtgctactagtggatcggtaaacaataaatgccgtaataaagaaatctaaacgtcacgcgcgtgatgaaaaaacaggaagtaaatcgtcgacgtcgttattcaactaccatttctggatcacaactcccacacactcttttaaatcaaaacaaaatatctctttcctgttagagacaatg

SEQ ID NO: 558 - DNA, 234 bp, Unknown
  misc_feature (1)..( 234): cDNA_ID_1695975_gDNA_ID_1591948_Annot_ID_151741 3000 nt of promoter + ATG
gattcagctrtaataaatgaacgggcatagatcatctttcatctaaaaattggaaaaatttttcttggtaaaaaaaaaacaaccgaaagtgaaaaaaaaagagaaaaacccagaagtcaaataacgataaactagtggtgactactaaaactcatattatagcttcggatcaaatcccagatctcttctcttcttcttccacatttacacaaaaaccctagatccacaacaatg

SEQ ID NO: 559 - DNA, 492 bp, Unknown
  misc_feature (1)..( 492): cDNA_ID_3057138_gDNA_ID_1591950_Annot_ID_151744 3000 nt of promoter + ATG
tctctgcaaaaaaaaaatccttgggaacaccaaacgacatcaaaaagctgtcgtttcatatcctctcagatccttaaattctcttccactccaaattctctggggaaaggtcaaacttttggaattctctctgtctccgacttttgttcttcctctccaaattcatctgtaagtttctttactgtaataaaatccagatcgatcacttgtgtaatgatacggacattcatgtacgaactactgttttgataaatgcttttaggtcagatcatctttgttattgcaaagtcttagattttttcttattacacgttaattgtggtttagctttgcattatcttaattaatcagttgttattgttaaaattaaagaatcatttaattgttcttgattttgattttctctctttgaatttgttatactttcttctttaacagattggattgaagtaagttagtgatgcaaattctgagtttttcgagtttagtatg

SEQ ID NO: 560 - DNA, 1721 bp, Unknown
  misc_feature (1)..( 1721): cDNA_ID_3410213_gDNA_ID_1591956_Annot_ID_151750 3000 nt of promoter + ATG
aaaaaaaaatcacaatctctatgaaacaaatctcatctttcgaagaagataatgttacaaaagacattcaaacagaaatatttgtaatccttctaaaaaactgacattcattgtaatttcttattactgtggatttattcatattctgtcgattagtgactagtgtttacataattatgaaatacgtgactaaaaataatatagttaagagagactacacaaaagtacactaaagtaaaaaaacgacaccaagtcttatgtactgtaaactgcacgccgttttcagctatcttaaacgacataaagttttgccttaaaccctaccatcgtcactcactctgtcctcgataggtttagagaagaaatagattttgatcgatccttacaacaaaaatgaatttccgtaatctgattgcttccggttctcgcctcggcaagaggttctgtgcaacggtatttgctccggcgtcggcgactggcatcgtcgaagcctctgtttcttctccagcggcggcgaatgtcgtcgaagcctctgtttcttctccggcggcggagaatggcgtcagaacctctgttgctgctccgacggtggcttcaaggcagcgagagttgtacaagaaactttctatgcttagtgtgacgggaggaacagtggcagagacgttaaatcagttcatcatggagggtattactgtcagaaaagacgatctctttcgctgtgctaaaacccttcgcaaattccgtcgacctcaacacgcttttgaggtccctcttcatatctcttaagcaagtatctgattttaacattgaaattggagatatttcattatctatggaaaattactcttaaaggggctggctttagatttagggtttagtgatttcactagttttagggtgtaattagggtcatgctcgttgttgaatgaaatttcacttttttcgaatggatagagattaaaaatggcatttttaagtttgttagagtttgattgagtccattgttgatgaaatttcagatctttgattggatggagaagaggaaaatgacattttctgtgtctgatcatgcaatttgtttggatctaattggaaagactaaaggtttagaagcagctgagaactactttaacaacttagatccttctgcaaagaatcatcagtcgacttatggggcgctcatgaactgttactgtgttgaacttgaggaagagaaagcaaaggctcattttgagataatggatgagcttaactttgttaacaattcgttaccgtttaataacatgatgtctatgtacatgcggttgagtcaaccggagaaggtacctgtgttggttgatgcgatgaaacagaggggtatatctccttgtggtgtcacttactctatatggatgcagagctgtggaagtttgaatgacttagatggattagagaagattatagatgagatggggaaagacagtgaagctaaaaccacttggaatactttctctaatctggctgcaatctacactaaagctggtctttacgagaaggcggattctgcactgaaatctatggaggagaaaatgaatcctaacaaccgtgattcccaccattttctcatgagtttgtacgctggaatctcgaaaggtcctgaggtttatagggtttgggaatcgctgaagaaggctcgtcctgaggtcaacaacttgagctatctagtcatgttacaagcgatg

SEQ ID NO: 561 - DNA, 514 bp, Unknown
  misc_feature (1)..( 514): cDNA_ID_1695999_gDNA_ID_1591960_Annot_ID_151757 3000 nt of promoter + ATG
aaawatytytcmcagctcaaaaaaaaaacagtagtttacaaaatactgtatgcggttctcaaaaattgatatataaaaggacaaaaaataatgtgttacacgaatatattttgttttgctctagagcgaattgtactatactaaaaaaaaacacataagtatgctagaattattaaaaagggtccaatctagtttttgtttgcttcgtacaaggtcccagaatgttttaggaccgagtgaccgaccaagatggattcaaggacagtattacatggctttatgagatataaacatcattacatcaaccaaaagttgagaaataatatagtattatttcaactttgaaattgtatgattcacatttaacacacacaccaaatacttttgttttgttatatacacggagagctcacgtacctctgattcaacaaaatacattacggagcacacacgtctgtgtagctctttctttcaacattttctaccttcttgtcaaagaaagagagacacaatg

SEQ ID NO: 562 - DNA, 1008 bp, Unknown
  misc_feature (1)..( 1008): cDNA_ID_2178651_gDNA_ID_1591961_Annot_ID_151760 3000 nt of promoter + ATG
  misc_feature (9)..(9): n is a, c, g, or t
  misc_feature (18)..(18): n is a, c, g, or t
agaaggaanctgtttcanaaggtagacagttgagaagcagtggtaagaggaaaagacgaggtaataatgtttcaaatctatttacctcttgactcttgtaataatatctgttcgataagataaaactaaatttgttgattgatgtgtgcaggaagaaagtagagtttgaaggtttaaatgggacttctagttctatggaaggagtgggaagatgaactaaaacttagcataacagctttttgcgagttttttggctgaacagtgaagttgtgcaatgaggggattgtttttgtgtcttgttatggagacaaacatggaacgttacggctaaatattttgattttggtaactacgattatttcatgatattttatgatttggataagggaaagagaaacaaactttaagaaaaaggttgaaagagaagtcccaccaaaccaaaaaataaatcgtaatcacacaaaaaccaaaaaactttataaccgaactaaaccaaactaaaccagataactaaatggccacctacagatttgtgtagtggaatttaagccattaaaaataaacagttttaaaattatgttgataaaccctggcttgatataataagataagggattgaagacataattcgttgagaattgacgcatttaccccttaatttatgatgtgatcaactaactaattagagcccaattaggattgagaaccggtttttgagtaaccggtacaataatagatccggttaaggaagaaagaatagaaagagacggcacttattcctccacacggtaaagcaaaagcccgtaggacgaagacgacgacgacgaaagtctactcaacttttttgcttccttctgattctctctctctccgcaatccaatcacgagaaaccttcacgtcaccatcccttagaaaaaccctaaaatctcatcaaatcccaaaatcagggtcttcgactagagattctctaatcccgcaggggaagggaacaacaaacaaacaagatg

SEQ ID NO: 563 - DNA, 3 bp, Unknown
  misc_feature (1)..( 3): cDNA_ID_3447798_gDNA_ID_1591976_Annot_ID_151782 3000 nt of promoter + ATG
car

SEQ ID NO: 564 - DNA, 335 bp, Unknown
  misc_feature (1)..( 335): cDNA_ID_1696097_gDNA_ID_1591979_Annot_ID_151789 3000 nt of promoter + ATG
tggaatcaacattggatagatcaatcaatcaagaacaaaatattcaaacagatacttactttcccaaatggggttttaagctccagaaaccaaaagaaccaaaaataaattaacatccagttaaaaaaaaaagaagctttaggtgagtttgcttcaacatgaaacaatggatgcccaaaaaaaaagcctaacattgcttgttaaagcaaccaaattttctatgtttgttttttctaatatatttacttcaccaatcaccaccacaacttccctcactcttcttccaagtgaagttattaaccaaaattacagataggaagaagagtgctgcaatg

SEQ ID NO: 565 - DNA, 292 bp, Unknown
  misc_feature (1)..( 292): cDNA_ID_2187093_gDNA_ID_1591980_Annot_ID_151792 3000 nt of promoter + ATG
atttggtacttactacataaataatagtgtagtgccaaattaacagggctaaaatggtaattagtcactgccttcttcgtcttccttattagctttatcatcttctccaaacaaaaaaaactgccccacacgaattacacacacacaactttattatctgtacacgtatatgtgtgtgtatatatatatacatactcatccacaaaaactcgactgattgatttctccatgaacaacgtcctcctttgatttcacctttttttgttgtcttcttctttcgaaatcaatcatg

SEQ ID NO: 566 - DNA, 2640 bp, Unknown
  misc_feature (1)..( 2640): cDNA_ID_1696171_gDNA_ID_1591995_Annot_ID_151814 3000 nt of promoter + ATG
  misc_feature (99)..(99): n is a, c, g, or t
cttctggawcgttcagcatgaaaccgatmttaagggtttcgtccttaaacctcacctccgactcactttcttccgtactatcaatctcttctcaaaggncccattttttttttttttattctgcgcgcttcttctctcttgttatgcttctactgaatttcccaatttcgtctcctttaatccttttttggcattggctaaaaaagttccttttttctgtggattacgggtttttttgaattttttaggttttcgcttgattgaaaaatcttgatttttttctatggagatgattgtaatgcggtttagggttttgcagtttggagcgtacccggtttttgtggttgatggaacaccatcacctttgaaatctcaggcgagaatctccaggtttttccgttcttctggaattgatacttgtaatctacctgtgattaaagatggtgtctcggttgagagaaacaagctgttttctgaatgggttagggaatgtgtggtataagatggctttcccttcaaaccttaatgcttgttttgtttcacattgttttcttatgactttttttggttctctaggagctactcgaattgctcggtattccggtgctgaaagctaatggtgaggctgaagctctctgtgcacagttaaacagccaaggttttgtggatgcttgcattactcctgatagtgatgctttcctttttggtgctatgtgcgtgatcaaagacatcaagcctaattcaagagtaagtattcatttgtaactgagtattaccctgactcacttatcgtctctttaccatcttaatttccttgtgtgcaggaaccttttgaatgctaccatatgtcacatatcgagtctggcctcggtttgaagcggaaacacttgattgctatttctctattggtgggaaacgattatgattcaggcggtgttcttgggattggtgtggataaagcactgcgcattgttcgtgagttttctgaagaccaagtacttgaaaggttataatccataagctttttgtctctgctttttggtgactggtcattttcttgaatgtgttgggatatatattttcgtgcagactacaggacattggaaatgggttgcaacctgcagttcctggtggaatcaaatccggggatgatggtgaagaattccgctcagagatgaaaaaaagatctcctcactgttcccgttgtggacacctgggcagcaagagaactcattttaagtcctcttgtgagcactgcggttgtgatagtggttgcattaaaaaaccattagggtttagatgtgaatgctccttttgttccaaggatcgagatttaagggaacaaaagaaaaccaatgattggtggatcaaagtctgcgataagattgctctagcgccagagtttcccaacagaaagattattgaactttatctatccgatggtttgatgacaggtttgcactgactttatgacttcgtgtccgtattgcatgatcattgttctgaatcctaatgtttatgcacctctgaagcaggagatggatcgtcaatgtcttggggaactcctgatactggaatgctagtggatctcatggttttcaaactgcactgggacccatcttatgttagaaaaatgttgcttccgatgctgtcgaccatttatctgagagaaaaggcaagaaacaacacaggatacgctttgttgtgtgatcaatacgaatttcattcaatcaagtgcataaaaactagatatgggcatcagtcctttgtaataaggtggagaaaacccaaatctacaagtggttatagtcatagtcacagcgagccagaagaatcaattgttgtattggaagaagaagaagaagtggtggaagaagaagagtctgttgatccgttggatggtttaaatgaacctcaggtgcaaaatgataatggtgactgcttcttgctaactgatgaatgcataggacttgttcagtctgctttccctgatgaaacagagcattttctacatgagaaggtaatacattggatctctcagtctctcgctatctctatgagatgccttttcttcccttagccttgactgtttatgtttgttaaaactctcagaaactgagagagtcgaaaaagaagaatgtttctgaagaagaaacagcaacaccaagagcaacaacaatgggtgtacaaagaagcattaccgatttctaccgttcagcgaagaaagcagcagcaggtcaaagtatagagacaggcgggagttcaaaagcttctgcggaaaagaagagacaggcaacttctactagtagtagtaaccttacaaagtcggtcaggcgtcgtctcttgtttggatagaacaatcattcttgagtaaatcataccaattttttggtctgtatataaaaaagaaaaaaggaagtttgcatttttcttattaaaaaattgcaaaaaacaattggtgctgcccaggatcgaactggagaccttttgcgtgtaaggcaaacgtgataaccactacaccacagcaccttgtggcattatctatagagatacgtaatataacgttactgttattctaaaacaaaaactgattccattagtagagagagcagaagaagtttattggtcttatcggaaatg

SEQ ID NO: 567 - DNA, 286 bp, Unknown
  misc_feature (1)..( 286): cDNA_ID_1696175_gDNA_ID_1591995_Annot_ID_151815 3000 nt of promoter + ATG
  misc_feature (99)..(99): n is a, c, g, or t
cttctggawcgttcagcatgaaaccgatmttaagggtttcgtccttaaacctcacctccgactcactttcttccgtactatcaatctcttctcaaaggncccattttttttttttttattctgcgcgcttcttctctcttgttatgcttctactgaatttcccaatttcgtctcctttaatccttttttggcattggctaaaaaagttccttttttctgtggattacgggtttttttgaattttttaggttttcgcttgattgaaaaatcttgatttttttctatg

SEQ ID NO: 568 - DNA, 291 bp, Unknown
  misc_feature (1)..( 291): cDNA_ID_3038039_gDNA_ID_1592000_Annot_ID_151825 3000 nt of promoter + ATG
gtcagacactcaagtttgattctggaatatttccgtagaacaacttgtttgtccccatgatgctcgggttgttttgttagtttgtcttcgtattgtagtttacatcattaaaaaagtaggcaattcatgtatattcctccactctcagtgtatacctgaacaaaagactcttgacgacgaaaattacgttgttttctgttataagcagattgatttcatggcatattgggtgttagagtttacagcttaatgctagagtttgtttgcaggaatacaggtgagttcatgatg

SEQ ID NO: 569 - DNA, 1887 bp, Unknown
  misc_feature (1)..( 1887): cDNA_ID_3057206_gDNA_ID_1592003_Annot_ID_151830 3000 nt of promoter + ATG
taaggacatgaaaccgaaagacttaactgaaccagagctggtttagtagtagttaagmggtttaagtctttgtttaagacaacaagaaatattaaggcttatatgaatttaatcttttaccaaaaataaaaagaggcttatatgagccttgccatgttcatgttgtgatcattagagatagatatcttgatcgtgaatctccaaatatgttagcgctcgaaaaatcttaaatcttgagatagtgaattgctggattccgttctcgctgagatataggatcaatcacaccgattgaccttaactcgtaaacatcgtgcgccatcatcgtctttctttattctgtttcttcgtttatgttctgttcctgatctcgagtgacttgattctcttcgatcttctgtgacaatacttgatcaaagactttttcccatagaagatcaacctccagttcacaaacggaagaaagaagtgatgatgaagaaccagtcaatgatcaagtccaaatgtatcaatggtaatgggattgtgggaatagtagtcacaagaaaaatcataatagatataactggaataattatcaattttcttctgctcaaactccttacaaactctctagaaagcataaaaaattaaagataaaaacctaaatttttttaaaagaactacttagaagttttagatattttttattttttttttgtctgcaggaggccccacagaactggttttactctatttgaaggtggtggagctgttgatttgagaactgcatttttattctcttcttttttttactaatatggttaagtaagtacaaggtgccatgaaagtcaaacgttgaattatggggactcctaataacacatgcatttccaccaatttccctgaaaaaaatacattagatatgtaattttataatatgcagcatgtcgtagagttttgtttattctttatgcaacaggtagtagagctttgtcttctattctttttatgcaacatgtcatagtgttttgtttactattctttttatgcaacatgtcaaagacttttaaaaaaaaacacatattttcacaagtgcaaatggcatctatcgagattgctattattattagatttttgactttatagagttaattgtatatttttgaagatgcatggtaaactactaaacttataaaaaaaagatggcttaaatatcaacttattaaaaggtttattttcatagtaagttgatatttaataactaaagagcaagcctttgacgaacctttgacgaagaaaaaactaaagagcaagcctgtgtcttcttcctaaaggcgacaacgagagagtttcttggcgccttcaagaggtaagtcacttttcctttttcgtctttccttttgctcatattaatttctttgtttttggtgaaagatatctctatttttctctcgatctccggagtcttgctagttaaactgtgttcatagtctggatctagaaagagatacagattctgggtacgcttgaagatatagtgtcaatatttattaaagaaagttaattataattgtgtttagagatgatttctagctattcgattagatcgcactagtattataacatcctaacaaaaatttattgctgtcttgatgctattgtcaatttgtaaaccctcactatgaatacacatatataaaggagttcagagttcaatattgtttgtattattgatcacgatgaaatgcgtacaacatcttttaaaatttaatcgaatcatgaaactccaatattgattagttttacctcttcgaacttatattatttacttcttgcgataataacatgtttttcaatagtaaacttaagtcctattatcataatatttaagcaggagccagtatg

SEQ ID NO: 570 - DNA, 23 bp, Unknown
  misc_feature (1)..( 23): cDNA_ID_3057218_gDNA_ID_1592007_Annot_ID_151839 3000 nt of promoter + ATG
gtctggtcaaatgatcgaggatg

SEQ ID NO: 571 - DNA, 284 bp, Unknown
  misc_feature (1)..( 284): cDNA_ID_3599763_gDNA_ID_1592018_Annot_ID_151852 3000 nt of promoter + ATG
aaaaaaaatgttctgtggcaatgtcgttggttcttgaaaaaatgggcttacgacacaacacagttaaacttaatgggctttcgtggtttcaagtcattttaagattttaataatataatactttaatggaaataatgtcagccgttggatcgaatcctgaacttgatcaattgaacaacaccgcctttggaaatttgtttctctcttcaatgcgataattctctcttcctcttcgaattttgtgagtttcttcgagagttgaggaagagagactcgagaatatg

SEQ ID NO: 572 - DNA, 1747 bp, Unknown
  misc_feature (1)..( 1747): cDNA_ID_1696402_gDNA_ID_1592038_Annot_ID_151886 3000 nt of promoter + ATG
gtgagactttgtgtcattaggttaatcggttaattcatacctatagaatttcattatgtttaattcatacacactttatacgactctgctaaatcatactttcactcaatagaaatttaaattacatacttgatcttgtatttttgtgcttgaatgtatttacaaactaacactgttactttgccgtcaaacgacgatgacgtggaatccacttatctatgtcttccatgtctattaaaagtctgtgtatgcaatggtcatcgtagttttaatgagatcgtaatgaaataacctcattattaagagatgtttgagattacaagtttaagcctaatatccagaattgacaagataattagaagcctaaaccaaaaaaactttaaaaccatcttcaagcactaaaattcccaaaaagttttatacagcaaaaacttttataacataaattgaaaccataatcaacaacagtcacaatcacagaacaacaaatcgaataagaaaacttatcatgatcaaacaacttatcatgaagagacaacttaaattgaacacaatgctaaagacatagtaagcattaagcaacttacactatctccgaaacaaaaattaacataacaagaacagtgacaacaactttaacaaaacgacaatagtggcaacaacttcaacaaaaccaaaacagtcacagtaaattaatcaaaaccaaaacattcatacattttacaatcaaagaatcacagccacattagaggactaacctgtcgtctgagtacaacaaagccaagcttcagttccaaaatatttcaatcaccaacacttgccaaaaaaaatgcagaatcagtataagacaatacaatgtagctttaaaaaaaaatgggttaacaaatcgattatgagaaatctaaatcacaaaacaagatctttgtgaacagaatgtggattaaaatggtaaacggacatcaaaatcgtagaagttttctctttaccctaaatttcaaacaaatcaaagaaccgtaatttcaaactaatcgaagaaccctaatttcaaaatgaaaaacaaatccgattatccttacaaatctactgaactaggtcgaaattagagacaatctcaaccaaaattcaataaaaatagaacttatggaaacgaggaaagacatgcctcgattttagctcactgacagctgttgcgcatgagaatcggactacgacagagtacaaatccgacctttatacgacttagaggtttgagtatgagctttgaggttagagatttgagctaaatttgtgataaatctgagttttgtcgaatagaaattttgagagaagggttttggttagtgtagttgagactgaagaaatttgtggttagaaaaatttctcgagacttaagaaggaaatgaattactgttgtcgtgctaaatggtttttttggttaagtgttggcagattaagtcattttagattcccgctcattaaattcctatcatagcgtttattaaccacctatgactcaatcaccacctaggatgattgcaagaaggcttttctatcaaagttcttctccaatgccagaactgcaagactcagaaatgagatttctggtttctcacagaagactggtgaaagcttctgtgaagcatgggagcgtttcaagggttacaccaaccaatgccctcatcatggctttactaaagcctctctgctcagaactctttacagaggagtcctaccacgcatcaaaatg

SEQ ID NO: 573 - DNA, 204 bp, Unknown
  misc_feature (1)..( 204): cDNA_ID_1696416_gDNA_ID_1592044_Annot_ID_151891 3000 nt of promoter + ATG
gttgatttactaccttttccattcatttaattcattaaaaattactaagtctctttatcaaaatacatctttatacaaacacttttttattgaaactttaattgccatctcattatttaagtaagacaacacgagctctatctacctcatcatctagacaacaaaaaacaagaacatacagaaatttcacttgttcgaaaaatg

SEQ ID NO: 574 - DNA, 285 bp, Unknown
  misc_feature (1)..( 285): cDNA_ID_1696434_gDNA_ID_1592049_Annot_ID_151899 3000 nt of promoter + ATG
cttctcaaatttccatttttttcttaatctctcccactcccacccataaaattagtttkgtctttctttccccaaaaatctttacttaaaatctttttcacccttttgctttaacttttgtttgctcctcctctggatcgtatcagtaaactggaagaagaaattgtgagaaaaaatggagaaaaccaagatgattacgtctatgacctgttgaagaaaccctactcagaataagagtaaaactctgtgatttttctgactaacagagagagagacacctaaatg

SEQ ID NO: 575 - DNA, 44 bp, Unknown
  misc_feature (1)..( 44): cDNA_ID_1696439_gDNA_ID_1592050_Annot_ID_151901 3000 nt of promoter + ATG
cttttccaggtggacccaagtttgaacctttgtaccgtgatatg

SEQ ID NO: 576 - DNA, 41 bp, Unknown
  misc_feature (1)..( 41): cDNA_ID_1033422_gDNA_ID_1592082_Annot_ID_151932 3000 nt of promoter + ATG
attggcatctgaagaagaagaagaagaagaaaggagccatg

SEQ ID NO: 577 - DNA, 1775 bp, Unknown
  misc_feature (1)..( 1775): cDNA_ID_1696594_gDNA_ID_1592089_Annot_ID_151948 3000 nt of promoter + ATG
gccgccatctaacagaggagtgtaggaggcaggttcgtcaatagaatcttccaagatttcgtcagaacgtgaacgttgcttagctatagcaggagcctgtaagaagctatttcgtaattctggatcacgtgaacgttgcctagctaaaagaggaggttctaagaagctattccgtaaatctgaatctgattgacggggaaatggagagtctataatagaagctcccagcctatagatctgaaaccataacagagaggacgatagcctcacaacgaacccagcaatttccatagccagggtgagtttcacagagaagatgtaaaagacttgatacatatcagatgaaatgttcctgcattaacaattaaatcttttgtcagttataggcagcagatgaatactggctcaacagaatctaaacacgacatagcaaagatttgcaaaaaaaaaggtttaaagatcaatcagttcaaaaagatgatgagccaatcaagagaaattcaggacagtttacaatatgtgatgcaatgaaaattaaacaagacagagcaaactcttaaaccaaatatttgatcatgatcacaagcacggctgttccaaggatagtgacataccaaatctctttggagaagagaatgaaccatgagacatcaagaagaatggcgcagaaaagaagaaccgcataggttctgccaagactttggctattactctcgattgctactaacccaaataacgcaatcgccaaatttatcagcacgactccattgtacaatgcccctagtgaaccgatcaacgcgcaccctatctgaaacaaatgattcatcaatatgagtttcttgcacttctaaccacaattaaaagaataacaaacaaatatcgacagagaaatcgtagaaccctaatcccaaacagatacgaacaattcacgagaaaaaaacgtgaaatcggaggaaatgaaacaactacaaagcgattacggatttacctgagcatagataagaatcaaaacgacagattggagcctaacgtagtcgcgaagccaattatgtattcgatttcgtaacgaaacacaaagcatcgtaaaatctcaacctcgcagctctcgttacttgttacttcaatggactttcataatacaaaatggctcgacgattctgatgctaaattgcaattttccggcgaacgaaatcggtgaatcaagagagaacgacgatttgagaattttcgtgagggagaaagtaaagagtgtctttggcgggatcgcgttgcagaagaggcaacaaaataaaaaaatgaggaaacgaaatattccgttcaatcgtgacgaagttattataagatttaaggaggtttccgtttcttgtccagagtgacggacgcttaacggagtcacgaaattttgggccgtattggaaaatctttaaaagcctaatcaagcccaaaacctcagaccggttaatatctgaacataaccgaaaccggttatttcggttagcgattttcgtttcaaaaacgacgccgttaattccttacatgtcgactactcatatgtgtcgcccagatttgaagatcggagatatgaatctcttctttctctggatttgaaagttcgataaaaatctactgatacatcgacttctggaagcgatctcgatctctctaggtttgtgattatctttgaatttgctgattgtttcgttaggcgtgaggaattgttcgattgatttttttttccttttgtctccggtagaattgtttcgacgacgaagatg

SEQ ID NO: 578 - DNA, 651 bp, Unknown
  misc_feature (1)..( 651): cDNA_ID_1689767_gDNA_ID_1592093_Annot_ID_151958 3000 nt of promoter + ATG
  misc_feature (17)..(17): n is a, c, g, or t
  misc_feature (27)..(27): n is a, c, g, or t
  misc_feature (33)..(33): n is a, c, g, or t
atcgatgtttatttcanatttataaanattgtnttaaaaaaaaaattattggccgtctcggcggcaagcagagagagagagactcaacgttttcgtaacaacaaaactttgagtagcagaaaattatccaaaaaaaaacgtgaaacgcaaatggaaaaaattgagaaaagtaacgcgagtccagtgccacgtatgaaaaaaagagcttaggaccagatacgttaatcagaaaaagaccaggtacgtacgttaattaatgtttttttaaaaaggccaagcacgttagtccagcccacgtggtatttcttatcttaacaacaaaactaattttttaatttaataatcggacgttgcagaggtaatcagatcaacggtagagattacgacacgttatatcactctgcgaaactccaccgctttctggaattaaaaaaatcagagtgtataaataaaagagcagaggtaaaagctatctccagagtttaatataagtgtagacagagagagagagagcttctttcttcttctcttcgtcgctaagagatgatcttcgaatataaatctctgtaaggtttgcgaagaccggagtagtgaatctcggaattgttgaagaagacggtacaccggaatcaattgcgattttgatttatg

SEQ ID NO: 579 - DNA, 98 bp, Unknown
  misc_feature (1)..( 98): cDNA_ID_1689783_gDNA_ID_1592099_Annot_ID_151966 3000 nt of promoter + ATG
ccaccggttcgtctctgacattttgtgcttgatttggccgttacaaaattctgattgctagttcatgagattcctttttgacaggtgacataaagatg

SEQ ID NO: 580 - DNA, 136 bp, Unknown
  misc_feature (1)..( 136): cDNA_ID_2918666_gDNA_ID_1592100_Annot_ID_151967 3000 nt of promoter + ATG
cactagacggtgaagatttgaagtgagagctctctttgcattgctcacccaccaatggatctacctacccttcttcttcttctcctccttttaaaccctaaaagtttctctttccttcaacaacgccacaatcatg

SEQ ID NO: 581 - DNA, 44 bp, Unknown
  misc_feature (1)..( 44): cDNA_ID_1689794_gDNA_ID_1592101_Annot_ID_151970 3000 nt of promoter + ATG
gcaatgcaaattctgtaaaagaacttgtcaataacgaagccatg

SEQ ID NO: 582 - DNA, 912 bp, Unknown
  misc_feature (1)..( 912): cDNA_ID_3052886_gDNA_ID_1592113_Annot_ID_151985 3000 nt of promoter + ATG
  misc_feature (1)..(1): n is a, c, g, or t
ngaagattaggaaatgacactagttataggacgattccaaccttgagcagtggggcgggagttgtagtaacctgtcaaccgcaatatatagcctggtgctcaaaatgagacttgaactaatactaataaggggaatttggatgttcaaaggacttaaccacgattgatgactaaacaaagcagtggttagctgaattactaactaactagagctagctgcctaggctagtcgaaagaacaattctccgttttgagttgaccataaaataataatattcaacaatattggaggaaacatgtttatatgttcttgtaataataatattatagcaaatagccgaagatacgacgaagcgtatatgtgtgaaatgagtatattctacagcctaaaccctcggagataccaaatcaacacgacaacagcgacgggacacctgtatggttctaattcaacttcttgtccacatcttcttcttcttcttcttctttttttaatagatatattaagaaaacaaaacagaaaatctcccacgtctttacaaagaaaataaagaagaagaaaataaggaaaaagaatctgatagtaattgacaaaaataccctcatctcctacctcaagacagtaatatatatgtaacaactcgatacagagcatggcttatctcttatccgaatcctcccaatttgtctgtctctcttttgttttctctgctaacagatctctctaaatatctgttacttttgttcatatctttttacttttcaaactactaattttcctttcgcttcttctattaataacaacactctctctctcagacttcttttcttttttttctacggcgttgattcattcgcaatgacctcagtttctgtgtaccataattgacctagcagattctgtttttaatg

SEQ ID NO: 583 - DNA, 2157 bp, Unknown
  misc_feature (1)..( 2157): cDNA_ID_1689853_gDNA_ID_1592122_Annot_ID_151995 3000 nt of promoter + ATG
  misc_feature (1428)..(1428): n is a, c, g, or t
  misc_feature (1570)..(1571): n is a, c, g, or t
cctcatcaacaagggtatatattgctcaacttgcttcgtttgtgtaaagtggattcgtttcgtgtcagattttagtttcacttcagaatattcacgtaacatttacagactcatagggtaaaattttaagaaagctaattcatatgccattgtagaccagcgcgaagaaaacaatttaataaaacaaataacatgatatgatattatataatattcatctagatcttcatattctacatgaaatatgtggttaggtagactcgataacaaaagaaattgaaataaaagacacttttttcaaatattttaatgggagaacaaaatatcatgttatgggttgtttttggcacaaagcaagaaagttgcatcctcaataaaaacagatctcagacattttgggttcacatgatcctctcacatgcttcctctcacgcatttgaacactcttgactctaccaaataacccactccaatggcatgttaatattttatgaatcacaaccaaacatatatcgactttaaaaacaaattagtatcttactttaatgttagaaagaaaaacttttcatataagagatacacttttttcttttcgtattaaagataaaagtagagacgtatatcaaataccaaacccaccactcatacacattaaagtgattttggtataaaaactgttatcagcttctttgtaatatagctctttgttggttgtaaaatgtcctagaagagtttcataaaaatgtaaggcattggagtgagacactttaatagtttaattgcccacgtcaaaagaaaacttttatttccgtcgatgtggagaaaaatgttgccgtcactaggaagagtctaaaaagtctttaagatcacataacccaaaccgcaagttatggtaaaattcaaagtcttaaagtcaggtccgaaagcaaatacttatttaaaaataccctcttttcctgcaaattactgtgaaaaaaatatatataaaaattctatctcacgtaactcttgaaggcaacctacaataacactactcatgtgatagaaaaacgcaatccatgtgaaaataatcatgtcctaaattcaacctatatcagtaaaaaatttggtcaaaattaagaaaataaacgctattttctttaatcaaacaaacgccacacatccaacattagttactgataggttgtagtggcgattgttaaacttgtaatggcgattgaattagatattcaggtgaattgtatagactatagacacaaaacaatgcatgattgatagaaactaatacaaacttatggcaaaatacacaaacccatagtaaaaaaacaaaacacatgactctcgaataataatggtccaatcaatgtagcagcgtcccgattaaaggaccacgtggctacagaagatacagccacaagagacaccganacggaagggagggacgccaccaccacgttaagtttatttagatccatcgagtcgagtcccctagtgggacccacttgtactcaatgtgcataatcaaattaattgaatcttaatttttaaacaaccatgctttaacagaatnntaaccaaatcattaattgtcaataaaaatctttatatttttattttaccattttaatttttaaaaattaatttctttatcttctctcagatttcttcctatataaacccaatacattaccagtttaatacctaacaattactcaattagtacaagttgttatacaactaaatcttcatttgttaaatcatctttactcaaattgaatagtagtgtgcgtgtgaaaacaagaaaagtggaaaaggacaaaagagagagtaaaggacgcctcctaataaagcactcttcttccttttcactttcctcattgaagagagagccaaattcagcttaaagccccataagcgtaagcgtaagcgtaagcgtaagcgtaagcgtaagcgtaagcgtaagcgtaagcgtaagcgtaagcgtaagcgcggggataaatctctctcttcctcacctgcgttttcgtggagcatcttcttcaacaatggctgcttctccgatctgatcatatcctgatttgaattttgctatctctcatgcctcgaactcgttttgtcgacgtagcatcctagtgactgaggaagaagaagaagatg

SEQ ID NO: 584 - DNA, 1320 bp, Unknown
  misc_feature (1)..( 1320): cDNA_ID_3057383_gDNA_ID_1592123_Annot_ID_151997 3000 nt of promoter + ATG
  misc_feature (1)..(1): n is a, c, g, or t
ntgtccagattaattaatatacaaaataatcccaagacaaacactactatggtcgtactcggtgaattcgtcatgtattatgttagacgaaagaaatatgatcatagaaatgatttcgattagcatcataatggaagtccaaaatcgtatatgatgaaaagagaaagatgatcgttgtaataaagcatgcaaaaggataatttaacataaagatcatggaaggagttaaattttgtcaacaattggaacattttcatttatgttctttcactaaaaccaaacgtaggtcatcctcactcatcacgttaaaaactgtggtagacaaatcaattcataaacatgtgagataagtaattgagcaccgttttgttatatggttccatatggtatctataaaacatagccactaagtaatcaaccagatacaaacaaacgaatttatttcaaataattcacaattattaacaatttcaattaaaaatttgtaaatgataacatggtattcgattcgatcataagcattatttgagttaaacaatcatatgctcttaaatgttaaacttttttcaagtaaacttaagatatcccccgccggtgattcaaataagaaaatcaccgtacattcaaaaagagtgtatagctgttgtaatgactaatttagtgattaaaaatataatatggttatttaggaacagacaaacggcacgcgtggcgatgcttcaacggtggtctgaataaaactgggtccccactccacagcctgtgttcaccttttgcctaaactatcttctaaatcaagtttgtgtttgtagttttgacacaaacaagttattcatgttttgttaataacattaactagatctagttaattaagactactattttgatttgaaagcaatcatactagtagttaattaagactagatctagttaatttagccatccaatcccgcaaaatttgtccaaatagtctcattttacattcatttttgtatgattgcattaaatgacttagtaaaatggcacacaattaactgtttatttggaaacaaaatataggcaattaacacttttctctgactaattgacattgacccttaattttatactccaaatattatctctcactaactccttcctatttagacaacaccttacacgcaaacaaaaaaattaacacaaacttataaatagcgtttcccatctcacttctattcaaagatcgcatcaccaatcgcagtcaaaagaaacgcaaacgcgatctctctctcttaaaaactctgattcattctctcccgcagcagcttttcctaatcgatg

SEQ ID NO: 585 - DNA, 3 bp, Unknown
  misc_feature (1)..( 3): cDNA_ID_1584578_gDNA_ID_1592135_Annot_ID_152012 3000 nt of promoter + ATG
ctg

SEQ ID NO: 586 - DNA, 1169 bp, Unknown
  misc_feature (1)..( 1169): cDNA_ID_1689901_gDNA_ID_1592139_Annot_ID_152019 3000 nt of promoter + ATG
tagatcgattttttgagctctgtagggaagtagccaacaaaagaacagcttcagctgttatcatcaacacggtgagctgtctagagagctcgtctctgtcatggctggaacaaaaagtaggaatttcagtgtttccattaggccctcttcacatgacagcttcaccaccttctagtttacttgaagaggacaggagctgcattgaatggctgaacaagcagaaaccaaggtcagtcatatacataagcatagggacacttggtcaattggaaaccaaggaagttttggagatggcttgggggttgtgtaatagcaaccaaccattcctatgggttatccgagtgggttctatccttggcactaacggaatagagtcattgccagaggatgtcaataaaatggtctctgaaagaggatacattgtgaaacgagcaccccagatagaagtacttggccatcctgcagtgggaggcttctggagccactgtggatggaactcaatactcgagagcattggagaaggagttccaatgatttgcaagccctttcatggcgagcaaaagttgaatgcaatgtatatagaaagtgtttggagaatagggtttcaggtggaaggtaaagtggatagaggagaggttgagagagctgtgaagaggttgatcgtggatgacgaaggtgcggggatgcgagagagagcccttgttctgaaagagaagatcaaagcctctgtcagtagtggaggcgcctcatacaacgcattggaagatattgtcaattacttgaagacaaagcaaagatgttgaacttcatgtaatattaattgaattgttgcaaaatttgcaaagtgtggtttcttttgtatcactcttggtggcagtttgctcaatatagaattgttgcatcacaataaccatcttttcttttgtctttgattactactctctctaacaaaataaagagatgtaactagatgcgtacaccatcgaaccacatgcttcacatgtgcgcaaagagagctaacaaaacatttatacggatgaattagtgtccacaagcgagaatctgatatttctatatataaaacattcaaagaagatgagaagcagagtaatctataagcccggagcttagagagctacttattagttttcttgtaggttttggaaatg

SEQ ID NO: 587 - DNA, 230 bp, Unknown
  misc_feature (1)..( 230): cDNA_ID_1689924_gDNA_ID_1592142_Annot_ID_152025 3000 nt of promoter + ATG
  misc_feature (5)..(5): n is a, c, g, or t
agtgnccgtacataaaaaaaaaaaaacgtcattgatatttgtgaaaagctaagttaaataattcaatgagtgtgtccccaaattctctctttttttcctgagacttttccttgaatcctcttccctcctccttcttctctctctctcgtttctcaactaccgtctctctgcttcttctgttcccaaaaccggaaactttattcgttgaattttcccttgtttctgaaatg

SEQ ID NO: 588 - DNA, 1019 bp, Unknown
  misc_feature (1)..( 1019): cDNA_ID_1689953_gDNA_ID_1592150_Annot_ID_152032 3000 nt of promoter + ATG
  misc_feature (47)..(47): n is a, c, g, or t
  misc_feature (142)..(142): n is a, c, g, or t
gctgacacgtggcacttatagagctgacacctgtcctcatatttttntacaacccttttttgtctctgattttaaaattataaagtttgtaacgtaaaatctttttttttgcatttgtttcgtacttgagagtgtatatttntttaatgcattcatgtgtgattgattgtataataaaatcaaattagtaaacaataccttaatatacattccaaacggactgaattaatggactgaattaatttagcaaatcatatataagaagggtttctctaaaaaaacatgcttccacaagctgacacgtggcacttatagagctgacacctgtcctcatatttttctacaacccttttttgtctctgattttaaaattataaagtttgtaacgtaaaatctttttttttgcatttgtttcgtacttgagagtgtatatttctttaatgcattcatgtgtgattgattgtataataaaatcaaattagtaaacaataccttaatatacatttccaaacggactgaattaatggactgaattaatttagcaaatcattatgaattccatatatgttatcattatgaaatgaatgcattaaatcgaattctaaatcctccaaatactgaatgccaaaatcgtgtttacttccaaatatttcttgcattaaatcaattccaaatcgaccaaatatttaatgctaaatcgtgtaaacgtgtttactactctccaaaaacgtaactcttccaaaaacgtatctcgccttaatataacgaaaataaaaaattaactccaaaacattatggggttttaatgtgattaaagtcatattttccataactgtcaatttcgaattatatcattagtctcgcctcttcctttaaactcgcgtgtattaaattccctaatgatcgcaactctgtttttaatacgattaatgtcatatttcctctgctatagaaccaattgtcttcggaacaatccaaattatttcttatttctcttaaaaacactaaagcagataatg

SEQ ID NO: 589 - DNA, 245 bp, Unknown
  misc_feature (1)..( 245): cDNA_ID_1021259_gDNA_ID_1592151_Annot_ID_152035 3000 nt of promoter + ATG
taataagatgcactaaaacatagtgataatattattttagcattttttaaatgagagtgatagaattattatcctcttaaaagctaaattctaacattcattttgtgtatgttaactctcatgctttttgccttggacaaacaaaagctagacgtctaaaaatagttagaaaataaaacagatataagatgaactaaacactttgggggaaaaaaaaattatgaacttaattagggttctatatg

SEQ ID NO: 590 - DNA, 604 bp, Unknown
  misc_feature (1)..( 604): cDNA_ID_1690001_gDNA_ID_1592168_Annot_ID_152049 3000 nt of promoter + ATG
aattttttattttcgttatattaaggcgagatacgtttttggagagtagtaaacacgtttacacgatttagcattaaatatttggtcgatttggaattgatttaatgcaagaaatatttggaagtaaacacgattttggcattcagtatttggaggatttagaattcgatttaatgcattcatttcataatgataacatatatggaattcataatgatttgctaaattaattcagtccattaattcagtccgtttggaatgtatatattaaggtattgtttactaatttgattttattatacaatcaatcacacatgaatgcattaaagaaatatacactctcaagtacgaaacaaatgcaaaaagaaagattttacgttacaaactttataattttaaaatcagagacaaaaaagggttgtagaaaaatatgaggacaggtgtcagctctataagtgctacgtgtcagcttgtggaagcatgttttttagagaaacccttctttattatataagatataaacacattaccataaacttatactctcttttgatcaatctattgattttgattctctgttttatccggaagtctaaattggatg

SEQ ID NO: 591 - DNA, 59 bp, Unknown
  misc_feature (1)..( 59): cDNA_ID_1690007_gDNA_ID_1592169_Annot_ID_152051 3000 nt of promoter + ATG
gaattagaattagaagttgattcgttttggttcgattcaatttgttttggagagaaatg

SEQ ID NO: 592 - DNA, 3000 bp, Unknown
  misc_feature (1)..( 3000): cDNA_ID_1690084_gDNA_ID_1592188_Annot_ID_152078 3000 nt of promoter + ATG
taaaatccagtggcagccattgtaaataagtcacaactacagaatttatttcacaaaataactgcaaaaatgtatatatagatacctttaaattaagtgaacgagttacagaattttagtactcgatcaaaaacaatactaatacatattgaacattgcattaaattttgttttatccctaccaaaataaataaattagtttcattgttacttgaaaaatgcccaacctaacgttaaaacacgtagtagtgattattgtttacaacatttgtccaattattaaagtcaaacaatccataaactgtttacgctaaaacttgtgattttgacggttgcgggattctagatgatcattggtcaccttgtacccaaagaaatcttattatattattttgggaagtacatttggaatgtaaccttaatttttgtaattaattacatgacaatgatattagaaaaatttaattaaaaacaaaatcttttaatgacgttattaaggttaccaaaattcatttaacgacaatattcatttcttaattatagggcttattggatctaaagacgggtcatcaaagattttctaaactgaatcaaaatataccgagtattcaaatatctatctcttaccaaatataaacaaataagttcgtaaaacaatttaatattttatatacgaaatcaattgaatcttaattacataaaaataaaaattagcacaaaaaaaaagtattcaacaattaaatttttatcaaatctctctgttatataagttttgataatatattcgaataaagtgtaatataacttttcaatttgtactctttaactaatttaagctaactaatatatttgttaatcttatacctatcaaaaccgactatcgtttcttatctctatagtatttttgcaagacttttttggtggattttggtaaaagtgcattcgggtcatatggtacattctcctattaaataaatatggtgcactcctatattattaggtaaaatgtttagattataattagagtcatatcataaataaaattaatattattaaataaatggctttttggcaagacagatttggagagatggggttttgaatcaacaataataaaaaggtaaaatataattaattcaccgtttcaatacgggttaaatctttaatttattatttcttaataccactaatattaaacatatcaaatcatcctaatttagaaaaggttatataaaaccaaaaatattatgtggtatgtataatgttattatatataaaattaaactataaaatataaatgtattagagaatgatgcaatttataaaaataataaataattcttaaattttaaaaattactactttaaaaaaaaatcacgggacgggtaaagaaattacagaacgggttttattttggaattgggttatatggtggatgtatttgaatcaatatttataaaattttaaaatattattaatatactgttttaagaaaggttaaaacttcagttttttaacaattgtctcgtggattcgtggtatagcgttacttaataacaattataaactgtaaaatataaatattttataaaaataaaatttgtaagttttaatatatattacctttaaaaaataaatcgtcccgcggtatatcgcgggttaaaatctagtgattatatattatgaataaaataatttagataaagttagagatcaaatcctattacatccagaaaaataccagtctatatatttgtgatttttattgttgtaacaattgtggtgattagtttacgattttaaacatatcaacaacaaaaataattcagaaaagaaaacgcactcaattaatatagtttttttatagaatgaaacttgaacctttttacacgtataaaatgctttttagtgtaacggttaagacttcatcttcagataaatattttaggaccttaatatataatggtaactttaaaattgttctagacgacggtattattaatattatcaaatacttagtacaacgaatcaaattgactggaactataggaatgttcgaaatggaacatgatccaacaaatatcatacgtggtggattaacttgcttcacatataatttgtgctgaagtccaaataataatatacatggattctggaagtattatagttgggtataaagtcttgttgcatttgcatttatttcttgtacgcaatgcggctaagcaactttcattatcttaccataaaaagaacaaaaacaatcgtatcatattctcactctgcacgaaaagtcaagtcacgtaaattgttaaaagattggggatttgaatattgtatcagaaaaatgttatttaatctacaattttaaactatattaaaacacataattaactaagaaatcctttgtaatctcttaaagtcactaaaaatctaatgcttaaaatatttccaatckcaatgaattttaaagttttttttaccaaatcaattgttctatattactatattttataactttttaaaactctatggttgaataacataatattttgttttaacacaaatcattttaaatggtagattgaatacacttccttagttttgaaaaaatacactaaaagtatgaaatgatgttttttttttaattacaaaacgataactcgaaaacgatggtttaatgaaattatttgatgaaataaagttatcataaacatccttaatctcttcttatacatgtcaactttgaccatgacatgaatggatcgcattcccaatttactaacacaaaaaaaaatgaggaaatacgaaaacagtagtataaaaatagagcaaagccggtgagaaaaaacaagaaacacagaaacagaacataaattaaagaagagtcacattcaagaatctctctcttctcctcctctcattctctcagcggcttcttcttcttcctttttctttcacatcacacaacacaaccactgtgatcttgatttgttaccaatg

SEQ ID NO: 593 - DNA, 22 bp, Unknown
  misc_feature (1)..( 22): cDNA_ID_2183469_gDNA_ID_1592193_Annot_ID_152087 3000 nt of promoter + ATG
tggaccaaagtaccggaatatg

SEQ ID NO: 594 - DNA, 1297 bp, Unknown
  misc_feature (1)..( 1297): cDNA_ID_1690145_gDNA_ID_1592197_Annot_ID_152094 3000 nt of promoter + ATG
  misc_feature (512)..(513): n is a, c, g, or t
ccaccatagaaacaaccattacgctgtcatctctaccaccatcaccattattgcggccgcaattgacacacgaccactgcaaccaccaacacaaatattactacgacctacaccatacacaccatacacaccaccaccaccttaatcacttcttcctctcttccattgcttgtttcatctctctcgcctctcatctttttttttctactttaacttaattaaaacagaaccgaactatagttttctattttactttcaattttgtaccattctatttgctagttagaacgaagaaaaatgaaaacaaagactcacaagatcttattgaatattttctggtttgatcaatatctaaaattgaaaattcctaacacaaatttaaacccaaaatcgaatcgatttcaattcgcttaaggaaaggagaaaagagattaaaagtatataaacatgattttgtcagatttctaaaaattgaaacttgagatgatttcatttagtttaattatttttgnntgggttctatatatagtatcttagggtttagttttcttaaatcaatagatgtttttaaattagaatgaattgatataaaaaaagttaaattttctggaaattttctgttggattggagagaagagaagaagcaacgaagaagatgatgaatgaaaaaggtttgttaaaaaaacattacctttagatcaatatctgattcacaatccattacctttagaacatatggaatattacctttaaatcaatatctgatcaacaaaacgaagaagatgatgagtcatggcaaattggaaaatagggaaataatgcaggaatagacttgtaattagttagagtttttggttacttgctgaattacgtaaattatatagttataatcttaattttttgtcgaaatatggctacacagctaattcacccaaataaatatccacgcgtcatcaaaactatttattgttgacagaaaaaaaacaaacaacagacctttttgtcggtgaaattaattaataaaaaaatgatatatgtgtgtatgaaatgtaagtaacgtcttgcaaagtgtggacctttccgtctgagtaagagtattctgagttttgctcttctttgaaagaccttccagaaatccagactttttgttgtgacttgacgttatctctatgactctccattctttctcaccaaccccatttccccattgagacttttgttgacctaattcctccaaaatctcaccttcacattgctcgatttcagtcctctgaaaaaatctccctgctttgctatg

SEQ ID NO: 595 - DNA, 3000 bp, Unknown
  misc_feature (1)..( 3000): cDNA_ID_1690169_gDNA_ID_1592205_Annot_ID_152105 3000 nt of promoter + ATG
gttcaacactttcttgtaacttagtgaatttcttgctataggtgtgctatacttattcttgtttgtaatcataatcaagtgcgtttgattggaaagtaacgattttgtttcaagactaatctctatggggatgaaattttctcacctttctactttgcatactttttagctagtctctaacatattttcacaatgtacatactgtatatagctctaacgtgggaactcgaagaatgggtaccccctgtagagaagtgtatattcaagttcaattcaaaagaagaccttaagacatggcacctatactctgattctgaatatggaggtacttaaatcacacaagttcaggcatctgcccataatcatgttacagaacctattattgcctgtttacatagtttcttttactttcattccttgttggttcatgttatgaaataatatttctgatatgcagtgcataacaattcttcatgtgatatgctcattatagtgtggatattttactttataggattatcttcggcttcgttggaaattaaagatggaggaaatcgatcagattgcaatggttagtatattgtggaacaagtgtgccttgctttttctttctgttactttttcgcttgggtctgatacaattagtttgtgcaagccagattttcgaattaggctgggaaagttaggccatcgatgcttctttgacttaaatatactgtgatgattttctcatatctagaggcatagaaacgttattgagcatgctctaacgtctaagccaataaattataaaatgatttctcttgaaatttctggaactacagttttcctggtttagctgtttaggctctcttaatcgagcctcaggcgaaagtatgaagtttcttgcttctcataccatttacctctcttcatcatgtttttttctgcaattgggtggtgaccgttttcaccttatgtctcctttaggtgttttctctgggaacctctctacggatatgagggaaggttcaaaatggaatatcaatcggagtggtttctgtggaatgcggtcaaagaaggttaaaatcataggttttgtttttctttactaatcatcacatcatcaatcaaaaccaaagatttgcatgagtttatgcacaacttacttaactaaaaccccctcccatttttgtagtttgatggctttattgatctcgaagggtatgattccatagccctgaggctcaaaggagatggaaggtgctatatttctactgtgagtctcatgctcaacattcatgtctttttgctccagatgaaacacaaggttcaaggagcataacttttttactaaaaactaaaccgcagttccaattcagatatatactgagaactgggtgaactcgccaggacaagcagaagacaactcatggcaggcttttgtttttgctccaaagggaaactggtatacagctaaggcaagtctcgtacttctacaaagcaactagtgttaaaaggggttttgctgtaacttgttaactcaagtgtgacatctttcttcttcaggttcctcttactcgctacttaccaacatggaaaggaaacgtgatagatgcagaaatggagatgaatccaggtcatgttgttggtatgtctctatccgttaacgcacaaggaggtggtttcattggagctaaatcaggcgcaggcgatttccaagtcgaaattgactggatcaaagcagtgaggatgccatgaacgatgatgaaaaaagctttctgatgaacaaattgagaaccataaaaaagattgttgttctctgggtttaattgtaaaaccgggatttgggttaaccggatccaagttgatgaacaaaaacgcttatgaattgacttaaagcaagttgatggacagcaacttgaaaagaaaaatgggccagaatggcaagttgctcaatttatttaccttaaagtgaccataaagtaaaattatctaattcttgaaaaggtaatattacaagttttttgcttttgaaaaaaaagttttcaagataataaccttattaagtttcgttatacaaatcctttatttgaatttcagcaagactaggttataaaattctgctaaagtagaagcacatataaaaatatgtaaattctatggaaattgacataaatagctctaaaattctacaacgttcctacattatatatcaaaaatgtctatgctgacaaaacaagaagaatgcatccagactattacaaaataaatttgatgctctagagtcgttgctcaaatatttattttttgtattcctgccaaactattttttttcttctaaaacatgagtactcgatcggattttgctatactcgactaattttagggtttagtagatttgttacatatacattttgtaacctacatagaaatcaaatgaccaaaattacaaaaaaattcacggttttgatcttaccagtatacggatcattatttttactcagtaaaaaaataattgataaatgatttcttaacctttttctagaaaagtgagtttaatcttccattcatttaagtcttaaaaagctaaaacatttacaaataaaagatgtagccttgttcaaaattggttgcgtatactcacaattcataaactagaaagaaaaaaaacactaaaattaaagtagtaaaataatacactacttttagttttaaaagatgttgtctaaaaaacgaggataaacataaacaactagttcaagtggctagtttctcgatcattctttgttaccccagtctcgtatatataaatagtattatatacaatacaaaagcacgatacccaaaatatcaaactcttcttcttttcccttctcttctcttcttctcttcttccacgtttacgcgtatacacatctctatacatacattaatcttgatccttctttatctctttgcttccaataaactccaaagaacagctctttctttttctcattcttactatcatcattaatg

SEQ ID NO: 596 - DNA, 462 bp, Unknown
  misc_feature (1)..( 462): cDNA_ID_1690173_gDNA_ID_1592205_Annot_ID_152106 3000 nt of promoter + ATG
caggtgaagtgaaaccaaactcatcctttgtcttgacgatttgatttctcttgtttttgtttgtgcaattccctatggattcttctttggtcgttggtcttttttgtttttgtctgtgggtcgatgtgattttatcaattcttgtctttcaagtgtttgttgaaatgcctcaatgggaaaatgtaaggtttttcagggaatccattaatgggttctgctcaacccaaggattcaagtaaccctataacttcagctccgaatagggctgcagtaaaattgcttaagtctctcttcattgggttatgcgttgtgctagagtttccaaagagatgatctttcatttctcttttgcaacctcttgttatcaatctatgggatattaaggttattctccattttcattccggaaagaaattaaccagttagtgttgttcccattgatccagcaacttcagaactatg

SEQ ID NO: 597 - DNA, 1816 bp, Unknown
  misc_feature (1)..( 1816): cDNA_ID_1690192_gDNA_ID_1592211_Annot_ID_152115 3000 nt of promoter + ATG
  misc_feature (12)..(12): n is a, c, g, or t
  misc_feature (802)..(802): n is a, c, g, or t
caatccgaaatntaaatttaccgattagagagttagatcgggcgatgaagggatcgacggaacgatcgcaatccgcaaaggaacaccgttcgcttaagggttaaggttggccggaggagacaagtttcatcgagagaaagatattttcagaatattaatattttgtattaaacctgttttgttttatttaattacccgcgaattgacgtgtcttttggactggtcccccaattccacgtgggaacatgtgtgcacgtgacggagaactagtggctgtttcaagtcaacaatatcgtcttaaccgttggattggttgataacgagagataatgtaacaactaacaaatctaatggatgttgatgaatataaataatagtatcaacgtacgactttaatggcggtcaaaatgtgacattgagacggtttcattaagtcagtttcagtgccagccagattcgacccgactcggtacggatacttgctcgacgatttatcattcgtttatcgactaatccaacgtttactactccttattcttcgtttgtttttaatgttcttcatgaacttaattattgagacaaagtgaggaaaatatggagagtgtgcttttgttcatgaacatgttctgatttggtcggtgataaatcttctgtatcaagaagatgtttacattaacttttcaaatgacaacatatgcgagaaacaaaacacacgtatcactcttttaacgtacgtaactgctccaacagatctatcttattctttatatacgtttgcttcttcctcaaaacctcatccgantaggtgctggtgcaggtgacgagatcatctttatttagaataattggtgaggacctaaaacgaaataagcgttatcgattgattttatttttgtctctgaatccattttctctgctttgatggaggaagaaaaaactaagcaggtacttatctatattcacaattgggtagttacgtaataaacaagacaccagtgatggaacgaatttagtagagtaagcgagcccgtgatagaacgagtctaaatgtgattcatcgactcattcggagttatggtttgtgggacagtaaatatatatgctgagaaatccactaatctttaagaacttaactataaactctgtatcggatcattctttttattaaggtttgtgctaaagataatcgattctcttggacgattagtagaagggaaaaaatacgcaatggcgcgagagtgtgcgatcgtatgagagttgtaatcccacacgtgcggtctcccacgtttcaaaaaataacgggaaaaattatataaatcacgtagcatgttaataattaggacattatattaaattaacgttttcaaaaaaggaaatatagtgttattgaaaaacacatgtatgacatttatttgggagcattttgcaaagtaaatgttgctacctgacacgtcatatttgccaatttatacatctcttgtagattttcttaattacataaaaagataaactttcatatttgctaacaaaatatgagggaaaaaaatcagcttattgaacggaagatctatttaatattatgaaagttgatttttatgtaattaagaaaaataatcacataaattaataaaagtaaaaacaatatatgatgtgtcactttatggtaagtagtatccaaaataataagctaaagttgattttttttcttgttctgaaaagaagagagaaaacgctttaaatagaggatcctcaccatcaacttcctccactcatcatcattcacagcttcaaattttcaatactcaaattaacaatg

SEQ ID NO: 598 - DNA, 3 bp, Unknown
  misc_feature (1)..( 3): cDNA_ID_1690227_gDNA_ID_1592228_Annot_ID_152134 3000 nt of promoter + ATG
gaa

SEQ ID NO: 599 - DNA, 3 bp, Unknown
  misc_feature (1)..( 3): cDNA_ID_2990735_gDNA_ID_1592230_Annot_ID_152137 3000 nt of promoter + ATG
gga

SEQ ID NO: 600 - DNA, 464 bp, Unknown
  misc_feature (1)..( 464): cDNA_ID_2994202_gDNA_ID_1592239_Annot_ID_152150 3000 nt of promoter + ATG
cttgagagagatgttaatatacaaaagaaaaaaggcacagttggtgtgtgtacatatgaccaaaaacgtcgtggagaaggctaaagaaacagtcgtgaaaagccatttgttgtagtagagagagagagatttgagttaggcaatactgtcactgatttaggcatttgatattttgtaaacaaaattttttggtttatttttggggagtggtggtaaacacactaatatgcatttctgtcacctggagagatgagatgtctctaaaaaatggtcaaagaggcgattaattagttaaatagcaaatggaaaaaacaattagggatgggtttgtttgttaccaaggaattaacataacagctgtaatgctgctgcgagataaaatgaacaatgaagaagcggagacctgttgacttcaaataattttaattagtttcttctgtgcgatagagatcgatcgagagatg

SEQ ID NO: 601 - DNA, 577 bp, Unknown
  misc_feature (1)..( 577): cDNA_ID_1534688_gDNA_ID_1592240_Annot_ID_152153 3000 nt of promoter + ATG
  misc_feature (83)..(83): n is a, c, g, or t
  misc_feature (92)..(92): n is a, c, g, or t
  misc_feature (95)..(95): n is a, c, g, or t
tggcctcgcacgcactcaacaatttggtgggaggtctgttgtggcgatatagttccaagatcaagtcattggagtgaaataancaaaatttncancagggttgaattaaaaaagtatacaattttaatgggtgggtttgtgaaatctctctatagtatagggtggttatgtcaaaaatctataatagagggtggttattgtaattttaatgtaccaacatgtcacaaaggacaaacaagtatgaaaaatctataattatagaagtgaaaagtgaaaaaccaatcataattgaagaattgttaccggaaaaaggaagtgtcttctggtcaaaaaagtcagagaagaagagagaaacgtgaacaatgaagagacagagacgtctcttctcttatgcgaaagtgtgaatcttttaaagctttttgtttcaacatcgataaatgaagtttcttttattgaatttatagaaatttgcacactttaccttgacattaaagcaacaagctttgaaaccaaataaaatctcaaaaacccagaaagcgagtggagaagagagagctgatatgctacaatagaaatg

SEQ ID NO: 602 - DNA, 391 bp, Unknown
  misc_feature (1)..( 391): cDNA_ID_1690266_gDNA_ID_1592244_Annot_ID_152158 3000 nt of promoter + ATG
aattggagacaacttcatgtggtttgaatcgtatatttcagatagattagacatctagtcttctttgatgtgcggtgaggatcttaagtcgctataacgttgtgaaaaaagaaaagaaaaagtcactataacatagatcgcaactaaacaaataaaggacactatacatgtacgtaataatattcatttattttcaacgacaatgttccctagggtggtaacccaagtatttttcatagatattatacttctagcgaaaagccatcaattgagaaaaaaggcctccacgtttgacccgttttgcctataaaaggattctttaagatatggaccttactcatcttctccgttaaacccatttaaatagttttcattgtccttgtgaaaaatg

SEQ ID NO: 603 - DNA, 442 bp, Unknown
  misc_feature (1)..( 442): cDNA_ID_1690312_gDNA_ID_1592255_Annot_ID_152176 3000 nt of promoter + ATG
  misc_feature (17)..(17): n is a, c, g, or t
ctgtgtatatggttcgncattgcattcagtcgtggatattgtagtatcttaggtcattaagcaagatctctttgttagcatatgtagcaaaaaaaagattttgttttgttctttatgttgtttggtgctaatatatttcacaaattctcattgctttctctcatgagtctctaaattgatgttactctctttggatttctttaatctgtttccatggatgattacgtttagctactttaattgtatttctacattgaatttataatgatttggttatatgattaatagttttccttctaataatgacttataattttctctatttcagtttactattgacaatatacttagcttcaattgagctactaggagaccgagttttggtaagaccaaagagacagagaaaaagacttgacttttgaatatagagaattgagagatg

SEQ ID NO: 604 - DNA, 37 bp, Unknown
  misc_feature (1)..( 37): cDNA_ID_2178924_gDNA_ID_1592268_Annot_ID_152188 3000 nt of promoter + ATG
ttacaaaacaaccgacctcaatctacccattgaaatg

SEQ ID NO: 605 - DNA, 1836 bp, Unknown
  misc_feature (1)..( 1836): cDNA_ID_3057552_gDNA_ID_1592275_Annot_ID_152195 3000 nt of promoter + ATG
  misc_feature (23)..(23): n is a, c, g, or t
  misc_feature (97)..(97): n is a, c, g, or t
  misc_feature (151)..(151): n is a, c, g, or t
gggaaaaaaaaaaaaaaactggnacattttgtatgcatttttgcggttataaactttggaattgtaaagaatgaactagattttaatccgcggtacnccgcagagacaatttattttttaaaattagtatatataaaattttgcaaattanatctatttataaaatatttttattttatagtttataattgttattaagtaacgtccttctaaacccgttccaccaaactcgtcctgtaaaaaaaaaacgcggtaccccgctaatttaaatttataattaaaataaatattttacgggattgcaattgtgttttagtttgtcaaacaaaattttgttttaaatagttgtcgaaatctagttcaaattttggagacataagatttagtgaatagataagaaatgtatttagttgcgtttcgctcattttaagggattgcaattgtcttttgggttgtcaaacattttttgttttaaatagttgttgaaatctatttcaaattttggaaaaatctgcgtgatatatgagattggaatatatttggaatgttttttcatttgttaatcaatttattgctgaaaaagacaataattaaaagccaatggcaaccattataaataagttcctccaggatttattttacaaaatgactgcaataatgtatatatagattctatttttatgaatataattccctttatatttggagactatttcctttgaatgatgacttgtctgaatacaaatcttttcgtaagtccttaaaggatatttggtttcccacgaatcaagccaatacaagtttgtgtatgtcatttatgtttaaatgagtttagttggcaaagtaatcaaaatatttcatttcgagaagaacatatagcttacacgcctcataagttagttacctacagaaacttatatggtggggtgatatactttcggattctaggtaagatatagtatatgtgcgttactattgctcatactataaaaatcaccttttggttttgagttatcattttgaaatctacacatgattgcgtgtactcattatttaaagtcggcatagatttctccatatatatgtcatgattccatgaatgttcttttaacatcttaatgcgataacactttacattaaaatattcaagaaaaaaccaagctgttttctaaataaatttagtttgtccacggttaataaaatttaaaattagcgaaatacgtaaataatcaaatgatataaccaaaatgcctattatttttaaaacaacattttattttctctaatctcataaaatactctaataaaatctagttgtaagtgaaaataacactaagcttcaaacacacacgtacatgaatgtttgtttttttctttcaaaaaagctgaacaatgacattttaagtccaaatgaaaacgatggtatcatcttggacttccaattttccattgcccatattttctcttttcttttgtttttatccaattggtatcgaatcattcatataaaattataaatcatgaagtcaaatttttcaatagtaacacttgagtaatagtggtcctaccaactttttaccaagacagatatattttttttaatacactttttaccttttactgtgtttgcctcaaatgagtgtttttaccagtttctgtgtatataaatctgcactccactctcagtttatcttcatccacaagacagttctttaacaaagtcattaaacatttcccttaccttctaaagatcaactctttcaaacacttactctgcatgtaacttcatagattgaacgaagaaccaaaacaacagagcaaaacaaacaaaagatg

SEQ ID NO: 606 - DNA, 220 bp, Unknown
  misc_feature (1)..( 220): cDNA_ID_1594517_gDNA_ID_1592285_Annot_ID_152199 3000 nt of promoter + ATG
  misc_feature (35)..(35): n is a, c, g, or t
tcttcttcttcttcttcttcttcttcttcttcttnttcttcttcttcttcttcttcttcttcttcttcttcttcttcttaaccctaaatcgatccgtctttcaccaacaaaccctaatacatcgatccatctcgattctctcttcttcgattctctcttcttcgccaaactctcccttgcctcttcgatccatctcgattctctcatctccaagaggatg

SEQ ID NO: 607 - DNA, 2819 bp, Unknown
  misc_feature (1)..( 2819): cDNA_ID_1662883_gDNA_ID_1592299_Annot_ID_152217 3000 nt of promoter + ATG
  misc_feature (103)..(103): n is a, c, g, or t
  misc_feature (113)..(113): n is a, c, g, or t
  misc_feature (130)..(130): n is a, c, g, or t
  misc_feature (416)..(416): n is a, c, g, or t
  misc_feature (562)..(562): n is a, c, g, or t
tgattctataaataaaacccataacaccttattaatcggggattttaagtggaacaataggaaactgcaatcgaatcctgacattcaaatgccattttctagnctgaaccaantatgataaaagttgaancaacaaggatcaaatcccacgcaaaatgtctcaccatacatgaaaaatagcatcaacactcgatccaataaccttcacttccagtttcttgttaagcagccgactttacaagaacaaatagcgacgtctctcctagtttctcctttccctacaaaaccattgcagcccacatatctctttataagcaaatcagtgtaagagattggaagcagatagtaaaacagagataaataagctaaaccttaagctctggtaactcaattacgcaagcacattcaacaatctncactcctactcgttctgcaaaaccaaccaattgtgggagtgagaaatagtcaagtttaactgaactgcatatgctgcattatcaaatcttggacttaccaagtagtcggattgcagcagcgagagtcccacccgtggcaatgaggncatcaataataatagcacgctcaccaggctctactgcacctacgtgcatctcaatcgtatctggtccatactccaacgaatactcctccgaaataaccttccctgttaaaggaaccaaatgcagaggcagtttagaaattaacgtccatggataaacaaggaatgcgacaattatttgacactgctcataagtttccaaatggcttaatacatttcttgtaactggtcaagatacacaactaagtccattgatatgtaacagaaaaaataacaaccacttaagttactgcaagttaccacaaagaaaaatgatctagcaaatgagtagcatcatattgatcaaagacactgcaagataaaagtcaccttgctaatgttcgagataatgataaagtgtagacttgggagcaagaagccatttaaactaacaacttcctaattgagacctttcatgtaacttaatgtcaaaatcacaagcaactagaggaagaaataaaaatgtaccaggtagcttcttgggcgtcctcatgggaacaaatttggcaccaatagccaacgcaataggagggccaaaaatgaaacctctagcttcaacacctgcatttaccacaacatcaatttaggcagaaccaaaaatcatccaccaattcatttcaacttttcagtttaagctaaagcactcagtatctaaaaaggccaaaagaaactaaatccacaagctgttaatcgattgaagtaccaaacagaaccatacgagttgttacctgcaacaacagatatgcctttatctttgtatctatcaacaaacaaagcaatagtatccttaaaggcctcagtgtcgagaagaagcgtcgttatgtcctgaaacatgattcctgccaagtatccaaattaaaaccttaagatcccaacgcagatcaagactagagacgatattaatcggtataaatggaaaaaatggagacctggtttagggaagtcggggatgactctaatggaagaggcaatcttagcgattctgggatcttgcacatcttcagtcgccatttcactgtcccgactggctgctgctttagcaaaatactcggcgtcagatttgcaaacacagagagaccctaaagactcaatagagagacacagtgatgaaaaaatgaccaatttatcccgaatggtaacgctttgacggaattgccccacgcaagcaaaatatctttttcaaaaggaaacaaaaagtttaaaagggaaatagaaggtggtggggtctaccggcggaggagaagaggcggagtgaggtggttgaacggtggtttgagaggcggatcgaaggaggagcacggtggtggttgttgagaagacggttgcaaggaacagcacgagcaagacagagacgatgagaaacaagtggagaaattattattgtttgcattgtctttggactgagagatcttaaaagagaatgtaaattactttaaacacggaataatggacaaaagccgtgatcaatgacttttcaagtcttaaccaaacctataactcatccattgtttgttttttctacatatttcttcacataaaattggatgatttagaatctttcagagtgttcacactccaacagattattatccacaatgttatggttacatttagagatatataacaatgttcatttcatcgttgctaatgacataaaacgatcaaaaactgaatcatagtacttcttttacagtgatctcaaatatataaatcgctaatcaatgaattatgtcacctataattgtcgtattaccaacaactataaaacatatatataaaaaattgttgtcgttaactagttgttgatagtggccactctaaaacgatcatgacctactacggaagttataactagtcaacgttggacgttagcaaggcccaatggacattaactcagcccataatagcacgcgccttgtgatgtgcaccagtttccgtctttggtcgttgaattcaaggaaaaaaaaagtacatcacaagcaatttcttacttatctgtgacttgaagctatttctccaatttcgttttccatcgacactctatttcattttcaccattcacgtcttccttctgaataaaataaaccctaaaacctaataccgaagtaaactcgtcaaccactgcgcccatgacctcccaacgatactcttcccttatattcttcctcttccttcttcctttctgcgatccaaaccttcaaacacatctccggtagatatg

SEQ ID NO: 608 - DNA, 35 bp, Unknown
  misc_feature (1)..( 35): cDNA_ID_1597137_gDNA_ID_1592312_Annot_ID_152242 3000 nt of promoter + ATG
  misc_feature (6)..(6): n is a, c, g, or t
gggccnttttttttttctcttggaacatatagatg

SEQ ID NO: 609 - DNA, 3 bp, Unknown
  misc_feature (1)..( 3): cDNA_ID_4282969_gDNA_ID_1592314_Annot_ID_152243 3000 nt of promoter + ATG
cgg

SEQ ID NO: 610 - DNA, 1867 bp, Unknown
  misc_feature (1)..( 1867): cDNA_ID_1597200_gDNA_ID_1592316_Annot_ID_152249 3000 nt of promoter + ATG
tttttttccaaaaacaatttttgctttgatgaaattaaaactattaatacccaaaaaaaaaatgttcacttttacttttaggcgatggcgagaggatgtcagtaattgggttactcaatcggaatactgttattggagtcgttcgttgtgtttttacggtcaatttggttctattcagatatggttatctccggttttggatttgaaatctcagatacagcggcggattcacagagttccccgagtgctgctgcgactgatggttttggagccgatttcctagcatgtatgaatatgtcctgggacaagttcgagacggacaaataaacgagaccatatgtttgctgcagctgacaagtctcactcagctttcttgttgattgatgagatataagagcagatgggattagctggatatgtgcaggaaactgagatggtatgcatataagttaaacaaatcgttggagcatataagcagacacaaacaatcagttgtagccgcagaggcattcctttgctcattgtgagatttggcagatctggagcactaaccattcgtagtctattgacaatcacacctgattcttatcccaggtgatttatcttccaagttaatagctttacttgaaaaacgattccttactgatattcaaagcataacacgtctaggttcatggatgcactctataatttacttgacggttctattgacgacaatacaaagtttgaagatgagtgccgagctatttttggagcacagtcatatgttcttttcacattggacaagctagttcagaagtttgttaagcatgtaagcaaaactagtgtcttgtcttcttgactctctacttccattctctctctttcatctgatcactgggatggtttttggaaatgcttcagctccatgcagttgcatctgatgaaacagacaccaagcttctgcaactacatgcgtatgagaactacagaaaactttgggaagatgatttgatctagtgtatcatgagaatgcatgtgccatcctccatgaggcaaagatataccaaagagcaacactccaatcgttacattggttaaccgctggagcgttttggagcccgagaatgccagctcatccactttagagccaattggtcagatagaagcgagcaattcaaaaataataaaaatgaaaattaccgaacgacgtcgtattgataaatgggggctgtttggtagtacgtgtaatgttgttctaaatacgagtagggaagaggcgtaagataacaagatgcgtaggagaaaggaaaggattattgtcacttgcctgcgcaaattagggcttctccttcgcaagactctcttcgccagcttaaatcagtgtactctctctttctctgtctctatctcttgcaacttctctgtttctaatctcttcacgcatttgtgtatcaaggagtcattttttaacagaatatgaacatatttgataattcgaatcatgcgagttttattgaaagcttatgttcttgtgatgatttcaaacttttcgaaaacagcgactttcaaatttcttcagaaactatgaaaaccccatcttgtaattgccattatcggcatccaaaatgtgcttagctcggaaaattcgaattgaattagcttcgaaagctcctaattacattagaaaattcaatctttatacgaaatttttgaattctgaatctttctagcttcgtactcatgagtttaaaagcttgttacagattatgtagcacttcattggagattatctggttattgtagatagtaatgttacagagtctcataagtgctgttgttatgtgcttgtcaggcaaagtgctgaatataccttaggagctaaatg

SEQ ID NO: 611 - DNA, 838 bp, Unknown
  misc_feature (1)..( 838): cDNA_ID_3057630_gDNA_ID_1592320_Annot_ID_152258 3000 nt of promoter + ATG
acaccgatagccttctctatgacgaagagtttaccaagtacctaaaagaccatccagacaactttaggttcgacaaggcattgagcagagaggagaagaacaagaaaggtggaaagatgtacgtgcaggacaagattgaagaatatagtgatgagatcttcaagcttttggacaatggagctcatatttacttctgtgggcttaaaggaatgatgcctgggattcaagatacacttaagagagttgcagaagagagaggtgagagctgggacttgaagctttctcagctcaggaagaacaagcagtggcacgttgaagtctattgagctctttatttgtatttgctgtttttgatttttgatttaagaatcgtaataaatttgaatttggtgtttttctacttttcaaacatgatatgatgataatatctgaaatttgttggttttgagaagagaatattctcagagaataatcaatatatcatttatgtagtgacatgagccatcaagaaaacgacgaaaaggtatatactattaaagttgagaataatcttatcttacatgtgctgccataaacccaaccaaaggttatagaatattgcataaaatattcgaatcgcctaacgtcattttaatgaaaattttagagagtttataaatcaataaatcataataatcatcggtttaccaaaacataagtattttgaattttcggcttttgttcggttatgtagctgaacaattcgaattagtgtcatagattcataccgaaccgagattactctcttgtctgatgtctctagaattcaaacaaatacgaaccggtttcgctatcgatg

SEQ ID NO: 612 - DNA, 588 bp, Unknown
  misc_feature (1)..( 588): cDNA_ID_3057644_gDNA_ID_1592323_Annot_ID_152261 3000 nt of promoter + ATG
agttttgcagagataatggcgtctctaaagcggctacagaaacctgtaacaggttctaacatcccaagaccagtccccagttcctcttcattaccaactgaacatgaacaaaaggattgataacagaagaagacgaccaaagtggcaaacacatttttgacgaattcaatctgtttgaaggaaaaaaaagctacaaatgttccttctctgctactttttgcctcagcttcagtgtttgacacagcttgtgaattgtgaaaaagaaagattcatggaagatgacgattgaagaaggtgaaggattgtgctcgtgtgttttgttgtctttgcttgcaagcgatgttcatgttcatgcgtaatttcctctattttgttttccaatattgaaactgtacaaagagagaaagaaaaaacaattgacaaactcgttgaaacgttgaccgaaaacatatattaaaaaaaatcatcgagctctgtctttattcatcacacgaacaagataaggctgatctttattattgggatatatgaatcaaaataatataatattttaaaaaactttgcttttacgaaaaatctttgacaatg

SEQ ID NO: 613 - DNA, 3000 bp, Unknown
  misc_feature (1)..( 3000): cDNA_ID_1689328_gDNA_ID_1592327_Annot_ID_152271 3000 nt of promoter + ATG
tctcctatatgtgccatgtttaatggtttttttcttttgcctctctactcttctaatgaatgtcttgatgaacggtacagatcatacggtgcccatagatgatcaacgatacaaggcttccttgaatctagtcttaaccatggcttcccttttccactccagtgaagaagacttatcggtcccggatgcaacgttctacatcttccttcgaaattatcacctcctagaccatgctggttccacctatgattaaccgcttttatatcaccggcgaatatcagcagaaacggaggtaatgatcccaaatggtatatcctcttctgcttctgaattgtcatccactcttctaccttctgtgtatacattcctttcctccatttgtttacatccacaaccatcacccctgtgttgaaataacacggacgttttccttcaagaactttgaccaataccgggtctgaccagaaagttcttgtgaaataatgggtgaagtttgcgtggcagtactcgggagcagccaccactttaccttccatctccacatgccacagcttctctatgtcgtctaccacaacgaggtctgagtctaagtagatgatcctgtcaacgctgctagggatgatatccgcgaggtagattcttgcgtagttaagaggctgatcaagggcttgcctgatggatttcgatatcttgctgcggacgaggtttggatcaaactgataaatcttgaagtttaggtaaggaaaggttgatttgatgctggtgaaaaggtcgttttcgaaatgaggaagggacaggaaatgaaaagagaggttttcagggcaagtggaatgttgaaggagagacaaaacggcagccattgtgccacggaggtagtttgtgtcgagtgtcatggcgatatgaatctgatcagcctcacgagtcccgcattgatcaccgtttcgaaaagccggggcttctctgaaaacaggaagagttggagcagaaggcttatgaagaatgactccaacacgaaccgccatagtggtggttgtgaccaagaggaggataaaggacaggaggcctaggagttgtgtataggaaaggctccttgaggccatcctgaacctaattttcaagtaaactcttttattattattttckcttttttttttaattttttttttaaaaaggtttaaacattacaaattaaaaagattgattagttaatagagccattgttagggaaaggctagaataaaggatttggggagaggcttgttttatgagcagtctaaatgtggggaagagattgaacttcggactgtttctcacacaaatctttgtctccaaaaaaaatccatttcctatgaaataggaacaagacaagtctgttgtccaatgaaatcggagtgaatttttagattttgtttcttcttctttagattcttagaaactggtttatgtttttttttggaaacaaaaattattgtttatttttaggacaaaattggtctgatcaatttgctttgctgtcatttctttttackcttgawtgsgtcggcgggtttttttttttcctttttggaagtaccaaaattagaatactgtaacaaactcccctaaaatgtattaatgcatgcttttcatgcaagaaaataatgatttttatgtgatcaaatccctgataacatcatacgatctcatcatatatatagtggtactggtaaaatctgtaattccaaaagttaagtaaaatagtaagaaactaacttaagaaagtgtgtgttactccacgtttcaagaaaagaaaaatgtcttatatactccaatcttcatgcatggctactaagacagtcgcgtgtcaatcggtcattctcatgcctaatactaatccatatatataaataatatatgaaccagagagaagatctcttgaaactctttcgattacaaatatttgagttcaaacttattctttcaccaatactagccatttgcagataagacaaatagaaatcgagtcgaatctttcttgcttgagtggtagaagatttctttctctagttccatgtaattggtctaaatcagtgaactcataatttcatgtacacaaaaaaaaagactgtttcataaacagtggatatatggattggactcaccatgtcatacatggtctcgaggtaaattacacttactaagtaatcctttatattttacattttttaccatgttgtatggtaatgtgatagctacctaattcacagggccttaggcccattaggttttcaatattttcatggattatcgggtcgagaaaatgttatgatacccgacccgaaacggggagaaaataaacgagaaaagtaaggaattatctcgaggaaaagaaagcatcgataatctcaaaaagtttttggtttgatttgggaactcgtgcgcggctgtggcagaggccaaacccacccgtgtactccatccgtcggatccaccaaaccaatattctttcatctctctctctctctctctcttcttcttcgtcttcttctctttttattctttcttcaggaacaaattcctctgctttggcattttagggtttctcaaatttttgacgctttctcttaaaagggttgacgaaataaccctttaagggaaaaaacaaaggttgaggaagaccaccaaggtgaaaaaagaaagaagaattcgaacaacagcagcaacaagataaagttacgaatttttcctcttttgtaacctttgtttctcttcttcctcttcctccatttttttccattaaagattctgcctttgggttccaatttcgtctttcctttttcgattttgccgcgtttaacatgacattcgcaaaaccctacacttttctggacgccattgttgaatcccacgaatttcgtttccctagagattgcttgttctagccccagcttgaagctaaagatttttcaaggaaagcacgtttttttgtttgtgcaatcgaatctgtttttctgcgttatg

SEQ ID NO: 614 - DNA, 248 bp, Unknown
  misc_feature (1)..( 248): cDNA_ID_1689354_gDNA_ID_1592329_Annot_ID_152283 3000 nt of promoter + ATG
ktatatgatactactttgataaagctacctaacttgaatataatatgacgtataacccaaaaataatatatcctattgcccaccagatacgtatttaatcattgaatttctctttgtatcctactaattagtcatgatctcacgtaattttcaggctttactctgaaaagtcttctcttataatgtcaatgcaagttctgctttaaatcaagaaaaaatacatgatatctatacacagtggggatatg

SEQ ID NO: 615 - DNA, 1142 bp, Unknown
  misc_feature (1)..( 1142): cDNA_ID_1689439_gDNA_ID_1592352_Annot_ID_152322 3000 nt of promoter + ATG
  misc_feature (1)..(2): n is a, c, g, or t
  misc_feature (27)..(27): n is a, c, g, or t
  misc_feature (51)..(51): n is a, c, g, or t
  misc_feature (177)..(177): n is a, c, g, or t
nnaatgatgatggagcctccgcctacnaaggagattgctttggcccctgtntatgtgtattgggacatgaagaggtgtccggtccagatgactatgatgctcgtcgggttggtccgtgtatgaaacggattttaaggaaattaggctacaatggtcctgtcaccatcactgctgttngctcactagcaaaggtccctcgtgacatccttgaagcggtttcttccactggaatctctcttcatcacgagttctacagtaagcatttctcatccttattccctttttattccctttattggataaagagagtctctctaagtatatagtttctgaaacaggtcgtaaaagcatggtttcgtgtttccttggccatggtatattgaatccacgtccatctactatgacggtcatatcccgtccaccagtgtacattcctccacgcttctattctaatattagccgccgacgtgaaaatagatacaactccattttcccgtttccacttgagtctcctcgagaagcctcctccaccctctggaaaaactttcttttagctgatccagggccacttgatgaggaggatagctgcagtgaaacgcctggacctgcctcctggctttgctctgtgtgccgtcgtattggttgtggtccaggtattgctggtcaaggcgttgataattttatcacgcatatctctactcgagaacatgaactcaatgtaagctaagcatccttgccactagtttaactatattccctttctcagttgttcttttctttgcccaataactccagattgaaagagagagatatgtgtaaagaagaacataagaaaatgatataatgagaacaattctttttaatccgtaatgtgtgtgactgccaaatattctcaaatgttccaccattttcatgattttttggctgttagaaataaaacgtttagaatttgtaccaaaatacggggatggatttaaacaatcaattgtacgttaagttcaacacatttgaaaatgatttatacgcatgcatcatgagcattattgtattattgtttattttatataggtcccttttatatattataaaagagtgcaataaatttggttacgactttgaaactcatcgagctttcaacaatg

SEQ ID NO: 616 - DNA, 3000 bp, Unknown
  misc_feature (1)..( 3000): cDNA_ID_1689470_gDNA_ID_1592358_Annot_ID_152339 3000 nt of promoter + ATG
tgttcattccaatgaccaaccaattctcatcaacaaagacatgttgaccaacaatcaactatccgaaccagtcgaagatcaaaacctccatggtttagccgaaatatcgactcttcagagatgtggaggtacagaggaaattaccagaccgggtcaagaccaagactataagagtcaggagcagacttgctccgtgttctgtgagatcgaggtgatagcagagaggttggaagagtccacaggagacagttggttaatatcgttaagagacaagctcgatcaagcacatagagacgacgacacaacgatctggggagagctctgcatctacaaagttccacattacctgaaaaagaaggacaacaagttgtattcccctcagaccgtttcagttggtccttaccaccatggtgaggagcgtctctggtctatggagtgccacaagtggcgtgcggtttataaggttttgaaacgtaataagaatcaccgcatagaaatgtatactgatgccatgagagagctcgaggagaaggctcgtgcttgctacgaaggtcccattagtttgagcagtaatgagttcacagaaatgcttgttcttgatggctgttttgttcttgagctcttcaggggaaccgttgaaggattttccaaaatcgggtaagcgtaattgcatttgctggtttttccggttatcccatttaatttcttaaccggtattattgataatttttgttttctgtgctaagtagatatgcacaaaacgaccccgttttcgcgatgcgaggattgatgcattcatttcaccgtgacatggtaatgttggaaaatcaacttcctctgttcattctcgaccggttattagagttacagctcggtacacataaccaaaccggaatggtggcacacctagcgattaagttcttcaacccactattgccaatgatggagacgttgaccgaagttgaccaaccaaaactcatgaacgggcaagaaaaatcattggacatacttgacgataagggcaaattgcactgtctggatgtatttcgtcagagtctgctccagtctaatcctacaccgaatcaaagatctagactaatgaggttgactaagaatacgtatgtggtggacaagcgattgcaacaactggtagattgcgtgacagagctaagaggagctggtgtaaagttcaggagaaggaatactgaccggttttgggatattgaattcaaaaatggttatctagaaatacccaaactactaatccatgatggtaagctaaaaagttttcatttctttcctactttttattcattactcacatatgtttgtataaaatctaattttatctgtagaaccactaattcctaaaacttacaaatcccctcatgtttattgtaggtaccaagtctctcttctcaaatcttatagcttttgagcagtgccatatcgagtcgagcaacgacataacatcctacataattttcatggataatctaataaagtctaacgaagatgttagctacttgctctatcgtggtatcatcgagcactggcttgggagtgattctgaagttgcggatttgttcaagcagctatgtcaagaagtagtttttgatctccaaaatagtcatctatctcgactgtctactgatatagactgtttttctaaccgtaggtggaatgtttttaagagaatcttgatatacaagtaccaggtgaaccttaataatccgtgggcatatttttcattttttgctgcagttgctctgctacttctcacattatgtgagagtttcttttctatttatgcttattataagccaaacccttaattttgttttttgttttgttatatagtttttactaatatggaatgttaagtttttctgtttttttttccatcattttctattttcttcttttcaaaattggtattgtaatttttgggttttggaatgttgttgaaaaacaatactaaaaacgttgatttggtgggtaagcataactaacatctcagaataatcaagtcttagactatgaatgagaccagtggaaccggtggtttatgttggtgcatgaattagcaccttcgacaataccgacttaaaccagagagattgtgaataaatcgagaaagagaagacttccatttaaaaagaggaggatctcacgaaaaatagaaggaatgaagattcaatctttagataattaaaagtttagcatatccttaaactgtctaaatattgtataaatagagggatttgtcctctattcaaatcatctgcaacttaatatagaaaccctatttttcttacattgttctgaagcaaaagccctaccttcgttcttaagcaaccatgttcttcttttcatctagtctttggttactttagagcgaaagaaagaagtgaatttatctaattctttaatataaattcattatttgattttcagaattaatagtttaaaagtggtttgataattatattaccattcaacaacattttgcaaagtgtagtacacaaaataacttgataacaaatttataaaatagtaatatgttctaacaatacttaactacaaatgtttcttattttttaggaaacgcggcacacggcacaatgagatgcttttatagaaaaactacaaaagtgaaagaaacacctcaacattttttcttataagactattttcttgtagtctttctttaagactttctttcttgtagtctttctataagagcacctcaacattttttcttttttaataagagtaattgtttctatcaagagtagttgaagaaaagtcaaagaaacatcgctcgcctaggcattcattatccaatacgtttaacgattatttaacacattttaagtataagtatgattagatgtcaatattggtagttgtcattacagaaaaacaagtccaataatataagcgaccagtcactctcaaagtctcaatctcctaaaatacttcaacaaaacaaaaatg

SEQ ID NO: 617 - DNA, 961 bp, Unknown
  misc_feature (1)..( 961): cDNA_ID_1533420_gDNA_ID_1592380_Annot_ID_152372 3000 nt of promoter + ATG
aatggtgaggagactatgcaggaggagattcttgagacgattgatgaaacagcaagagaaatcagaagcagtaggaggacacttgaagaaggtttggcaaaatggaagcagaagaaggaaattggtggtggacagaacagaggaggagatcatcatgttcggctaagttcaagaaccctccttatatgatggatgtaaaaggtctgaatatgatgatgaatggtgatgggacatcatcctcagttgctgtcttgaaaccaacaatgtctattgggcagatacttagtaggaaactacttcttgctgatgagtcagcgatgatgatgaatgggagagtttcgttgggtcagattcttggaaagactaactttggagatagagagaaggaaaaaaggttcaatgggaagaggaagcggttcggattcgcaaacttgtctgtgatgttgaataaagagagtaagaagaagaataagaagaagaagatagctttgaacttaagttgttaaaagagtgattgaaatggtctaatctttacattaggacttgttgtttgtgtgttatctatttgttttcgatgtgtttattggtgtatgctaaatattgawatgagatgtgatttgttatatctttatgcttattccaaagtccaaactaattgcatattcgaagataatagccacatgtatgagatgacgtggttggataatagcttgtagtgttaaaatacctcatttgacctttcgacattcatacgcaatcgactcattccacggatctgcttactcattgattctcgataaattgttcttctcccacagacaccagattctamcaaatcatttgctcgaaaaggtaaaatctttctctacaatttcggttgaatcttttgataactcgatatatctcttgtaaagactcttgcttgaatcttctgatctttttttctttatcaggaatcatg

SEQ ID NO: 618 - DNA, 2623 bp, Unknown
  misc_feature (1)..( 2623): cDNA_ID_1020940_gDNA_ID_1592381_Annot_ID_152376 3000 nt of promoter + ATG
aaacccgaatgatccaacacaacagacacagggcacaaaagaagcaaagaagaagattcatggaaaagatttatggctttgcctttggtctcctctgtttcttacatcaaatcctcaaaccaattccattgttctttctctctgagaaaaggttagtctgatgtttctcaccattgaagcaaaactagtttacccaaattgacaatgacattgttgttcatgtgtttgctttcgaaatctgggtttctctaaagcttatgatactaattcttgtcttctttacataaaattttagtaatcaaaggtttaatttcatttgggttttggatatattgcagaaaaatttgagctttcaagtttcttcattgtgctttgttctcacttcagctatgttgatactgcagaaagattagaacttgatagattactattgtggagctctcatcagaagataagatttagtaaaagaacgttttctcagagaattgttgtgaaaatgtctgcttcaactttgcctatgaatcttggcaaagcaaagaaggtttggatatggactatgtgcaaagaagtcatgaccgttgcggtggaacgaggctggaacacatttatattctcatcggataatcgaaaactatccaatgagtggtcatgtaacaatgcagccctccatttgacgtgtttttatatatctatgttcttagttttacagtatgctcaatggatttttttgcagctattgcattgatggatacattgtttattgaagagaagaaagttattgatggtacggggaacgttgtagcttcggtctttgaggtttcaacacccgaggagcttcggagtttgaatatcgaaaacgagcagatagagaatattgttcttgatttcttagactggaaggtaataactttctgagcttgaagccttgaacttgaactcactgtgtggactatttagtaacacttgaagtttcgtttcgcagtcaatcccagcggaaaatctagtggcggctcttcaaggaagtgagaaaacagtatttgcagtttcaaatactccctcagaggctaaactattcctagaggttgtgttagtttctgatgttgaattttagttttcaagagatgtttattcttagtgttatgcttggctctctaggctttagagcatggtctcggtggaatcattcttaaatccgaggatgttaaagctgttcttgatctaaaggttactatctccacaagcgtcctttcattttgtttaaaaacatggtctcttatagttactgttttgaaaaactattaggaatactttgacaagagaaacgaagaaagtgatacattaagcttaacggaagctactataactcgggttcaaatggtcggtatgggagaccgagtctgtgttgatctttgtagcctaatgagacccggtgaaggtcttcttgtatgtttgcctgtatatacactctttctccaacataaagtactaatttttactattcttataagcattgaagtatcaatctttactcttcttacaaggttggatcttttgctagaggactcttcttggttcactcagaatgcttggagtctaattacattgaaagcagaccatttagagttaacgctgtgcgtttttttttctttcatttttcacttgctggatctattccttttatagatatcattcactaaaaatctcaatgtacaggggccggtgcacgcttatgtcgctgtaccaggtggaaagacgtgttacctctcggagttaaggacgggaagagaggtaattgttgttgatcagaaaggaaaacagcggacagcagtcgttgggcgagtgaaaatagagaagcgtccacttattgttgtggaggctaaggttcataaatcacattctttactacactctagcaaactgttaattaggattcaatttgagttaacagcttcatcttttccagcttagcacaaaggaggaggaaacagtgtatagtatcatcttgcagaacgcagaaacagttgcattagtcactcctcatcaaggttcttggtcttgagtctcaccctcattgcagtatgctactagttattagttaacatctaatagttactttttgcagtaaactcatcaggacgaaccgctgttcccgtgacctcgctgaaacccggggatcaagttttgatcagattacagggcggtgcacgccataccggtatagagattcaggaattcattgtcgagaactgatcaaaaactttcgggtaacattgaaacatattaaataaaatgtgtctatcaaataaaatgtgtctatcaaataaaataggttatgacatgtattctatttataagactagctagataggttatgacttgttggcacattatttctttttatcattcaacaaaatagattgaccaggaaaaaaaattaagtgaacagccatgaatctctctgtattgtgtggtattgtctgttcttgtaactattattaggatagttgaaaatgtatatatacccttcaaaggcctcaatccaaagacgcacttccttcattttcctttctagttttatatttcaagttcctttttttttaaccttgccatcaatacaaccatg

SEQ ID NO: 619 - DNA, 312 bp, Unknown
  misc_feature (1)..( 312): cDNA_ID_3057789_gDNA_ID_1592405_Annot_ID_152410 3000 nt of promoter + ATG
aacacaacactagtctgcataaataacgtgtctagtgataccatttgcttgattctcatttttgatgaatgagacaagaagtagatagatgtactaggtggggttttctttatagtcaaaatctgaacggtctcttaatgatacgcagtgtttaattagttttctattgttgacctcttcttttacctttgtcaatctctttgtagtgtgcaagtttcggtgtcttaccactttgtagtctacagtatataaggtgaaagtatatgtgttaaagttcttactggctggtgtacccctttcttttcagaaatg

SEQ ID NO: 620 - DNA, 403 bp, Unknown
  misc_feature (1)..( 403): cDNA_ID_1399307_gDNA_ID_1592442_Annot_ID_152473 3000 nt of promoter + ATG
gaaaaaagtcgccagtatttcgctatcgaaaatcgtttatttatatatttgatgattatccattagagaacccttcaaaaaactctccactcaactctctctggtcagctgtctcttccccattctctagggttttcaagctcaacctcaagctccactacgatctcttcttcttctctaatctcaggtctgaatctctccttcttcactatctctgatgctttttactgaatctgattgaggaaactttccattttaggatttgttgatcaaatacactcggtttaagaattaggatcattctcttttcgatctagtttcattagactcgttcttttagctcttgattttatagatctcgttttgaggaactgattatttggttgttgacagttgaaagatg

SEQ ID NO: 621 - DNA, 1309 bp, Unknown
  misc_feature (1)..( 1309): cDNA_ID_1588390_gDNA_ID_1592445_Annot_ID_152477 3000 nt of promoter + ATG
  misc_feature (1)..(1): n is a, c, g, or t
  misc_feature (41)..(42): n is a, c, g, or t
ngggcttagggacatgttggaggactggacggaggcaacannggatagcagcgtggagagagaggacgcatatgaaagaacagaagaggatgatgagaaggaggaacgcgttggcagcaaagtcattggaatgagagtaaggcttccagccgcaactatgagaggtacatgtagacgtaagttcgggttggggatcagatgatagcagcagccgcattggaactcagacaagttcccaaaaacctttcatgtcttgttgtgtttataaagaaagaacaaaagagagcattaaagagaagatgacagacaccaaatggtggcttaatttggtcttacttgtgatgaaggagacgtggatgggtcgagagaaagggaccacttgagttatgaagatggattggtggtgaacagatacatctgtccatttcccattcttgtagaccagattcttcatgataatgctttcccctcctgccaaggcaactctacagttcccttttttctttaaattttatatgctcatttagtttctatcttatcctaaacaattgtcttcgacgatattgtgagagttaaagatttgaacttctcatacacatgcatactagtccagttacgtgttctattcacattacaactcttattaactgatataattccttactactactcttccatttccttttctaccaatgacaattcagcgtttcatgtatgtaagggcttagtgtacggttattaggctttgggttctacaatatggaccaaagccaacttcattattcattccatcttttcctttatgcctgcctcaatcaacgccaacttcttcgctattatttactgtccacaaaaatacaaaatgctcgtccataaaccccccaaaaaaggaacatgaaagtctcttcactttgtatatgtcattttacagtaaagaaaaaagaagaagtaacaaaagtccaaattagaaaggaaaaaaatgcacaaaaatgaaagaaagctaaaagtgtagatatgtgctggttctaattttctagagcaaatgattaattatctcattagtgattagttatttgaataaacagaataacaaaattcaaataaacacaaaagtgccgttaaacttttaaagcccatagttaggcccaatacagatgaaaagtccgttttagaacagagagaatacgaaatttgaaaagaagagagtgggacattggaaacagaaaaaaccaaattccctctgcttcatcttcttcctcattttcaaattcacagatcctaatcttttttgaaccttccatcaataatg

SEQ ID NO: 622 - DNA, 709 bp, Unknown
  misc_feature (1)..( 709): cDNA_ID_3057848_gDNA_ID_1592449_Annot_ID_152484 3000 nt of promoter + ATG
  misc_feature (3)..(3): n is a, c, g, or t
  misc_feature (6)..(6): n is a, c, g, or t
ganttngcattttcagtgacatttttctttaaaagctaaattctgttttagcgaatcgaagcttaattctgttgagtttctatccaaagtccctgacgagacattttgacaaaaaagtttggttgtgacttgtaagtagtctagtggtcttagagtaatgttttgcaccctagtttgaaccttatttgtaaaagatgtacgaagcttttaatagaggatagtttacaagttgaccccgaactgaggaagaagattacgatttacgaacctagaacttcctcccgtgaaccctcgctcgatagccacaaaacaaattggtcgcctggtcgggaccattatgctctctattactgtttttttctttctttaataattattattgattgattttgtaagtcggtcaagagtctaatttacctttttgcccatttctgacacaaacactctggacatttcaatcaaatgtgacataaaaatggtccaatcacgaaattctcttttatttgccgatcccagtttatgtttcttttgggatataaaccattcctcatatttattcggatccatgttgttgtgtttttgttaaccctgcagaaaatactatatacacataatactataaatgaacatctataagtactagaccacttttttatatgagcgttgaatcaaaaaatttgggcaattttgtaatttcaacgcagggatg

SEQ ID NO: 623 - DNA, 1843 bp, Unknown
  misc_feature (1)..( 1843): cDNA_ID_3057852_gDNA_ID_1592452_Annot_ID_152488 3000 nt of promoter + ATG
ctttccacgctttaattcttgttccttactcctgtgtatttaggaaaaaaaacatagctggtgagattgtgctattttgtttcattaacatatcgtttcattctttgcaatttgactccttttgcgaactcagtagtaaatgatttcacaggttgaaaatcttacacggaaggcacaacttcaagaagttgaactggaaagaacaaccaaacagctaaaggaggcactagcaattgctagtgaagaatcagcgagatgcaaggcagcaaaagaagtgatcaaatcacttaccgctcaagtaaattccaaagtttcctctctgctgttaaaatgaatgaaaatgctctatgcaacttactgattttctcaataaaacatgcagttgaaagacatggctgaaagactacctgttggatcagctcggactgtcaagtctccgtctctcaattcatttggttccagtcctgattacgctgccccttcttctaacaccttaaaccgtccaaacagtcgagaaactgattctgatagcctaaccaccgtcccaatgttttcaaatgggaccagcacacctgttttcgatagtggaagttaccgacagcaagctaatcatgctgctgaagcgataaatagaatcagcacacgatcaaaagaaagtgaaccccgtaacgaaaatgaatgggttgaacaagatgaacctggtgtgtacatcactctcacagccttagctggaggtgcaagggatctcaaacgtgtccgtttcaggtaccagaatgctttttttttgttttatagtcttagctggaatgtttggatgctcctttttattggttatgaaatgagcttaatccgaggatgtctttgatggcagccggaagcggtttagtgagaaacaagcagaagaatggtgggcagagaacagaggaagagtttacgaacaatacaatgtacgcatagtagttgataaatccagtgtgggtgtaggaagtgaagacttgggtcattaatattcttcgctaacccctgataacacagaaaaccctgagtttcccactcatctattcttttttagtttctgtctacgggtttcataggtttatttggggattataaccaagagagaaaatagttttcatcatagtttgggtgtttttcatatgtaaattcttttgtaaattccacaagcatacattgtttcgttctttgtctcgataaatgttattatttgatgttgaaattcaaacagcattaatggtatggtgtcagtgcgagcttatacattttagatgtctatgggcaaatttaaatgatatgcttcttaacatcataatactgtatttttttaataggcttctttttttaacaaaatcatttaatgcccctttggtatatacaaattattacgaatgctatcttaaatgcaattaattttgtatcaaaatctattttcagattcattcttttgacatcatgaatttctcatgacggaatacaattagcatgttgataccattggaaagtacattttagtaatgaatttaacacgttacctttttgtttgatacaccaatactctttattcctggtcaaccactaataccgtttacatatatgtaagataaatttatcttatacgataaactcagcaaaatcaaacaattaatgaccaaccaaaaagaattagatacacaggttttgaagagttgcaccaacctctgcctaccacattaaacacttgtttcttttgttggtcgaccaattctgaaaaaaaagttttactcatacataaaaagcattagtagacctttttgatatgaagaagaacaacaatactcataccatg

SEQ ID NO: 624 - DNA, 394 bp, Unknown
  misc_feature (1)..( 394): cDNA_ID_3630006_gDNA_ID_1592452_Annot_ID_152489 3000 nt of promoter + ATG
ctttccacgctttaattcttgttccttactcctgtgtatttaggaaaaaaaacatagctggtgagattgtgctattttgtttcattaacatatcgtttcattctttgcaatttgactccttttgcgaactcagtagtaaatgatttcacaggttgaaaatcttacacggaaggcacaacttcaagaagttgaactggaaagaacaaccaaacagctaaaggaggcactagcaattgctagtgaagaatcagcgagatgcaaggcagcaaaagaagtgatcaaatcacttaccgctcaagtaaattccaaagtttcctctctgctgttaaaatgaatgaaaatgctctatgcaacttactgattttctcaataaaacatgcagttgaaagacatg

SEQ ID NO: 625 - DNA, 2129 bp, Unknown
  misc_feature (1)..( 2129): cDNA_ID_3057865_gDNA_ID_1592457_Annot_ID_152498 3000 nt of promoter + ATG
aactgagtactctacacccccaactcctagcttcaaaagatgagtcaaagttatgcagattgcacttgaatccatggaataagataatggcgaaaagtttggagttgatgtgctcaaaattttgggcattgtagctcctatgtaagttatgtggatatgtatgattctaaggtcttttatagatgtgtgcaatcagagagggataatcacttagagtctagagttagagataattggaagcgattgaaacttatgttatgtggtttgacacatgactaagtatagcttatctccgattgttgtggtgaagaaaatgattagtctgtagcatagaaagttattctaccactaaattctagttgggtcttgattcttgactaatatgttagatgaataattgaataatggaattttgaaatagtcaaatgatcgaataagggatgtctgagttttgtaaaatagacataaaacgttcaagaactggttgtagttagtttataatgcttcgttttatctagttataatattagttcattcattgcggtaatcaattttagaaaatgtgaagatttgagtatttttttcactttggtatctatgtactatgttgttggaataagattatacaaattgagaattctccctccctctatgcgtatgtgtgtcctgtaatctgtatgcatgtatagttgttgacgttttttattgatatgatgactcacgtatttgttaaaaggatatggatgtatattttgtattcttgtataattgttcaaaggactgaaactagaacactatgtaccttttggaatgtcatgttatgaaaaaagtattgtctgtctttgtctccaattgtgtacattgtgatacactacacaaacccataagccctgccacttaccatttcttcatctcgtttcatttaatttctgttttcatctccttcatttaatctcgtatatttactctttctgtgtcagcttattgcaaactcgttacgtagtaacccatttaggcatttaatgtcaagattagtcttaataggtatagtggaaattgcaagttttggagtattcgattatcaaagagatttattattacatacgttattcaactcgtcttgtcactttaggttgctcgttaattatataaaccaacttcttttgttcattaattagtattactaaaaattttgtatccgcagatcagttatacagtaataaatcatctttggatgcgtcacaaaacggcactgttaattagaaacgccgcgcgtgcacatgacttcaaaaagaacattgtcgataattatgagaattgagtctttttttggttggttccgtaggtactaagtgataaccatgaatttgtctcatcaatcagacaatcactatcgcaagaaacacataaacatataccattagtgcgaagatgtatcactaagccaattcacttctttagaaattaaaccaggaacgaaacgagtctagctgtctaggctatggtaattaaattgccaaaagaaagaaaggttctgatgtgtttggaacacaaagatagcccacacacgcataaaactcatgccctagaatgtagaagaacctagacctagtagtagaaaaatggtgaaaaaagtgacagagtctttcgatacacatagcaataaaaaagttaacgattgtccctaattaatctgtaagcaaaactaagggcgacaacttatatatgtgacatttttgttacaaattgttacgtgggaaaaaatacatatgtttacgaatattgagaaacaattttgtacaaattttatatctaacttttaaatgtggaagaaattaaataagttgctaccgatttatcgacagcaaatggtggttcaccagtcagtcaccatatgttaaattgttatcccgataaggatttttacttgattttaccaacgcagcaaaacaaaaaaaacgaacggctgagatgtaattagagaacatagataacccaacacatgcgccgcagaggatctcaccgagaatgtagaaccgggcacgagaaatagcgtcagattacaaagagcgaaaagaaggagggcttcttcttccaatttgtgatcggtgctgatcgatttctccatg

SEQ ID NO: 626 - DNA, 310 bp, Unknown
  misc_feature (1)..( 310): cDNA_ID_3057878_gDNA_ID_1592462_Annot_ID_152504 3000 nt of promoter + ATG
aataagatccgagttgtgtgctcgwtagagaaatcgggagtcctaaggaccagcgagcgagagagattcaaaaatagaaattttacgtaaagagaattakaggtgcagcgtgaaaagaggcaacaattccgtgcataccgaggtaccttcacctgcataaataggtattcacaacatcaccaaaagattcgtcaagagcaagagaacatagtttcttcttgcttttgagaaaaaataattatatatttttatataggaaagggttaatttattaataaaaaaaataaaaagaagcagaaaagagataatg

SEQ ID NO: 627 - DNA, 180 bp, Unknown
  misc_feature (1)..( 180): cDNA_ID_1691030_gDNA_ID_1592466_Annot_ID_152508 3000 nt of promoter + ATG
tgtatttattgaccgattataaattttaactaacaatacatgtgttcatcattatattccttttttgattttttattgaatgaataatctaacaatsttttatataataattatatgtctcttaaccatttttcaaaagttgatatacatcttacatagaaatttatgtattmagtgatg

SEQ ID NO: 628 - DNA, 784 bp, Unknown
  misc_feature (1)..( 784): cDNA_ID_1691109_gDNA_ID_1592492_Annot_ID_152550 3000 nt of promoter + ATG
gaggatatatcacttagaccgttagacgtcacgtgtaatcgtgtattaatgcttgcaaaatgtggttcaatcaaatacccaattaagggataggagaactaatacaaaaatgtggttcccgtaaacaatgcatgagcaagcacatgactgacatgagagatagaccagcgaataaaggtttagtattgacgcaccatgcaaagcgtaacggtgaactggagctctactggctgagataattcacaaggtgaaggtgagatatattttaggagagccagaaaggtagaaccccgagacgagagagaccaagtgagttttggactagtgtttttcaaagaatgggtctagaactatttattaagtgccaaaaaaaaagacaaataaaagmacgatttttctatataggactactcgattaatrttaacaaaaaggcgaataagaagaaaacatatatgtttgttttttttaaaacaaaaaccgtggaaatcaaaacaccagaaaaatgtggtagtgaagaaaattacaagagagycagtaaaaaaaaaatgaaccaaaaaggcaaaaattgaatacgtggcttcaatgtagacccagatgatgaacgtcgcatcatcttccttacgggggaaatctcacattttgaaattacagaaaactccaaagaacccaagattgaatattgaatattgaaaattgaaaaaatctctctttgaagaattgaaatctctctttgaagacgaacgaacctcgttgattcctccattcctcttcggctcgtccatg

SEQ ID NO: 629 - DNA, 174 bp, Unknown
  misc_feature (1)..( 174): cDNA_ID_1691153_gDNA_ID_1592509_Annot_ID_152572 3000 nt of promoter + ATG
aaaccccgtcaccgaatcaacatccsacgcaaatcacaagaaggctaagttgggacgagccgaagaaaaagcaatctccgagcagttatagcaactaaagatccgggaatcaacgagaccagtttttgacccaataatatacgtttgtcttgatgaggagaacctcgaacaatg

SEQ ID NO: 630 - DNA, 1085 bp, Unknown
  misc_feature (1)..( 1085): cDNA_ID_3058135_gDNA_ID_1620302_Annot_ID_152651 3000 nt of promoter + ATG
gatcttcaccaccgagtcttgagccagatcaatatcgctcacagaagaacaacaacgataaatcaaagaagcattaaaagacgaaccaccacgaagaagggaaagagaatacaaaaatagatgaaccggagtgctcgtggagttgctgaacctagccacaatatgatgttcttgttaagtactatgtttacttgtattaacgatacataagatatatcatttacttgattactcatattttcgatccataataattacactacttccttttcctctagatttaaacttgctaacaaatatttttaaagattttaatggaaattgttaacattttatacaaggcttttatataatcaaatgaaactatagattttggtaacacataattaatctgttgtgctctctcttttattttactatgggaaaggtccaatgggcttaggcccaattatttaaacaaaaaaagattctaactttcttctaatggaaaagaaaatttgcgatcaagcaattactctctctctctctctttcttctgccatcgccaaaaacttgtcttttgcttctgggttttgcttcttatttttggtaagattgaatttttctttcaccccatttattatttcgtgcttttagatcgttgattgatctgtatcctgcagtgatcattctttaatttacgaaattgttttttgtgtgtgtgtgtgtgtgtgtgtgtgtgtgattgataatgttgttggggactttaggtgccatttttgtcgattttgtggtttaatttacctattgtatattgtgattgaatcgattgggagggtattgagaggtggttgtttcaatctaacaaaatcaagtgcaaatccattttatagccacttatcttctgctagtagatctacttgagttttaagagatgtgtcttctttaataccattgtggttccttttttaatttcatggcttaagtgaatgttttttggcttctttggttgctatagcttatctctgatttgattaagtagaatcctttgtactgaagtgactttttttgtatggatctaatgtagaatatagtcattggagatg

SEQ ID NO: 631 - DNA, 3000 bp, Unknown
  misc_feature (1)..( 3000): cDNA_ID_3058107_gDNA_ID_1620302_Annot_ID_152667 3000 nt of promoter + ATG
atcaaatctaaatgaataagtaacttttttataccaaaaagtagaaaaccaaacaaatgcaccactggcttccaaattggggtatatgcgaaacgatttagtagcttaagtttctaacttagcaaatttgaagcagaaaagaggaactgagagttccatgataaaaccaattgtgaaatgagtcatttcaaatgagagctgagaattagatgttgcaaagctcttcacaagcacaatctagaggaacaaaccaattgtgtactgcatcatcataactaaagtctttggcgttcactttcaagccatatccagcgtataaatgtaaaagaaaagaaaaaatcaaatcaaagcaccaagatcaaactctaaccatacttataagctgagaaagaaaaacatcaaagctagttatagatactagacatgacacatttgaataagtgcttaaagcacatcattatcataccactggttctcttaactaatatcaaatgtttggtattacgtgtatctatcagattgattgaaatagaaggttgaaacataaagcaaggtaatgtctctcagaaacgattccacgttattatcaaaatcaatctctatcaatcaaaagcaagaggcaatcacaacaaaaggaggaaaagaaaacctacgcactagtgatttgaagtaaaacaaacatgagaacgacatttttgtgattctaatccttgaccagtcacattcaacagcgaagaaacaagtcccagaaaaaataggccaaattcacataaagaacaaacacaaattcccttaattaaaaagcaacctagctaataatctcgatagatcaccaaaccatggattcgcacaaagaaagcttaccgatttataatggatcaagtgatcagaagaaagctaaacccttttcaaatttcaaaacttttagaactccaccatgtaattgatctaattggattaaggaacagcattgaacatttaggtctacaagaggggaaaataaaaatcaaaactttggtcttttgattggttttgaaatctgagtttccttgttggggcgtgatgaattaagcagcgactagtcaacgttccttgtttacagtgtagagtagattgctccaatcatttttattggactcggaggtaataatgtttcactttttttacgaacaggaagaaaaatatgcaaattatactgaaagccctaaacttttgagtttatcacatttttaacctaaagttatcagttgtatcaaaatgatgtagttatattgaaactctcttcaccagttagaggctttaaagacttgccgacaaaatgtagaagtaggtgtatatctccggccatttcagtaactagttctgttcttggatgtcgtgtgttttgtctaagggagaagcgagaagagattaaaagattagaccttttcgcattcatggattcgaagttgagaaattttgtgatgggtctgtttgtgatgactgcgatcttgaataattctggtgttggcgcgtggactggagagattcgtggtagagttgtgtgtgatgtctgtgctgattcttcaattggaccagaagatcatgttcttgaaggttagtatctctgtccctcttctttatgtcttctctttagtcagttttagatgttcgattgctgggaagaagaacaattgtctgattttgagaaattctttggatttaactgtgtagaactctggattcacttttaagtagtgcttcttcagaaagagtgttgctttgctaatgttctgatggatttcttcagagtgattactgttcaattcagtagtagttgtttctcactcatcaaattggtgtgaatttcttcagagtagtttattagcccgaagcttgttggtactgtttgttcttatttcttgagcaaatggtgcatatcttggtgagtgtgtgtctacagtttttgcagattcttatttttcttttttaataacataaatcaaagttagaggggattttgtttagtatcatctctggtctctctgcgacataaaaatctgttatgttcattttccttatgtttttagctgcgcttttgtatatatcctatagtgtcaaatgttttttgcagattatgttatacttctatgcgaaatcttttcaagttttctgattcatatttggttctctgaattccatgaatcaaatttaggagagcttatggcttggatcatctcttgtctctccggaacttagtaattagtttgttcatccttgtgtttccagctagttttatgtattatccgatagtgttaatgatttttccacactgcttcatattccaaatagtcttgttgataactcaaaaccgggattgcttagaagccactcggttttatgtgtttaccattctgctagtgaaatgatctctttggcacttttaaccgtgttatgtgatccagtcacttcatatcattgacgtatcaatcacatttgcgagctgttattgttcaatctttacaggagctgaggttgcggttctgtgcataaccaaatctggagaagttgtgaactaccaagctttcacaaactcaaaaggtgtctacacagttgcagagacaatgccagagagcgaacgttgggacgcttgccttgcaagacccatcagcagcttccacacaccttgcaatcgcctacaccaaaccaataccggaatcaaattcacttataaccgcccttccggtttctttcatgccgtgaaaccatttgtgtatcgacctcaatatgcaccttcttattgctgattcaaagacaccttgtaaaagtccttgtaagttgtaatactaactagtttggatttgtgaaatgctaatatggatcaagcttaaagtgttttgatgtaaggataagagaagtttgtttatataaaagtctttagtcaaaagtcaaagggagactagtctcacaaggcggtgacgggggaggtaaagaacaattaattttgaatgggtcctacag

SEQ ID NO: 632 - DNA, 3000 bp, Unknown
  misc_feature (1)..( 3000): cDNA_ID_2990421_gDNA_ID_1620302_Annot_ID_152671 3000 nt of promoter + ATG
gaaactttgggttggtgagtcaggaaatgaaaatgataaggtaacaacaacacttcaaagtgctgccctaaagttaagttgcaagattttttttgatgaagtttttttttttcttgtcatagggagaagatgtaatagcaatcttaccatgggaggagtggtgggcatttgaacaaacaaaggatgactcgaatcctcagattgcactgctacctttgcatcccgatgttcgtgctaaatttgatgttgctgctgcttggaaatatgctcgcagcatggagggtaaaccatatggttatcacaacttgatttttagttggattgataccgttagtgaaaactacccgcctcctctagatgcccatcttgtaagtttttgtttttcatttctcacaatatagttcttgatgaatgaatacactttcaaatcgttttaacttcgggcttctctttctttcaggttgcatctttcatgactgtttggagccaaatgcagcctgagtatgctgctaacatgtggaatgaagccttgaacaagcgactgggaacagaggtattaacatcttcatgattcatagatgatttttttaattaatgcttatccttattagagatggtcctaatatctgattcttctgtactatcgtatccttcatgttgtatacgattctacatttttctctgctcttatagtttgactctgttccttgttcttcgttttttttctcttcttctctaacatggttaaaattgcagggtcttgatctttctgatgtactggtagaagtagagaagcgtggatcctcatttgacaaattactggcagtacctgaactagacgattggatatacagcgatggtaaatcaacctcatgcatcgctttcattctcgaaatgtacaaagaagctggcctattcggtccacttgctagttctattcaagtcacggaattcacggtaagaatttgtacacagtctctgcttcccttcatgcacgcaagctcatgtgaccattttcatttcttaatctcttgaatctgcagataaaagatgcttacatgctcaactttttcgagaacaacgcaagtcgtcttcctacatggtgcaatgacaatgacagtgtgaagcttccttactgtcagatacttgggaaatacagaatggaacttcctggttacaacactatggaaccatactcgcacatgaacgaacaatgtccaactctgcctccaaagtacaacagaccagataactgctaaaagaattctcctccgatgtctgtttgattttaggaaaaaagttcaaatgtattaccgttgaaaactcaacaattactttatctgtttgtatataactatatatatatcattcaggtttgtagcaactgctcatcatgtaaactgtgtttggatatgatacacacaaatagaaattacaagtttcatcttttggttatgtttcgtcttccggtttagtttggtttatctggattaaaccggtctcatcttcatcgtaaagaaagaaagtagaagcaaagcttgaagcttttggatttctaatgtgtgtgaatcgtgatgttgtcatcaggacagatgatgggccatgtcgtggcccgaactcagatgatcttgtctcgaagtaacttcgccgattgtatacggtgtcagggcgtgagagtttcaaaaaccctaaaaatggggacaaagcgacccacttgcccttcttgcgataaacctagccagctctgtctctgcaagaagatgagatctccatgttttgataatcaggtgagtattactattcttcagcatagtctcgagagaaaacacgcgctaaattctactcgaatcgctagattagggcttaagaatgttggtgtgactactgttttcgatgttcatgatgaggcagagttcttaatcagggttattggatcgggttgcagcaagattgacacgaatcatttggattctgagtatagggtagagaatgttgcttctttggaacttgatgatagctttaagttaggtagtagtggcaatgtggagaacttagaatctgagaagaatgtggtgcttgttgatcatggaagcttggaaattgctgaaagtttgaatctttctcaacatttgagtgaaatttcttatcgggattcgcgggttagggataagataggttcttatgaagaagatttgataaaaatctgtatgaagaaacatggtgtcatcagcaatgtctcacactctttgatgcttgaaaccaatgtgaaggttcttagttttgatcatatattggcttctcctgcagccatggatgtcttggcaaaaggttttatggtaacaaagttttcagaaggaaagcaagagtttgagctcgaggttcctcctggatcagctttgttgttcccgagcgaagaatcggtaaagatcaattatcttaaagagaaagaagagttaaaagtaaggaatctgattgttcttgatgggacttggtcgaaggctagaagaatataccttgagaatccatggctaaagcttttacgttgccatgtgaagctagaaatagaaggtacaagtttatacaaagaagtacgacggcagccaagagcgggatgtttatccacgatagagagtattgtatacgcgatgaaggagatcggtgaagatcctgaaggtttagataatatgttgaatgtttttgaatccatggttgaagatcaacgaagatgtaaagatgagaactttaacaagattatctgaaagacaaaattactctgctgttgtaacttgtaagctgaatgaattagattcttcaattttgataattatgccgaaagttggagtcgtttttggcaatttattaaaacaattgaagatataaatgttggggtgtgaacaagaaaaattcatagttctgggccaatatgtaaattaggaaatataagttttgttgagtaagacttttgttaattttgaactcagagtgtgttttcgtttccga

SEQ ID NO: 633 - DNA, 3000 bp, Unknown
  misc_feature (1)..( 3000): cDNA_ID_2044638_gDNA_ID_1620302_Annot_ID_152673 3000 nt of promoter + ATG
aataaaggttcccaaaaaatgtgatatattaaaagagagagagaatagaagatgcctcatttgtggttgaatacttacatgttggggaaaatgagatccaccaccagcatttccagtagccaaattagtgtacggaacaaacttggaaggtgaagatgcatgagacaagaaagggctgattccaatttctggttgaacagcttctggaactggtaacataggagtattgcttggcacataacccatattcgcaacaacaggcgtcataccggcatgagctgatgtaagacgttttgcaagagatggggaaaaagtctttgctcctggattcagtttaaactcctgaattcaaaaacgagtaacaaataaagtaagatgaaacaatgcacaagtcatcaagctgccataaccaagaaacgagcatctcaaactaacatatattctgaatatgagaaaccaatacgaattctttatcaccttagccttcttgtcagggtctgttgcctgcgtaggtggtaagctatttgtagataccaccaaaaccagactcacttctgagttttcatccacagtagtgctctgtgatgaagaattttcagttgacgagggtctctccgtagcatcgtgaaaaccattactagaaggttccggcattttctcttgttctatcggctttacacgttcagacatgttgtccactgtcattataacacgtgatgagacacatgtcaggaaacattttcttgtcaaaaaggaagcagaaaagagttcatcatggttctgtaagtaaaataaaaaagtttttcccaaaaaggaactcacagctacaacttgagcttctggcttcaacctgcaataggtaaatataataataagcagctgctgagcaatatcttgaaaaacagaatgaaccaattatgtgcaagactaacgttatcctcctgatgaacatcagtaatttttttgctattcttcaaaatgcggactcctgcctgtctgtcagcaaaagaatatacaagaatcagagagttacctactgagcacagagaggtttattgtagccagaaaactagatagctaaaactgatatataagtagaagtttggttacatattggcaaatattaagacggagataaagattttaacaggacactaattatataccaaaaacagtatacttatgatccataccgttgatggttcagtgagctaggatgatatttgttctgcaaaagaggaaattggaaaaggaatcaagagagtgaaaaccaagaaagggactcagactgtgaaagctgaattaaacaacatgacaagatgttaactaatgactctaggcaaggcatctattttaaagtcaacccattacagaaaccgaaaaccaagtcatctactttaatgtcaacccattacatcctactaaatggaggctggctttaacttccatcttggggagacacaagggcccatggaccttgtgagctagacatcaactctatcaccagttcccacaacaataggagaattacttagttaaattccacaatacaaacaagacaaagctacctgtaaaataccaacctcatctcttctccctggctctttcatggcacctgcggtctccccagatgtcaaggttcttgctttactttccaaacaattttcacgtttcgcggaattcctatttcataaattaaagagattaaaaaaaaaaatcataaagccatagaacaaatcgacacaaaactaaaagacaagagactgcgaggagcaaaacaagattcataatccttaaccttctaacttttctatctaaatatgaacttataacaacattaactacaaaggttaccttctacgattagtgccccttctgttcttgccagaattgaaggaagaaactgccacggccgacacgacattttcaccctcaatctcccctgcaacattggacgaaagcgagactccctatgaaaataaaaataagaaagtcacacaatctggctttaaacgaatctctacaagtaaaatcaccatagaaaaaaagaccaacctctgcaacaatttgaacaatattggaagacaaaatcacaagtgtctccacaatcttcccactttctacattcgatttacttcttcccttcttagtaagttttgcattcttcaacacaatacctaaattcagaatcaaaccagtaaaattcagaaacagtcaaacagaccaaaatgctacacaaatcgaaaaaaaactagcaatgttacaatgaatgattcacaccaccaattaagtaatgagcataatttcgtaagatcctaatcaaatctctgtgatctccgacacaaattcaaagaccaatttcatcaacgaaaacacaaattaccaaatcaaaaccacattaaaccaaaaggaaacgtactgaattcattctcaagagagacagtgtagaatatcccagaaaacacagagccatcgttgatatgcacatggacttgtaagccgatgatacacatagtagagattaacagagcttcgttcagcgatgatgatgatgacgaaggagaagagcgtgagatctcattttccaatttcttcgcgattgccatattcaaatcaaatcaattcgttccaaaatttcacagtccggtgtactcgcatctatatatatatgtatcgcaagttcacaacaaaagaagacgaagacaaatagggattcgagaatcagaagagatccagagaagatagacgagggaagcgaaaaaaaaaatgctttgttattgggcctttgtgtatccttattgggcctagattagtttttttggtaattaaaaaaagcatcgtcactcatcgttaaacccttcaattggctgcttcaacatcttcttgtgtatctatcaaatcttaaaaccctaacttttgtctgctcttttgcaaattctagcctctcaagtcgtaagctttccatatctggagctctaacttcgtgtttgtgtcaagatg

SEQ ID NO: 634 - DNA, 3000 bp, Unknown
  misc_feature (1)..( 3000): cDNA_ID_3058099_gDNA_ID_1620302_Annot_ID_152672 3000 nt of promoter + ATG
aatgtggtgcttgttgatcatggaagcttggaaattgctgaaagtttgaatctttctcaacatttgagtgaaatttcttatcgggattcgcgggttagggataagataggttcttatgaagaagatttgataaaaatctgtatgaagaaacatggtgtcatcagcaatgtctcacactctttgatgcttgaaaccaatgtgaaggttcttagttttgatcatatattggcttctcctgcagccatggatgtcttggcaaaaggttttatggtaacaaagttttcagaaggaaagcaagagtttgagctcgaggttcctcctggatcagctttgttgttcccgagcgaagaatcggtaaagatcaattatcttaaagagaaagaagagttaaaagtaaggaatctgattgttcttgatgggacttggtcgaaggctagaagaatataccttgagaatccatggctaaagcttttacgttgccatgtgaagctagaaatagaaggtacaagtttatacaaagaagtacgacggcagccaagagcgggatgtttatccacgatagagagtattgtatacgcgatgaaggagatcggtgaagatcctgaaggtttagataatatgttgaatgtttttgaatccatggttgaagatcaacgaagatgtaaagatgagaactttaacaagattatctgaaagacaaaattactctgctgttgtaacttgtaagctgaatgaattagattcttcaattttgataattatgccgaaagttggagtcgtttttggcaatttattaaaacaattgaagatataaatgttggggtgtgaacaagaaaaattcatagttctgggccaatatgtaaattaggaaatataagttttgttgagtaagacttttgttaattttgaactcagagtgtgttttcgtttccgaatgctttcaattcgcagaagcttaactctagcaaaagagccaaaagatttgtttttgtttttgtgtaatctccgagctcgatgtgtatctacagatgactatgatccaccattttcgcctctctctaaacccactaaacctccaaaagagaagaagaagcagaagacgaagaagcaagaccagtcgtcggagctggtaaatgacctgaagattccagtgatttcagacctccctttcgattttaggtattcgtattcagaaactaacccggaaattgaaccgattggattccgtgaaccgaaacggttctctccatttggaccgggtcgattggaccggaaatggactgggactaccgcactggcgtcgccggagattgatcagagtcaatgggtggaggagagagcaagagttctcggcgagactttgacagaggatgaagttacagagcttattgaacggtatcggcatagtgactgtacacgacagattaatctcggtacaattttgaatcttttgcctaagttttttagctttgaaattagtttgcttgatcaaatcgaatcgtcttcaaagttaagagctttcgtcatcgttgatgttgcagattcactagtggtagaaacttctttgtgttgacatcacttgtagatttgtggtcttgatgatgatcatgttgtgatataatcaaattatgtgattggtctcttcttataaactttgtgatgttatcagggaaaggtggtgtgactcacaatatgatagatgatattcataaccattggaagaaagctgaggcagtgaggatcaaatgcttgggagtaccaactcttgacatggacaacatatgtttccacctcgaggtgtctattattagatctccagaacacggctctgtttttctttcggttgatcttactatagttgtgttcttgataggaaaaatccggtggaaagattgtatacagaaacataaacattctagttttgtaccggggaaggaattatgatccgaagagtcgtcccatcattccactcatgttatggaagcctcatccgccaatatacccaagacttgtaaagaatgtggctgatgggttagaatttgaagagaccaaggagatgagaaatcgtgggcttcattctcctgccttaatgaaacttagtaagtagtatatacatcgtcaagttctttgtcatttttctagtatttcctcgtttttgattggcggattgtattgtgattcagctaggaatggtgtttatgttaatgtcgttggaagagtgagggaagagtttgaaacagaagagattgtgagactagattgcactcatgttgggatgagtgactgcaaacgaattggtgtgaaactaaaggtataataaactgtaaatggtttgcttgtcttatattgtctgtcagattctctagaattgatctatcttgatgctgtgatcaaaattgcaggagatggttccatgtgttcccatattgttcaaagatgagcagatcatactctggagagggaagaggactggtgaagaagagcttgttactctatgaatctttgatctagaatcatgatcatgtgagtgatgtgacctgaacaaatccaactgtagaccaaaacttcttcatcgatacaacagatactaaagtttcacatgtctcagaagtagtcatagatacaacaatcttggttgatttgtatattcgattatgtacttcggtttgatttattgaactaaaattggatcagtccaaaattgttctttatgaaattgactaattttattttatttttttgattaagttcataatttgatttttagagtaatccaatttactgttctgttgtcatcattcttaccttagaacactaaccatgttcaattactcaatatcatggcccggttcaaaaccaaaccggtcaatggtagaacaactaatgggctgatataaaaattgggcctataaaaaagcctacaactgtatatcataactataaaaatgctttattttcgaagcgaaagtttaggttttggtttttttgtccgtcgtagtg

SEQ ID NO: 635 - DNA, 3000 bp, Unknown
  misc_feature (1)..( 3000): cDNA_ID_3058083_gDNA_ID_1620302_Annot_ID_152682 3000 nt of promoter + ATG
ccttcaaagttttatttaactctcttcattgtcaaatccttcatctttactactttttcaatatctccccattatgtataaatttaatgcatcaagtactacaactattccacatgtgcattgataaatcaacctcaaaatagaggtaaaagagagagagaaccacttttttgaaaggagtggaattgttctcgtatcacgagattacataaacgtgagtcgtccaaactactagattcgaataaaccaaccaaatcacaaattgtttcttttaaaataatgaaacatgatgtgaaaacacaactcgtagcctatttgatattgttttcgttcatgttttgtcgacgtagacccatatatcttagtaggttttgaaataaaccaaactgagccccaactaaagctactaaaccacggtcgatagaaccaaaccgacgtaaattcaaagctataaactcaaaccgaattataaaatatgaagttatgtttgattttgatatttttctcactgaatcaaacctaaacttaaaccaaaatggcgaaatctgaaaacccaatgtaaatgcagactccctatggtcgattaattttgttgttgcagaattctttagaagtatgatgtgacatcaccttgactaatgctaatgtcatcacttaatgtaaagaacgtactaatatttagcaacgattttaaaaataataagcatctcaatacttaagattatctcaagtaaaactaataatccaaagccatgatgattcatatgaagcccactgcccaccaaggcaagccaaatgtcgatctctctcgctaccagcaaccaccgcacttgcctcgtccatgtcacttccacaaccataaatttttttggtgccactcgaaataaaataaaaatataaaatttatcaaaatcattaacgatttaaagcaaaattctaactttaataagataaagctacaatccggagatggtgaaaaaactttaatccatattcacattgtaagtttttctatggaaaatcacttcttctttttttccacgcggtttcaaaggttaatcataaaaagagtagaagttaaaggaacttttttgtatctattatagtttgtttttatatgtattgtgaccacaaacacatatatctacatatttattttatatataaagagatagataatctaactgagaaatccacttgaagctattcaacaatttttatagctttcttcctctccaaaaccacaccaaaaaaaaaaaaaaaaaatttgattttcagatccaatcaaccagagatgagagataacaacaataacaacacaagagaagaagagagaagcagttcttcaaagcagcaacaaccacaagctcctatgtctttgaagatcatagattcatgtctcagactaagtgtggttcctctcagtgttgcaaccatctggttaactgtcactaaccacgaatccaacccggactacggcaatttagagtacaactccatcatgggtctcaagtaaacatatactctttactttctttcaactttttagtaagtattttataattattaattaattagttataatttgtaggtatatggttggtgtgagtgccatatctgctatttatgctctgctctctactgtttcttcatgggtcacatgtttagtctccaaagcttggctcttctttattcctgaccaggttttttaaaattatcttctcaatcatttatcaaatatctagtatgcaatttcttatgttagttaataatgtttttatatttttttgggtgtatgaaggttttagcttatgtgatgacaacatcagtagcaggagcaacagagatagtgtatctacttaacaaaggagacaaaatagtgacatggagtgaaatgtgttcttcttatccacattattgttcaaaactcacaattgctttgggacttcatgtctttgttcttttctttttcttatttctctctgtcatttctgcttatagagcttttagtccctttgatcctccttgtgattctcaaaccaataatgatgcttaaattagtcagttttggattcaactttatcaaaatgttgcagcagtttatggtgttttaactttcttctcaaaatattacaaaatatttttttttatgccgccaactgttgttgtaggcaccatactcctacaaagaacaagcgggttaggcagccgtttagaaataccaatttattttatgttttttaaggctaccaaattattattttactttttaatgttaatatataggtgtatcttaaaatttttgtttaataaattttttaacacaaattttgcatgattttaaactaattttgaataagggatagaaagagcgctacaaaaaaaatcttgactcggaccatcatttttgttggaccggcacatcctgtagatgtataaataacttattttgcggaaaaaaatagatgtttacatgattttacctaaatactaccatttatgtaaatctataaatatcagtttatagcaagttataaatccttacatggattaacaggtgtacaaaattttacaaaataataaatacaaaagcattgaaatagtgtttttaaccaaaagaaaaaaaagatactgtaatctatagaaagaatcaaagtgaagttgcagaaataaagaccaaatcaaatgaataatttattaaattgataaggtggcaaccaacaaatatattgcacttaatatagtaaaaaatcatacattgctgtcagtgagtagtaaaccaagtagtcacccatatataaatttcttgaaaatatgaaactcctaatcctacatgacttaaaccttttttagataatttcattatcaaatggctattctttcaattcacccttatatctttgcacaacaatagagagagaaaaagaagttcaaaaaaaacataagatctaattaagagaggtttttggtctagttcctctggttcataccacaccaacc

SEQ ID NO: 636 - DNA, 3000 bp, Unknown
  misc_feature (1)..( 3000): cDNA_ID_2044619_gDNA_ID_1620302_Annot_ID_152681 3000 nt of promoter + ATG
gtaaaacaacggtggctaaagtaatcaaacggtggtatgaaataggcggctaataagatatttttagccgcagatatttatgtgtctctgagattgacacgtgtccttatatagttggatattggagaacaagttagaaagttcacgttgagaatagttgtgagtccgcagagaataattgctctcatgcgcagcccacaagggcatcataggacccgattggatataggatccgacccggttcgtgtcaataccacgtgactcaaaaagaaactcccgctcttggcgacttttcgaaaccctaaagagactcgtatttcccccctaacgccgattttcccgccgctctcactcaattacaaaaatccgtagatccccaatctccaatcacatatctcccacaatctctttctcgctctctcgatcatcagattcttcaatctctttcaccaagcttaaccaaatcgttaccatgaaggatatctctaaatctccggcgagaagaagcgacggattccaccgctacttaaaaccaggagcgcttgctcagatccgaaactcgagaatcaacgctagatctactacatctctcgtatctcgctcctccctctcgcagctagtagatccgatttcaccatctgagaactcggttgatgaagcagcagcggcttcgcggaatctgacgatagatcaggtaccacatcttctaagaaagatctatggtccttacagttatcagaggaagaaattagccgctgctagatctgtctcgtcgatgatgatgatgaatatcaatcctcctataaactcagttcttgttgaacccagtagtgatgttattgctcattgagttaaactagtttctaccaaatctgtaatctgatgatacaattcgggtaaaatgtttaatactatcataagactcactatatgaatcattaaattatcaataaattgtgtgttttcaattgatgagtttatctttgttaatttaatgtttgtgttgatttgatatcttacgatttggatttgactatagattccttcactacatattaatgaacacttacatgagtatcattttgggattcttaatgatgtatatgtaactcttaagtgttgtaactgttttgaaagattagccaaacacttaaagattcgaagagtaatgatataagactacatatatttttctcaaatttgttatcatcttgttagattgtaattgacataggctatgttacctcagtcaattctctgctttgcttaatctaaacatctcaaatctataggttttgattatctctctgtttgttgtgatgggtaaaaatgtttgccttctgctattatcagacgctattgtctcagaccaaatggttacctatgtttgtcgatgggtgttaacagatttcatttgcttggtggtattaccgcatatggaacattggtcttggtttatttagtctcatcattcgatgttaataagttttatctatatgctttctttcatttgttctaatgggtaatgatggttatctatatgttgcctttagcaaacgtcgctgcccatatggttgaacttgaatcctgatccaactgaacctctttaccctctgattatgcaatcggttattaattgatgttgatatccccaagtacatatgtatgttatatgtaagagaccattcataactttcactttctacccttcaaagttttatttaactctcttcattgtcaaatccttcatctttactactttttcaatatctccccattatgtataaatttaatgcatcaagtactacaactattccacatgtgcattgataaatcaacctcaaaatagaggtaaaagagagagagaaccacttttttgaaaggagtggaattgttctcgtatcacgagattacataaacgtgagtcgtccaaactactagattcgaataaaccaaccaaatcacaaattgtttcttttaaaataatgaaacatgatgtgaaaacacaactcgtagcctatttgatattgttttcgttcatgttttgtcgacgtagacccatatatcttagtaggttttgaaataaaccaaactgagccccaactaaagctactaaaccacggtcgatagaaccaaaccgacgtaaattcaaagctataaactcaaaccgaattataaaatatgaagttatgtttgattttgatatttttctcactgaatcaaacctaaacttaaaccaaaatggcgaaatctgaaaacccaatgtaaatgcagactccctatggtcgattaattttgttgttgcagaattctttagaagtatgatgtgacatcaccttgactaatgctaatgtcatcacttaatgtaaagaacgtactaatatttagcaacgattttaaaaataataagcatctcaatacttaagattatctcaagtaaaactaataatccaaagccatgatgattcatatgaagcccactgcccaccaaggcaagccaaatgtcgatctctctcgctaccagcaaccaccgcacttgcctcgtccatgtcacttccacaaccataaatttttttggtgccactcgaaataaaataaaaatataaaatttatcaaaatcattaacgatttaaagcaaaattctaactttaataagataaagctacaatccggagatggtgaaaaaactttaatccatattcacattgtaagtttttctatggaaaatcacttcttctttttttccacgcggtttcaaaggttaatcataaaaagagtagaagttaaaggaacttttttgtatctattatagtttgtttttatatgtattgtgaccacaaacacatatatctacatatttattttatatataaagagatagataatctaactgagaaatccacttgaagctattcaacaatttttatagctttcttcctctccaaaaccacaccaaaaaaaaaaaaaaaaaatttgattttcagatccaatcaaccagag

SEQ ID NO: 637 - DNA, 3000 bp, Unknown
  misc_feature (1)..( 3000): cDNA_ID_3058103_gDNA_ID_1620302_Annot_ID_152669 3000 nt of promoter + ATG
gcgtttaagcaaccgatcattttgaggtaatgcaggctctcttaattagtcgctttcgaaatttttcttcaagtgttgctttctcatttacttttctctggttttacagacctatggcatggtttttcattgcacatatcactgtgccaaatctctctaccgtcatgttctattaccaaaccgaggtcttgcaattagacgctgctttcctaggaactgcccgtgttgttggttggttaggtctcatgtttggaacctttatctacaatcgctatctgcaagatatgactctacgcaagtctctcctgtaagcctaaatatctcccacatacacgtcattgctttctcaatatatccttcttttaagtgatctaaccaacaaaacatcatcacaggtttgctcacatcgggctgtctgtaacgatactcctagatatggttctagtatcaagagctaatgtgggctacggagtttcagacaagacaatggtgctcttcggatcagctctaggtgatgccatcaatcaactcaagtaagttgcttttacttgtttatttcctctggtacatttcttccaagaattgcaactcaataatcattctttgtcgcagattcatgccgttcctgatcttgtctggtcgtctatgtccacctgggattgaaggaacactgtttgcgctgtttatgtcgataaacaacctaggaaacacagttggatcgttcatgggagcaggattggcttcacttctgggaatatcgtcagggtcgtttgacaatatgtttatgggcttagccattcaagtgttttgcacttatatacccgttttgtttcttttcttgattcccaaagaagctacaggagtatcagcatcatagggcagagagcaaagagcaaaggtagtttctcatagaacagttttagatcagaatttttggataacttttttggcatcagtttttgactttctttaaacgcttggaattgactacacatcagacagacactcggtggagatttgttatatatactaaatatatactgcctcatttttctcttgtcaaccttacagtcttaattcactccaaaatatgcataatgaacatacaaaaactaatcattcaattcgatttaattgttctatatttcaatgataaatggtgcaaaaaccaaaaagaaaaagaaaattctaactgttaattgtattgatactcttaatatattaatctcgaaagattttatggtttgagtctgaaatgtaataaagtgttttacagttcatttcgtccaattttcaacttggggaggagaaagtgatatgtatgccggcaaaaaaaaaaaaaaaagtgaaatgtattggacgaaattagataactagtgttaaaaatagtaatgaagctgaagcttaattgggccttgtgggttatattaaatgggctatgaagttgggaacaaaaaaaaaaaaaaaaaaaaaaaattatcagagccaggtttcgatcctgggacctgtgggttatgggcccaccacgcttccgctgcgccactctgattttttgttaatcatcatacaaatcatttaattaaccaaataataaatccgtttgaaagaggattttccgctgggactcgcacggtgaataaaaagttcgacgatgaaaatgatgagacgacgataaacaagaatcggaggattacaaaacgctgcttcttaaatccggtaaaaaaatggttcttgatgcttatgtaaagttttttttttttttttttttttggtatcaatgttaagtaaattgtttgcgtctatgcttatgtagtagagactcatgagataataaagttttttgcttttgaaggtaaagctagaggtgggcatttcaaaattcggtttggttctggtaatatgttatataccaaattagaacttaataaattacataaatttggttcggttaggggaaagggtagtgaataagtaattgaaacctacgaagtttctaatttgttatggtgtcggaccatgtacataacgttaattgaagatttgatttgttgctttgaaaactcgcattttacaaatttgggagtattatgtaaattggaagaaacggcgacgtattcttttaaatctgcacgccattgaaacatacttcaagtatgtacacgttagttcattgatgacgcaacgtaactagatgataacattgagataaaggaactaaaatgacaaaaattctgttaattttctgtgttgtggtatacgctaaattatctatcgtgaatctgtgtataatgtgttgtatagaactatagctcatgtaattatcgttgccgtcgaaattttatacaattttagaatactttgatgatctgatcttacttttgtcactatattttgggtgatgttttttttttacgtaaacgtaatatttgtgatgaaatctaaaccaatctcataatcgttgtaaaatcttttaaagaatagtaaaaaactatttgtgtccaaacgtagacacatcaaaaagataaaaaaaataataattcagtccactatccatccaacctttaaatcacatacacatatcatcttcatgatatttttttaaaaatttacaaatactttagagaaatctttttccttgctgattctaaactttctgagattaattacctaagttagagaatttgtgattcttggtcttggatgatatttttacaaaacactcaattattcaaacacaatagcaatatatcatagaacaacatatgcattcattaaacacgaaattgtttttaagaaacacctaaattacttaatacaagtcacattttgataattagaatattacagatttagttacaaaataatcaaacttaccactttaatacggaagttattttttttttttttcttttttttccagcgatttatttattctgtttttttttccctgaatataaataaaatagagttaataacgtggagagacccaaaaacagaaac

SEQ ID NO: 638 - DNA, 3000 bp, Unknown
  misc_feature (1)..( 3000): cDNA_ID_2044667_gDNA_ID_1620302_Annot_ID_152663 3000 nt of promoter + ATG
atccataaaaataggagcaacaggaacagtcgctactctaatgacacgagagctagactccatgaaacaaacttcgcctaagactcccacaacaagacccattagaacaacaatccctgtctcagtagactgtggcacatcttcttcaactccaagaagaacaaaaccaagaaaatcatcagacgaagctagcagcagcagcaatgttaacaatgttagaacaccaaagggccacaatgccaaaaccacccatcagctttcaatgcttggctctgataatgttagaacatcaaagggtcacaatgccaaaagcattcatcagctttcaatgctcggctctgataatgttagaacaccaaagggtcatcacaataccaaaagcactcatcagcttccaatgcttggctctgaaaatgtatcgttgcaaggaaccccgagaagagagaagagaatgaacattgtggagattgtggacgtgaaatgtgggaatccagatcgagcttgggctaatccgataactagtagactcaagaagcttggattctctaaactcaacgagagcattggttaagagctctgcaaaactttcctgtatactctgtgacacatctggtttgtacatcgagtatgaaccggttaaaccaaatcacaatgtaatctttctttgtcaaaccaaaaagctttggtcaattacattcattttgtattttggcatctatctttatcaacaggctaatttacctagattgacatgactataatgggcggatacatgaataaacgcactaatgtgtgttttgtatatatatttgaaaagacgagtagatgaaactgagctttcgagagagagactgtgcagagaattagtttgacaagtagaagtcatattggcattctctttgttcttcttcttgacaattccgaatttggtaagtgaaaaaaaaacaagaaattaaatagatatggttagttaggaccagcgacatcattgaacttgaatgttcggtaacaaacacctatcatcatgagtttcccataagttgatcaagtctcttttgatccgcatccacgtggtccaacacatcaattggttccttcgtattttgtattttatatcgtgattttttgagtttttataggctaatataaatactcatttatttgtggatagtttgaactgtttatagtgattagtgaacgattattattgaaaagaatcataattaaaatgttagaatttttaaatacgtatcaaggtaattgatagatgaacttttagtaaagtcatgtttcagtggattttagtttattttatttgtctaaacatatcattaatatatcatatatttggttaagacaaagatcaaattattaacaagtgttgagattaaatatttatgtgatgttagactccaccaacaaagaaatagtaatctattatcatcaaccaactccagttacaataaacatatactctaggaaaaaaatatgtgttgtattgtgattcgtaatcaaaaatataataacttgggtggttctagtggttggttagaccatcatctgtatgtatacgtacacctgtggcctgtatatatattgaaccatgcatgactaaacgatataatttttataaactatatcatctagacgaagtttctgattgaagaaaaagattccatgacaacaaacacgttatctagattcgttctacatttccaaacaaaattaacgtgtgggaaaaccatcagatatatctaattgttttactaaaaccgtccaagatacaaaagctttaatatgtcatggtttcgaaatatgcattgacgtataataaacatgaaacaaaaaatggtcttaaatatagttattgctaaagaataactaaattcaacaagtgttataaaagaagaagcgagagggacaagccaacaaattcttcttttgtgcgtgtgtttgaaatgtcctatttaggaactacaaagttatgccattaatactttttgtaaatgattaaattttagattctctattgattttgaaagtctataattttcttacaaattgttatttgttcataaatggagatgcatttaaacataaatgttaaccagattggaagtaaatagaaaaaaaattcttaataaatagttttctttttgttagatggaatatctattattttttaaaaaaaaacaatgaacactttcgtgagattaataaataaaaagtaatgaatgtgacatagatccaagcaacagtaactgcatcgatggtcgaccacaaatgtttctttacttaccattctttaagaaactactttatttgttgctcatttttaaaagaaaatatcaaaaataacaaaattgtttccttcaacaaaacgcttctcaagattctcgtgctttgtgtttcaaatggagttactataacaactgataacatatttgattatcattcatttctcagtactaaggaataatatattacatagtcaaattcatattgaaatactaaggaataatcaaatcacaatacattgtaggaacaataatcattctttttataaacaacacgaataaataatattcaaataagaacaaactataggagaacgctatcaatgaagattaaatttagacgaataatcaaatgttgacaaaagaacaaaagctgaacaatcaaatgatataactagtgagcagtgacacgtacactttgggtttactatacttcatggaaagataattagttctaaattgactatattacccttccataacaacacgcgaagagcttaaaactaaaaaccaaaaggaacacacgcatcaactaggggtaatatagatattttctaagacgacgggtcaactaccaatccatataaaccgattactaccaattagccagtaacaaaagaaaaacataaaaggaaaggcaaaaagaagatgtgagcttgtgaatgccaaaagatcacataactttctctctgtttcatcaatg

SEQ ID NO: 639 - DNA, 3000 bp, Unknown
  misc_feature (1)..( 3000): cDNA_ID_2990548_gDNA_ID_1620302_Annot_ID_152653 3000 nt of promoter + ATG
atgtgacaagagttaatcgtatcacaatgtctcaaatcgtgtaataaatagatcaattcagtgagatcagagtgtgttttttctttcgatatctccaatattttttagtttacctcatgaagaaataagacaaaataaaataacattaaggtgtcgtcatatgattggttcagataaatctgacgtggacatcattggttattaaaaatgattataaatctctttgtcttaatattttctcaccgtcgagaaaacaaaacacaagttgcagactttatccaaatttagggttttctctttttttcttacttagttatcatcagatcttcaaaaccccaaaatttgcaaatcaggtaataactttctccgtatgtatctcttcgatcaccgattgtctgtttctttgtttgcttttctcgatccgttattgaatttttgagttcgtcgttaaattttgattacatcaatttttcttttcgattcgattcagagagattgaattgcaaattatgtgccagatcttcgtgttctgtatctgattccggatcttggttattagttttttttttgttgttggaatgaattcaacaacgatgattttgatttggtcaattgattttttaatgctatagttttaaccttataggaatgtaattgaactggatcagctttacttgaattgtttggatctagattattcagacaacatctttttaactaaattgaaacatatttgtgtttgtgttcttgatgatcatgtgaatttggtagcataattttcttgttgagatgatttctgagatgggtttttgtagtttaattttcttactcgatgaaccatctcgtgcaccttgcaaaatcttttgttctatatctcattgttcgatatcaaactaatgaggttaacgttttttggtgagacgaccagttatgtaacatgttgttaactatcttcatgtttgaatcgattttgattggatgttttcatgttctatcatattctgcggttttgaatcttctgaattctaacgtgaggttatccttcttgtgcagatctcagcttcccggttagtactaccctcaaatcaactaagtttcatgtctgaacttgactcccaggttcccactgcctttggtatgtttctactctaccaaaacttgagattgtattagtcactgatcttcttctacttgttttagatacttgaacatgttatcatttgtaaatacatgttaatcaaagcatcattttttgtttgattatgctgtttatcttacatgggaatctgtttatctctctcaatttgctgttgcttgtttcagatccgtttgctgatgcgaatgttgaggactcaggtgccggaacaaaagaatacgttcatatccgtgtccagcagcgaaatggtaggaaaagcttgacaaccgtccagggcctgaagaaagagtacagctataccaagatacttaaggacctcaagaaagagttttgctgcaacggcactgtggttcaggattcagaactcggacaggtaggttttatcaaaacactctattgatccatgtagtggaaagtggatgataatatttctgtcgttagtgcctgcttgaacaaaccagaatgatttggcctcttatctgaacatttgagcttctctgttttagttttgtttatggtttgtgttgatttgtaggttatacagcttcaaggtgaccaacgtaagaacgtctccacattccttgtccaggtaaatatcaataactctacgagtctctttactgctaaaacatacaaactgtgtaagatgattgtctgatctcactgtttctctgtaatcacaggctggtttggtgaagaaggataacatcaagatccatggtttctaagctatctagtggatcatattattaataaaaccatatctttttctttcatctcttgttgcgaatttcgggtttgattcatcaaaatcgtcttcttcctagtgttcttcttctgtttggtattcgaattttaatggcttatgttcaccatacttcttcccctgttttcgtgttactctgtttcacatcttacttatcttataatatcagtttgttaagataattctgctctaacttgttataatttttctctacaatggttcatagttttaaaattatataaggaccaaccggaagtttatacggtcgatactttccaagtataccaaattgcaggttttagtttggaccacaaaaaagttcaatgatcaaaaaggctgatgtatcttctcactagtaataataattcataagcacacaaataatgataaatgaactgtctctgtcactagtaaagtccaaatgccgtctctatcgtacaaagatatttcaccttcttgttgttcgtgtcaccacacactcactgcaactggctacagatgttcccagataaaagcttcgagatatttttttatacatttattttgatccatatcacaatattaattgcaaagttttttcccttttcttcaagaaatagagcaatccgattcagtcaattctttgaagttataacagtaatcaattcgccattaattttatacatttaatcaatgtataatataagtatttttctttcataaatgggggaaaaaaatagagatagtttttgaccaaaaaaaaaataaaaaaaaatagacatagtcattggagatggttttactaaatttgggcttgttcaagagaagtgtcttttcttcattcaatcagaaccgtgaagaaaggagatcgttactttccattgatggctaaaaattaaaataatcacgataaatattaataatacaaaaaacaattaaaataacaaaaaaagatcaaaaattctctaacccttcattccttatctctgacgtggccatcaatcttcagattttcttcttcttctaatttaaatactcaacaaccactcttcacttcaccatcagcatcactaaactcgaaccctaaagaaaaacaaaa

SEQ ID NO: 640 - DNA, 3000 bp, Unknown
  misc_feature (1)..( 3000): cDNA_ID_3058128_gDNA_ID_1620302_Annot_ID_152654 3000 nt of promoter + ATG
gattataaataataatccttacattcttttggtttcctatatcattttttgttcattttagaatatttaatatttggtagattttttttcagtcatatgttatatatgttattcacttaattgttgagatacgcttgtgtaacaaattacatatagcatgtgagttgtatatttattactttatttctttgataaatttatgtatatttattactttatttctttatttatatagatttcatgtctttactattgttacccatgatatttctagtgttttcttttcttttataacttagattatggatatatttaagatataatttgaaatgtctatgagaatattaatgaaaatttagataaagtgttaatttaattaacattaataaaataaaattatattgataaaatactcaaatggatttcacaccaatggagatataaatttaaattaggattctcaaaaacaatttctataaaaatattaatattaatttggtgagatacctacatggtatctcaccaatggggatgctctaagtaagagatacaaacaaaatacattggtctgaattttttctaaagagaattgttagagacattttgctgcttcacacaaacgtatgaaattcttgttaacattttcttgactcaaaattattagttatgatatttcaattcaacagttttccttaagtttcatgaatctttcatatttggattgctaatttctaccggctttctactttcttagcctgtcacacataaataagctttttcaattatgattcactaaatcttgggtatatgacatgctttctactataaactatttcgaattttgtatattaaatataagattctccattggaaagcgtttaatcctaacatggcatgtttatgatatgcatatatatattgaatgtacgtgattaagaactttatatagtttccatttatttgtagaggtaaacctctttattctttttcgtaaaaggtcaatctccttactcgctctataatttaccatttatttagatacaagaggtaatagtaagatatatattattcactagtcgtatctaagtttccatttgtttggtcatcacttatatgaaagttttccttcgaagctaattattattataaaacctcttctttgttattgaatatatgtttctttcggctttcaatacacagtatacagacaaaacgagaagggggaatggagggcttgggactaatggcgtttatagcttattttgccctttttgcattctttatatgtgttttcacctatgcattttatgtatattgggcaactagagaggatcgggcgtaattatattggtgattgtattgtttagttttatttcttctgttatttttttcatcaatatagtttacttcgcttacgttcttcttctttttttttttttgtgatcaaccacatcgcttacatacaattccattattttgtctctgaatagaaacagttattttttcaagtcttggggtggcttagtctacttttgtcgtttggctgaaacgatgagtgacttaaacctttctaacgactaatgtcggagtcgttgaatacgtcaaaacaagacacaacttaattcactcggcgaaaaatctaatgtgggttatgacacctaatttagtttcttccaatgttttccaaacctagttttctagggttttggagaagaacaaacaaataaaaaccgaaccaaatcgaaaatacttaaacagaaagctaattttgtcaccgtgtttagttctaacaaaaattaaatcatccaacacaaattgcatcaaatcggatggagatcgaactaaattatcaaagtatagaaatccggcatagtgagtaaaccgggttcaaacactttttgtaaaagttcgattaaacacaaagactcttagtcctgtagagggtttgaatccggtttaatcactaacccaaaactccaaaccaaaaactgattgactaaaccaaaaactatgtcaacagattgactaaaccagaaactttgtcaaaaaacgcaaccttgtctctcgtttactaaaaacgggaagagaaagataataaaagaaagatcgatgaggttgaccaaacgatcaacaccttcttaattcaccaccattaaaaatgtttgcttctccagagaccactcaacatagttgatgattaattagattactagtaaaataattgcaaccccaaaagaaaagaaaagttctgtctttcatcttttcttttaatctcaaaaactggacccctcttaattagatctctaatttgttttctttcttctccaaaatttgacaaagaaaagaattgatcttttgagagggttccagttttttttctctttcgtcttctccattcttgtttgtagaaaaaaacccattttttatttggatttttcatttgattttcccgggaaagttgtaatttttatttttttgagggagattgaaaaagttcgataaaaatgtggggagccgccgcagaaccagcagattcttattacctgattcgtcctgagtgcactgatgtccccaataccaaattcaagatcaaagtttgttcctttccctgatactttcatctttgttattgacttttattggattttggtcagcattggattcgttatcaatgagattggcgtttgcgattctctctgagctttcagattcttttactgggtttatgttcaaaatgtgttcttttggtgttgcttagattcttcattctaaaattttcagctaatttttagcattatttatattattatcggcgtgatgtctctttggatttggaacttttaccattggtagatatgaacaaataagcgatgagagcatttactagttatgatttaggctatgacatgtttatgtcttatgatgctgatttataatgggattattgatcttagtgctctttctagatttgatattctcatggtttcgtttagagaaatg

SEQ ID NO: 641 - DNA, 3000 bp, Unknown
  misc_feature (1)..( 3000): cDNA_ID_1017693_gDNA_ID_1620302_Annot_ID_152658 3000 nt of promoter + ATG
tcgtgatatttttggttttgatatggaagttttgtaaccaagtaaacggagagagacgtgttgaaaaaaacttccacatatgtcgtaccactgaatcagcgtgaacatagaaagtttactcaaaaaaaggataagaatctataagttagtatttgacagtcagaaacaactgtaaatgaatccagacacataagtttggttgatacaaaatcgataatataaatggaaaatctttgaactctcatcttatagatttcttgccacatcgtcacgacttatcttcgaagatcgatagtgtttggttcagactcaagtggcctcgtcactatcaaattattcctatgttttggtttgattacttttacaccggtttagttcagttttggtttctagtttcgttagcccctaaataatattttattttcaataatcaaagaaactttattatatatatatatatatataacaaaatatatataaaatcttattgatgtccaagtcctcattcttcccgaggctcaagttattcataaatcaaagacgtccaagaacatcactaaatgtttaaacaaaacacactagtgagaagtcttgaatatttcaacttttcaagggttgtgtacaagaacctgtacagcccctgaaatactctgtaacatatcggctccttcatgtgccaacatcctttgactttcccccatacgattatgcatgtaaagctccattgtttccaacatagtcccatccgcatgtccacttctggactgaatcaaaaacttcaatacatttagctcattaaagcgaccactataatttcttaccaccaccgttttaagtgtcttaggaagagacttataggtaaggttcttttgccaacatgttcgtggactgatgccacaatatgacttataatataaacgatgagccttcacattctgggatccgtcttatgggatcttcacattctgggatagccttcaaaaagaaaaatacacatattccgctcaagattaatgtctaacggtcttaaatatacaccaaatttaacgtaatcgattgaaggtattagataaggaaactacattaaaccattcacttttaatcactagactactgaaaagtttcatacctagctagtactattttcttcagttctcaaagatatgttaataatgtaaaatgtattgtaaatatgttaagacttaaatatacctgaaggagataagggcaggcacttaaggtccttgcccctcgaaaactgttaaggaagccagaaagaactgttccgtctaatttggttatttgattcggttcatcgtaatcgccctctgcgcagaagtccaagtagacttgttttagtttcctattcattctcttgacatggaaggagagaattgagcctgatcgtacttaaagatctctacattaggcaggtcaaaggaacaaggctttttagggaagaagtcgcagttatcgaatacgaattctttcatatctcctgcaaagttcttgatatcaatactccagcagtaactaagacttagactcttgagcgtaggagagtttgataacaaagactcggcctctgtgagcttgatccaaccaatagagagctttctaggcaatcccgagtttttgaacttggagggatcaagcccacacgcgtaaatctttagtgattcgagatttgtgtttaaaatccgaattaaaacctaatcaaattaaaactaaaccaaaccaaatacaatccaaaattaaactaattttggttgagtttggttatagttttactaaatccaaattaacagaacataaccaaacccgaagatttttagagtctttagaattttaaggtgattttagataaaagagattaaacacaaatctcgaaaactaaagaaagagtttttgaaaatttttaagtgttttcatgtaaagtggatttctctgtgttttctgcattctgcggattataactcctatgttttttttctccgtcaattatatgtgtttattttctctattttcttttatttttatttttattctctatattagggtttagtttatgaaaactttttgttatctatataggcttgggggatgtatttaaattagaatttaaagtgatttgagttctttgagtttttaaataattttaacgattttaaaaaagttcgtatgatttttgtaaaatctattaaaatctcaccttaaatcatgggatttggatttctgtattttgaactaagaaaatcctctcaaatcctccaaaatcattaaaattcaaatccacaaattgttctgaataacagtgaattttaaggtggattttgaaataattagttcaataacactgaatttcatgagattttttaaaatacatgtttgaataacatatgatttataaattctacacaaatcttttaaaattctaatttcaatacattgtttttgaaagtgttattgactcttgccaatatagtatcccaattcccaacttgtgtttcattttttcatctatctaataaacaattagatgaacacaaaaaaatattggtaggtgatggctcaattggatatgtttttgaaaaccatgtgttaaaaacttaaaatactatccaacttaccccagtcctaccaactttttttttcttctcttggtctgcttacatgtgtctgcttatatctccaaaaggaaatagatatataaaaattcaaatttaaatatttgcgatttgttaaattttaatcaatatttaatttttgtttttttttgtttttttttatgaagacaacaaataaccaaatttatcaaatctgatcaaagcagatttaggattttacaaatatatttttttaatatgaattttgtggtcagattttgaccaattctctttgaaaaaaaaaaaaatctatctataaaaacatgtgttactttgaaaggatatttcaaggagaagaatatatttgactcagagagagattcattcagtaatg

SEQ ID NO: 642 - DNA, 2846 bp, Unknown
  misc_feature (1)..( 2846): cDNA_ID_3058132_gDNA_ID_1620302_Annot_ID_152652 3000 nt of promoter + ATG
gatcttcaccaccgagtcttgagccagatcaatatcgctcacagaagaacaacaacgataaatcaaagaagcattaaaagacgaaccaccacgaagaagggaaagagaatacaaaaatagatgaaccggagtgctcgtggagttgctgaacctagccacaatatgatgttcttgttaagtactatgtttacttgtattaacgatacataagatatatcatttacttgattactcatattttcgatccataataattacactacttccttttcctctagatttaaacttgctaacaaatatttttaaagattttaatggaaattgttaacattttatacaaggcttttatataatcaaatgaaactatagattttggtaacacataattaatctgttgtgctctctcttttattttactatgggaaaggtccaatgggcttaggcccaattatttaaacaaaaaaagattctaactttcttctaatggaaaagaaaatttgcgatcaagcaattactctctctctctctctttcttctgccatcgccaaaaacttgtcttttgcttctgggttttgcttcttatttttggtaagattgaatttttctttcaccccatttattatttcgtgcttttagatcgttgattgatctgtatcctgcagtgatcattctttaatttacgaaattgttttttgtgtgtgtgtgtgtgtgtgtgtgtgtgtgattgataatgttgttggggactttaggtgccatttttgtcgattttgtggtttaatttacctattgtatattgtgattgaatcgattgggagggtattgagaggtggttgtttcaatctaacaaaatcaagtgcaaatccattttatagccacttatcttctgctagtagatctacttgagttttaagagatgtgtcttctttaataccattgtggttccttttttaatttcatggcttaagtgaatgttttttggcttctttggttgctatagcttatctctgatttgattaagtagaatcctttgtactgaagtgactttttttgtatggatctaatgtagaatatagtcattggagatggctccggttggtcctcgatccggtgatgcgatcttctctagcattgatcgtgtggtaagttcagatttcaaagttttcgccttttttatctgttcctctttgactctgatttatagaatttggtatttgatatgctacattaccgatttgcttatctatttcttaggatatgcctttttctatgtatgctttattgcggttggatgtgtttttgtaatttgtaaaggatttgagaagtcaaacttgaagccagttccgaatctttgatagaattttgttatggagatactgtttgatcttgtggaaattgatgatttgtagaatgcggagttgttcacgttgacgtatggtgctattgtgcgtcaattgcttactgacctggaagaagtagaggaagttaacaaacagcttgatcaaatgtattcttcttctacgatttatgtagactctcttccatggttttagttttgtatttttgtcatcttgcatttgtatatttcattcttgtgtttgaattttggttgcattatgtttctggttcttttgttcatatatctttctaataatatgtcatggatgggatgaataaagcattgtactctcaggttcatactgatgagtgttcgattgtttagacctttatcactaattttctgtttattttgcaggggatacaacattggaatccgacttatcgatgagtttctagctaaatctggtgtttccagatgcgttgactttaaggaaactgctgaaatgattgccaaggtttgtaatttccagtgacttgtttagtatcacgacgttacagtttgaagtgtctccgggagtaaaaacaacgaggaattaaactgcaagatatatgaatgtttattccacttgacactatagataaaaccttatatatcaaactagagcataagcttcttaatgtctagtagatatcactcctttggtttcatggtattgagaaagcagtaacagggctttgccttattgcacaggtgggtttcaagatgttcttaggagtcactgcatcagtgacaagctgggactcggacgggacttgctgcagtataatcttagaggacaatcccctagttgatttcgtcgagcttcccgatacttgccaaggtctttactactgcaatgtcttaagtggagtcattagaggagctttggaaatggtcagtctccttctccattatcaagtgcagaacttgtttgtgctcagtgttttatgttcttattttttgtctgcacaatgatcaggtctcaatgaagacagaagtgacatggacgcgtgatgttcttcgaggagatgatgcttatgagttgcaagtaaagctactgaaacaagtcgctgaggaatatccttacaaggatgatgaataaatatcaatctcttatcttccctcttcctcaaagagaaactaattactgttttgtagtctctttctctgcattcttagctttgttttttttctccgcaaacacaaaactataagctatgaaactaaatactgtttaaatccatttcttagtgttctgatgtgacaagagttaatcgtatcacaatgtctcaaatcgtgtaataaatagatcaattcagtgagatcagagtgtgttttttctttcgatatctccaatattttttagtttacctcatgaagaaataagacaaaataaaataacattaaggtgtcgtcatatgattggttcagataaatctgacgtggacatcattggttattaaaaatg

SEQ ID NO: 643 - DNA, 3000 bp, Unknown
  misc_feature (1)..( 3000): cDNA_ID_3058193_gDNA_ID_1620303_Annot_ID_152701 3000 nt of promoter + ATG
tcctccatcagttgttaaatattggtctcgtcttgatcaacttagcttagaatgccgaagcctcaagagattaacatatgtcccgccaagcataactatgctaagcctaagctttagtgatatagagacgattccagattgcgtcatacgtctcactcggttacgaactcttaccatcaaatgctgcagaaaacttgtttcgttgccaggtcttcctccttccctagagttcctatgtgcaaaccattgtcgatcacttgagagagtacattctttccataacccagtcaagttacttatattccacaattgtttaaaactggatgaaaaagcaagaagagcaatcaaacaacaaagggttgaagggtatatatggttacctggcaaaaaagtccctgcggagttcactcacaaagctacaggaaactccataaccatccctctggctccagttgcggggactttctcggtgtcctcaagattcaaggcttgccttctcttttcgccaatcgaagacttcccaactaatgatataacatgtcgtctaagaatcaaaggaggtgtccaaattaacaaattctatcaccgggtagtgattctagagtcgtctaaaattcgaacagaacatctgtttatattttatggtgacttgttttcagaaaaaataggcgtagatgtgagtacaagcgagattctgtttaaattcagctgcagggataagcacaagatcattgagtgtggtgtacagatctttaaggaggaagctgagagtagcagcagcagcagcgaagaggaatactttgatgctgaaagtagcagcaacgaagaggaatattttgattttgagagtagcagcagcagcgaagaggactactttgatgctgagagtagtagccgcgaatgctggagatggagactatgaagcagaagatgaaaacatcaaaagcagtaaatatacaagttgttggacttgtcttaagaagcatggtctggggaggatggaacctgcattacaatttgaaagatctaactatgtttggttttgctacaacctatgatttggaagctgacactaggacaatgaggacaagataattgactgtggtttgcagatatattgacaatttcatacaggtcacaggatttttggtccgggaaacaaaacagaacctccattatatttacggattgttagtgtctttgaatatttctgattatccaaatctgtagagagattggaatacgtgatcctagattcaaatcgttttgaattgtctcctctcttaaatctttacgtgtttgatttcaatgtaatttaataaggaaacattgttatattcaatagatggcttattcagaaccattgtaactctgggataacttctctttttctgtgaaactgactgtagtagccaacacaacaaataaaagacagtaaaacaaaagctgtgaagttctcatccattaaacttttaaaataacccacattctattaggatccatcattcaaaagatgcagcaacacacaacacacaaaaaacaatgaagtaggaataacataaaacatccaaaagcagaaattattttcttgttgaataagtaacatcaaactccagctagcgtttgcaaactttgtaaagaaagtttgtttcttgatgttcaaatttagctcctcaacattcaactccttccattcatcgatgagctctttaattgtttcagctccaagattcttcaagtttggaaacatcaacttcttttgatattcacttaaaccttgaaacaatataacagcctcaagtgcatccttcagagcacacaagtcatcttcctcactcttctccttgtcaccattatcagtctccatattattgtaattcaacagctgcttacatcgggttacgtataagtaaaaaagcatcaaacttttagaccatctccaatgcctaactctattttagaagaaatatagttgattttgctccaatgtatgactctaaaatagagaaaaatatagagtagtcttattttttactctatatatagagagcaatctctacacttttcctctattttagagttaactctattttgaaaatacaatggagcaaaattaactatattttctctaaaatagaatcatctctaaaataaaggaaaaaatagagttaggcattggagatgttcttacataaagaagagaaagagaaggaatacacactcacagttttgatcttgtcgatactctcctcggaagcacattctgtttctgattctaagtctgatattatgatcgttggcattttggacgcttcttcatgcggacgtttttttctacgtcggaattcaaagccacccgtgtaggagtcgtcgctgctggaatcatttccctcattatccattttgacaagggaccaaaagaatcaaacttggcaacgtttgggaaataaaagttccaaaactaaaactgccactattgagagggaagagtgtgaggaacctgtttttaaacaaataccagagagagggaagagcaaacgttgaattggaaaaatgcactctaccttgaattatatattactgtaactttaaaccaagaagtatgaaattatatatgtaaatcgtgtgatatgaaatttcttgtatcttttatgtctacagtcttttttttttcttacagcaatttttatgtctacagtctacttgatgaaatttctcacaaattactgaagtagaaaatgtcctgatttaatatatgaaagactaaagctaaataactttgggtataaaataaattagattgggccatgttagcccattaacatttttttatatcggcccaattagggacacacataaacccttaagacaaacatgttataaaagtggcggcttcagtcgaaattagggtttcgcgttaggagaagaagttaaagcaaaacacatacaaacgcagtcaccttctctatcgcctccttcttcaatctcatcgcaatcatg

SEQ ID NO: 644 - DNA, 3000 bp, Unknown
  misc_feature (1)..( 3000): cDNA_ID_2044782_gDNA_ID_1620303_Annot_ID_152708 3000 nt of promoter + ATG
tttgaattgatgatatgcttaatttctctgttcagaggcattgattttgctatagcgaataatgatattcctaagaaggttgaggagtttccgtggttactcaaacaggttatttctcaattaaaatatggatttttttttttttctggattaatggaggccattgttagtgaactgatgatagtgcttgtgttatgtgacgtagttgtgcagacatggaactgatgtgtacactaagacggcgcttatggtgctgatgatctctgttaaggtaattaagagagtaatctgcagactgcttctgttctgtgaataagcactttttttttgtttagaaaagagaagccttttgtttagatttcatgtcggttggaatgtttgaggtcaaaaggttttcactttgtcaccatctatgatgactcatttggttttgacatataatacttttgatttttgttaaatgtcacagcatgcttgtcatttgggatggttttcggatagcgagagtcaagaacttatcgctctagctgatgaggtttgttttcttccgaatcatggtataaaaccaaaagcaggttatttggatgatgaggatacaaatgttttctttcttattcagataaggacttgttttgggagttctggaagcactagccctggtatcaaaagtcctggcagtacattttcgcagatcatggagaggtaggttttgctttcactgtgtggctttgttgattgacatagattttactctagcagtttattaggagcgtgaatatttccaaacttttatcacaagttagttaagcagtaccaaaaacttcttcaatagaatggtattcactggatacaaatctaagcattggttgaaatttatttctttctgatcccaggttctatccatttgtaaagcttgggcatgttcttgtttcttttgaagtgaaggtgagcctttcttctgttctaaacatctatttctgatattatcatctaagtgtgcttttttggctttccttgcatgacaggctggctatacaatgctggcgcatgatttttatatctcaaagaatatgccacattcactccaagagaaaattgtatgtgtggctcatctgttagtcattcgatatctcagtctggatctctctataataaattctacctttatctgtgcaattaggtggaaaatgtgaatataaccattgcttgcattctatctaacagtccttcatatacatttttgaatctatttcatcttgtagatgtgcccactctctgcaccttttggttagcaaatgatttcttacaccagattcttgtttgctcttcagcggttatttgttgcccagacagacaacatagacacgtctgcctgtatttcaaatcctccagaagtcaggtatgcgaattgtttttgctatttttcctcaccgacacgaaatgtgatccaatttaaccttcctggctttcatatgaaaattgcagcttcttgctaaatggaaagggggttgagaagagagtcaatatcgcaatggtttgtgcagtttgacttttaattggattttgtttctctgcactggttatgtgcatgtttatgtcaatttttttctttccaggatacagggcctcaactccctacaaatgttactgcacagctgaaatatggaactaatcttctccaagtgatggggaattttaaaggtttctattcaattatatatatcttttttgttgtccatgtctatttaattaatatcttattaagatgcttgattgttcaaaggaaattacatcatcataattgcttttacgggactggtagtgccacctgaaaaaccggttcttaaagattaccttcagtccggagtcattgaagcaagtccaggtaattaaagagcataagataggagagaggaacatttttcttgaatgctctatactattccagtttgaatcattcaatgattgcaagcacatacctgtaagattttttttccaatctaatcgctctgtacttttttttacctgtctatagattcagacatcattgaggggccatcacgagtatctctcagttgccctataaggtaccaattctacttttttacgtactactgtgttatcttatggttgtttttttggtcagtgatttagtctttaataaaacagtcgcaagcggatcaagctaccagtcaagggccagttatgtaaacatcttcaggtgatgcaatcaaatatcaagcgatattctctttttttccatccttttaaattggcatacagtgttttaatgtgggtgttaccttatttttctcgtaatatttgttagtgatgtgatactttctgctgcagtgttttgatttctcaaactacgttcacataaatatgaggaacccaacctggcgctgcccgcattgcaatcaacctgtttgctaccctgacattcgtttagatcaaaacatggccaaggcaattagctatctatgttgtaatttgatttctgctacatttttgcgttgcagcttaatactgataactcgtctcatatcatatccttagatattaaaagatgtggaacacaatgctgctgatgtaatcatcgatgctggtggtacatggaaggttacaaaaaatactggcgagaccccggaacctgtgcgtgagatcattcatgatctagaagacccgatgagcttattaaactctggtcctgttgttttcgatcttacgggggatgatgatgctgaactggaagtttttggtgacaacaaggttgaggaccggaagccctgtatgtctgatgctcagggtcaatctaataataacaacacaaataaacatccttcaaacgatgattactcttcgatatttgatatctctgatgtgatcgcacttgacccggagattttatctgctttgggaaacactgcgccacaaccgcatcaagcttcgaatactggaactggtcaacaatattcaaacttatcccaaataccaatg

SEQ ID NO: 645 - DNA, 3000 bp, Unknown
  misc_feature (1)..( 3000): cDNA_ID_3058175_gDNA_ID_1620303_Annot_ID_152709 3000 nt of promoter + ATG
gataaagatggaaactccctcctcctcatgcatcgtaccaaggtaaatatatgtacaaagtatttagaataaacttatttgaatatgttttagaatatggatcattatattcattgtacacatcatccttcaaaattacaatatcacatttattttagattattaagaatcaaacctctactaaatctgtctcacagttgtacttatgaatctgttttgttagcgttgtagttgtaaattagttgtgtagatattagttctaggttgtagttataaaacatccaaatacttgattgatacaaaacaataaatggagcaacaacaaaatgatttataagagttgtgaatttttggtggaatttaccaaaatgatatagaaatactttaaaaattgaaagaagttttcgtcgtccttacggatcactctagcgaagtatcggatcgatttgcttacaaccattagaattgtgatagtttgtaaatagtacttaaggtcggcgatatgttgataataatgaacaatgaatgttgagtattaatttcgctgatagacatgttagccgattttgtagaagacgttttgtttttagccgattgaagatatgtatgaacgaagatattacgaatactatagtatatatattattaagattgagtaggaccaactacactaccgtgacaccgtccacaataggtcacgtcaaaagttcataaatattctgcatgtggacaattgtattggcaagaatttcgtgtaacccgttacattctttgggaatagatttacaaaatttcattcagcataaaagttttgactataaaagtataatcataatttcataacgacgtctagaatctccgagtattatatgtttgacttttagtttcaccaaaatctagctatgcctaatttcgtttaaattgatcaattttgacgtgactacgtacatatggatctagatatttttactcaatgcaattttatagacaagtactagtttgagtttaaaatgttgtgtatattaaaaacgattttcctttgtattgtccagaaaattacgctagtagatagttggggaatctatgaagcaaatgatacaaaaggagaaacaaaaataccaaagtgcccaacctggtacatgaggaagaacttaaagatgaatattctgagcaccaaatccgacattttggcatacgtatattcaggatcgttcgataagaagaattcatacatcatcaaaggatcgtatagatgtaaatcgtgtaaaatagtgcacgtcccattgaacaagacagtggtggagatcaaaaggaaagaggtcagaaccaaaggagtccggttcggttcagatgtttttgatctggttgttaatcccggttttgacaccggtttggcaatggctttggttttgttattagatcaaatgttctcttaattaattagaggtgatcactggagataataaacatcctcttttttgggccaattgtacagtactattttaaaatatttcataaataatcaaacagtatagtataatatacttatatacatgatcttctttgtgagctttctaaatatgctcatcctataaaatgggaaaacaatgccctggtaaaaccgtaagtgtagtagtttttatgatgtttatttgagtaatttgattaacttgatgttctaatctgatgaggtagaaacagtaagttatatctaaataaagtggtttatgaattttagaatgaataacttatttcaggtgcaactacttttcttacttgttatgatggtactgaaaaaatggttaccaaattacctcattttcaataggacaagtcttgtgcagtgacggagctagaattttagtttacagggtcatatataattatatatttttatttaattatttattttaaattaaataaatatgtgtaagaacaactttgaaaataatgtaaagaacaatatatggaatatgtttataaaagtaaatatgtaccacaattttagagatttgtagccatattttagaaaaaaacacaaaacaaaaatgaaaaatgaattaatgcttaataaaaataaacatgtgaggggtcaaattaaagaatcgattatcggcatggggtcattatggaaaatttaaaccaaaacatccataaattattatgagatttaacttaaaaacaaaaaattataaatgttatggggtcaattgacccccttctcccttcactacttccgcccctggtcttgtgagactatacatgacgaagtgtccatttcaagaaggcaatacctatattacaaattaatgcagacaaatagaaacaacataaatgcctacatttatgtggttgcagtatttattttggtaacttgtctcatatggttataacaaactacctaacggtaatcatcgaagatgcattttggagcatatcatcatatcgactatcgatggtaactaactggtaagatccaaaagaacaaaggacaagagctagtttatgaatcaaagtgggtcttcaagctcaagatcattcatacacatgtttttatcatatttcttttatagcctttttaatttaataagtaaactactagacctaaccaagggttcatagtagtggtaataagggaaattattacaaatagtacaaaataagttttgttactaaagttaacacacaatttctaaagtttcaaatttagtaattaaatatttggggatataattcagaaaacctttaaagtgcaagggtaaaaattcaaaaaataattacataaagaacaaattacaaaacaataaagcaaaattaattacatggacttcataaaaacaaattaaaatgaaaaaacagggtcaaagagaattttagggttattgtcgattgagcagagtaatttattccttcttcttcttcttcttcttcaaatcgtgtttctccatttcaaaatccagaaactttgtgattccacggtagttagttccaatctcaatg

SEQ ID NO: 646 - DNA, 3000 bp, Unknown
  misc_feature (1)..( 3000): cDNA_ID_3058173_gDNA_ID_1620303_Annot_ID_152712 3000 nt of promoter + ATG
agagtgatccgtaaggacgacgaaaacttctttcaatttttaaagtatttctatatcattttggtaaattccaccaaaaattcacaactcttataaatcattttgttgttgctccatttattgttttgtatcaatcaagtatttggatgttttataactacaacctagaactaatatctacacaactaatttacaactacaacgctaacaaaacagattcataagtacaactgtgagacagatttagtagaggtttgattcttaataatctaaaataaatgtgatattgtaattttgaaggatgatgtgtacaatgaatataatgatccatattctaaaacatattcaaataagtttattctaaatactttgtacatatatttaccttggtacgatgcatgaggaggagggagtttccatctttatccatgaggatgagttcctcgggtcgggttcgggcataattatcgacccggtaaatcaaatctccattcgaatctatcaccgtgaatccttcacaactcaccagaagcgattttctccacaccgtgagtgtcgtacacgctcctccaatatctgcggcagcgacggagactgtggactctgtagatgacggtgcatcttcaccgtggaccgacctcgaccgttgcttcaagaaagggaacatttttgtagttttggtgttcttggttaactattttaagagagttttacagatctaattaatctcaattctcaatacaaatatggtaaggttaggtatacatatgagatatatatatatagatctaatatatatgtgtgtggatgaaagatattagctttgttatattatatcattgtcttattatattataatttttttcttctttatatcaacttgcaaagtttttaaatatcgctacttgatatttaaatgcgaccacaaataatacttagtgacaaaactgtactattctacaaaatataaaaataagaatttcacctaaaaagctttaaacgttttattaattatgagtcaaaatttttagtgttatttgaaaaataatacaatatgataagatattataccattctataagttaattagaattttttttaagttaatgaatacaggtcattagatttttttttatcacattacaaatacaaatttaacgtacgtaacatttacatttagtggactagaactcaaatcaccctattacagcttgcatatatagtaaattgtttttgttttataagtccaaaaggattagtctaaattacattgtttggttatcaaagaaattaaaataaaaaattagataaaattaatcgaaaatgaaaacttaacatgaaggttgaaatctccaaattatttactcatcctttttaccaaactcaaatatgatatttttttctatacgtaaaactcaaaattgtatatacaagaaatttagctatctaaaaataactatataataagccattatagtaagccacaattttgaccatctacgatcttttcttttgtacgtagtaaggtttggtgcaaacttttgcaagtaattagtatatagctcttatggatatggtatattcctgatatgaactctgattgggtaatgattagcacttagcaaggtagtcagatttttggctttggcacgcatgggtttcactgtttcaggattgaattggaatttttttttgattaattaatgtataatattttatacaatataaaaatatattactgtattaggtaagaactttacgacaaaaaaaaaaaaataggtaagaactttaagattatgcaagggtcttaaaacgagccacgtaatcttcttagacccacgatagtagatttttgaggtctccaagaatctcttatcctttttgtcatcgaatctctctctctttctgaagatatattaagaaacaaatctctctttttcttcgaaaaggttggttaggtgaaggacaattctcatccacacgattagatgcataaaattatatatataagaagaaaatctaattatatgaaatggtggaatttcatgtcacactagacgacgaatcttccatattaaactcacttctaacactgcatgtgtatgtaattatgtatatgaatgaatatccaaatagaataatatatttggactaatcaaattattggaaaagtacataaataaataagtgagctttcattgtcaaacctgattttgttgatctctgggtttgccattactccaaaaaatcttaccttcaagagtgatgtcgacacagtggagcacacgtgttgtaacacgtgtcatgactcagctcaaaattggatcccacggaagaagttagatctcgaggccaagagaccagagtcatcaattcaaaccccacgtgcgtgagagtcactgactattctcctcttatcttccgggtcttcgaaatccaatatctccaaaacgcagcgtcttggttaatttttgagatgtcaatatatataatctgtgaccttgtaatgtttaatcaacaggtgtatgatcatctttcatctaggagcattttcattctatcaacatattctcataacaattttactatgcctaacaattttttatttttactatgaaatggatcagtaataaatgggccttaatactgtaccaacaatcccataaatgggcccaatgctggatcctatccgccgacatctaacgttccactaacggagacgttatcgggaatattcacattaattaacgaccgttagttccacgccaaatatgttacatctgctacaaaataaatagtttgattttccaccgtggacggttacctactcgaggcccagacccgaatcaaacggactggattaaatgttttaaatcaaggggtgggattaaatctgaagcacacgcttttattcgtcacagtctcctcccacactcttcaatcagtaaagagttttaggtttttttttcttcttctcggaggtttgtagaatcaacaaaa

SEQ ID NO: 647 - DNA, 3000 bp, Unknown
  misc_feature (1)..( 3000): cDNA_ID_2044751_gDNA_ID_1620303_Annot_ID_152717 3000 nt of promoter + ATG
ttcagcctgtatctcctgctagttacggaagctctctcgaggtttaaacaattgagtatttgattgtgttttggagatttgtttgtttttttacatatggatgattacggttttgcaggttacgacatacaacaaagcagtaactccaagtagttcattggagttccgaggaagaccgtctagagaacctcactacaatctcaagacatcaaccgaacttcttaaagtactgaaccgtatttggagccttgaggagcagcatgtctccaatatctccttgataaaagctttgaaaaccgaggtggctcattcacgcgttcgaatcaaggagcttcttaggtaccagcaagccgatagacacgagctagacagtgtggtgaagcaactcgctgaagaaaagttgttgagcaagaataaggaagttgagcggatgagctctgctgttcagtccgtgaggaaagcgttagaagatgagcggaaacttagaaaacgttctgagagtttgcataggaaaatggcaagagagctctcggaagtgaagtcttcgttgtctaactgtgtcaaggagcttgagagagggtctaaatcaaataagatgatggagctactctgcgatgagtttgccaaagggatcaagagttacgaagaggagattcacggtttaaagaagaagaatcttgataaggattgggcgggtcgaggtggaggagatcagttggttcttcatattgcggaatcttggcttgacgaaaggatgcagatgagattagaaggtggagatacattgaatggtaagaacagatcagtgctggataagctggaggttgagatcgagacatttcttcaggagaagcggaatgaaataccgagaaaccgccggaattcacttgaatctgttccgtttaacaccttgagtgcaccaccgcgggatgtagactgtgaagaagactctggaggaagcgattctaattgctttgagctcaagaaacctgcagagtcttatggagacgaaactaagaaaccaaaccaacataacaaagacggttcgattgatgaaaagccgaaaagcccgtcgagtttccaagtgaactttgaggatcaaatggcgtgggcgttatcgagtaacggaaagaagaaaaccacccgagctattgaagacgaagaagaagaagaagatgtaaagcctgagaacagcaacaacaataagaaaccagaaaatgagtgtgctactacgaacaagaacgatgtaatgggggaaatgatacgaacacacagaaggttattgtccgaaactcgtgaaatcgatgaagcgtcttgcaatttcccatcttctcgaagacaagcaagtccagttcgacaatggatttcaagaaccgtcgcacctgatcttctaggcccgtcggagattgcgatagctcatggagtaaaggataatactttgaaaactaagctagcaaacagttcaaagtcgcgtcttcggttattcaaaggctaatctatccagagtggttcggtcgaaaacggacaaaaacgagagttcttgttggatacacacagatccctgagtttcattcatattcacgttctttgtaaatcaaacacatctatatatttgtataatcgattgcaaatttttggatcattttgtaaacatagtaagccaaggtgaagtctgttatttttttttctgttggtctgttggagagcgcaatattttaaactgcgacgtttgaattgaggccctatagttaatgtgtttactatctctcattcgataaaattactatctcgataaatcgataatgtacatgttaccggaggaaagaaaaagaagttgggtaaaaatcttataattagggttttctgctttcctcggttaaccattcggtttgagtgaaccgaaccgaaccgagaaccggttacaattatgttgccgatcggtttcacctcaataaccaaacccgaaccgaaacccaaacatttcggttcagctcggttttgattattttggttcggttttatgttccatgcctactttataatatatacacataagtttatcaatttagaaaatggccatttttcaaaaaaaaagtatcaaagagcgaaaaattctaaaaatttctctatttttttaaatctatgatagatatttcgaaagaaaacaatgttatttcgaactttatttcatttaaaatcatttatgttcgtcaactttatttacaaataaatagtttgagctctatttcgcttgatgtaaaagttctcgttggaaaatagtcagccaaaatatttattacaatctaatttgtatgagatattttcaattttttgtgagatattgttaaaataaaaatggttagtgttaaattatttcaatttttcttaaatcaaattattgctaattttttcagtcaatgcaaaatattccataagaaagatttattatatttaggaaataaatctaattaacccccttataaaaaaaaaatattgctttccttataataatatatacctctcctaatttctaaacataattacaaatatattagcttcgtctcctatttttttattgtccttatcttgcaaaaaaaaaacgatgaccttcaaaaaaccatgaaataatcttgagacgaggtatcagtgctttattcggaaaaggtaaaaatctcatatcactgaactctttcaatttcttaagatttgtgttagtgggttgcggataacggtagccggtaggcacagatccgatatcctaaaatttggaatacataaattaggatccattagatccgtcaacatctgcaagtaattatttatattacatgcggatccgacatccgcaacactacgataataatatttaatattttgatttttttaaaaatcacctagttaaagttgaaatttctatagtataatttaaacgtgtttttaacaaactttcaaagttgttttggacctcactgaaagtgttgatatttgtatcagaaaata

SEQ ID NO: 648 - DNA, 3000 bp, Unknown
  misc_feature (1)..( 3000): cDNA_ID_2044755_gDNA_ID_1620303_Annot_ID_152716 3000 nt of promoter + ATG
actcatttaataattcttatggatcctttataatatttactaatgaagttttctttgtcatcaatcaataaaactacaaaagaaattaagttattgataaaccataaaagagttttgctgactcagaagcaaatactaacgatgtttattttttgaaatttaagaaatggttatattgcttctatagaacgagcagaaaactgtacttctttgcatgtgttggggatagttttcactttcaagtgtttgtaaagaaatagatgaaattttttgagtgtttcgtacaaaccaaaaattagtcttgaatatactaaacgtctttttcactacaacaaggtttacttttcatgctcacatgttcatgaatatatatctagattcggatccctcttgctcttataaaacatatacggttggcatttatgtaaacttactagtattaaggaaacgaaacacatatatcccacttgagtattttttttatatatagataatttttgccgcttacaattttggagagttataaaaaatatacttaactgttgttaagatatcaatgacttttttttttctgaaaaaaacacattcatagattttttaatcttcgtattcttatagtagggattttaaatatctaaacgttttattactgaaaacatatttttatgtaaagtaagatttgattgaagagaatgcattttggttttaaaatgcgttgtttgggtttaaatgattgagaagacagtttattgccgaagtctctccgatctacaacggttcacactaagtggaggggcttcttcggcgatggtttgccacccacggccaccaccattcttaaatgctccgttttctattagaatcatcgtgtgagaattgagaagaatttgaaagaaatggttttattgcttctatagaacaagcagacagctgaaaattatacaatgcatgtaattaatgagcagatgataataccataagacgacaatttttgtttttgtgtgtgtaaattatatgtgatttatgtttatatatacatgttatactgtttggattatggctttgattcatatatcgtatcatccataagtcatgttcgaagctattatattgttatttttttgaagccgttagatgtcattataattgtattattcaaatataatcttaatgtcaatcaaccaatgcaaaatctatgaacaagtgatgttacatatatttaaatataaaagtataacaattccatgataattaattaatggttgtgaagtgtatgactatgtttgcgctggagaatattgtgcgacggtcatggattgatcattataggatgaatctacactttacacacgcaatgtgaattgaatcttcgaatattctggttgaaagattatttttcatgatatcatggtagataattcttccgataaaatgcagaacattgaagttaagccaaagtcagagtaaagtttaatctaaattatatggaaaattgtatgaagtatcttctctttttttattgaacgactttgtatgaaagatctatggatctaataatttatgaatggggggctttgtctccgactctccaaccaattaatacactgaacttgggatattctaataggcatttaataatataactaagaacatttgtattcttataatattgaagttttggatgataatgcaaaaagtcttgtgattaacacatctcactattatagtggtttagtaaaattgatgtatggtattgtttaagcactaaggttatgcaacagttcgtaaacaattaagcaatactacttcttcttgacacaattaattatgcaacattaaggttcgttattctcattaatgaacctggactgattacagactttgctaataatgtaaagctaattactggttaactccggtttacacaataccatatatcaattttactaaactactcttatactcactgctcagtctttcatgacttatttttgcactattctcttcctcttgtatatgtcccacttctcttacaatactttctttcattcgactacttatcttctttcgtagagttaacgtcggtagcctgcctataccaacttttgttaatgaaattcattttctcgacctttttcgtcccttctatatgtatgtgctacacaagctttgtcaaaagacatttttcattcaactaaattctgtgaaattatgacactttttcactaattaattactcataaactacaatttctaaactagaatatcatattaactcatccaaaattaccccaaaacaaaaataaaaaactcttgttttttttgtttgggttaattttggaccaattaagtagataataccgatttctcaattcaatattcctaattactttccaagtgttagaaataatattgaatggcaatgcctactattatgtggccgacactacaaagattaagaatgggctctctaagcccattagttgggtaataaagcctgtaatgggtttttggttcgttacttagatctaaccctctaatttatttagtgtctttgacacattaaaaagaaacaacacctcttcgctttggaacttgaatggatgaggcttattgacaaatacaaagaacgaggaaaatgccacaccacaatacaaacacacaaagccaaaaagtaccaagttacggtactgtcggaatattacagcatcccaaaatcccagatttccacgtgttaaaacaatagtacttttttatcaatctcatgctggtgacataattaatagtgatagtgatgtgactcaaacaaactgattgtagccattgaagaagaaaaaatcctttagacggaaacaaaaaagaaaccccacatgaaaagtagccaacgttcaaattacaggtgaaacaaattcaccagaaaatctgagaaattgttaagatttctgtattgaattaaagagaaaaaaggtggaaactttattgctttttggccataaaaag

SEQ ID NO: 649 - DNA, 3000 bp, Unknown
  misc_feature (1)..( 3000): cDNA_ID_2044774_gDNA_ID_1620303_Annot_ID_152710 3000 nt of promoter + ATG
cagttgatcaggcagttatctcatacttaacacttaacatataagggatgttgtaagaacatacttgtggatgaatgtacaagcattagaccacaagaacaatgctgcaagagcaaaaatcgcaaagtgacagagaaaagcgaggagatggtattcgaataactcgaataagacccaagacgcagttacagcacccaagactccaccagataccttcttgttcctccaaaggaatatatcagcagctacatgcaaacaatgaatccagattcaacatagtttctgagtatttcacaagatttaagcgtactttcgagcaaagcagacaattaagcactcaaatacactcaattttagcttcaaattagagcaacattcactagatcgagcaaaatcactatgtaagatacaaaatcgagtaaaatcagagttcaaagtgaagaaatagagatagatccatacgttttccaccaccgagaaccttgtgaacaggtttctcccttccgaaaagtcggtaaatctttgacttgaaggacgacgacgaagacgatgtagatttcttatcgtcgtcggaatcggacagagaagacgagtcaccgtggccatggatcttctcaacaatcttctccaagatcgattcctcgtgcttgtggtcttccaccatttttgttgattctacaaacctccgagaagaagaaaaaaaaacctaaaactctttactgattgaagagtgtgggaggagactgtgacgaataaaagcgtgtgcttcagatttaatcccaccccttgatttaaaacatttaatccagtccgtttgattcgggtctgggcctcgagtaggtaaccgtccacggtggaaaatcaaactatttattttgtagcagatgtaacatatttggcgtggaactaacggtcgttaattaatgtgaatattcccgataacgtctccgttagtggaacgttagatgtcggcggataggatccagcattgggcccatttatgggattgttggtacagtattaaggcccatttattactgatccatttcatagtaaaaataaaaaattgttaggcatagtaaaattgttatgagaatatgttgatagaatgaaaatgctcctagatgaaagatgatcatacacctgttgattaaacattacaaggtcacagattatatatattgacatctcaaaaattaaccaagacgctgcgttttggagatattggatttcgaagacccggaagataagaggagaatagtcagtgactctcacgcacgtggggtttgaattgatgactctggtctcttggcctcgagatctaacttcttccgtgggatccaattttgagctgagtcatgacacgtgttacaacacgtgtgctccactgtgtcgacatcactcttgaaggtaagattttttggagtaatggcaaacccagagatcaacaaaatcaggtttgacaatgaaagctcacttatttatttatgtacttttccaataatttgattagtccaaatatattattctatttggatattcattcatatacataattacatacacatgcagtgttagaagtgagtttaatatggaagattcgtcgtctagtgtgacatgaaattccaccatttcatataattagattttcttcttatatatataattttatgcatctaatcgtgtggatgagaattgtccttcacctaaccaaccttttcgaagaaaaagagagatttgtttcttaatatatcttcagaaagagagagagattcgatgacaaaaaggataagagattcttggagacctcaaaaatctactatcgtgggtctaagaagattacgtggctcgttttaagacccttgcataatcttaaagttcttacctatttttttttttttgtcgtaaagttcttacctaatacagtaatatatttttatattgtataaaatattatacattaattaatcaaaaaaaaattccaattcaatcctgaaacagtgaaacccatgcgtgccaaagccaaaaatctgactaccttgctaagtgctaatcattacccaatcagagttcatatcaggaatataccatatccataagagctatatactaattacttgcaaaagtttgcaccaaaccttactacgtacaaaagaaaagatcgtagatggtcaaaattgtggcttactataatggcttattatatagttatttttagatagctaaatttcttgtatatacaattttgagttttacgtatagaaaaaaatatcatatttgagtttggtaaaaaggatgagtaaataatttggagatttcaaccttcatgttaagttttcattttcgattaattttatctaattttttattttaatttctttgataaccaaacaatgtaatttagactaatccttttggacttataaaacaaaaacaatttactatatatgcaagctgtaatagggtgatttgagttctagtccactaaatgtaaatgttacgtacgttaaatttgtatttgtaatgtgataaaaaaaaatctaatgacctgtattcattaacttaaaaaaaattctaattaacttatagaatggtataatatcttatcatattgtattatttttcaaataacactaaaaattttgactcataattaataaaacgtttaaagctttttaggtgaaattcttatttttatattttgtagaatagtacagttttgtcactaagtattatttgtggtcgcatttaaatatcaagtagcgatatttaaaaactttgcaagttgatataaagaagaaaaaaattataatataataagacaatgatataatataacaaagctaatatctttcatccacacacatatatattagatctatatatatatatctcatatgtatacctaaccttaccatatttgtattgagaattgagattaattagatctgtaaaactctcttaaaatagttaaccaagaacaccaaaactacaaaaatg

SEQ ID NO: 650 - DNA, 3000 bp, Unknown
  misc_feature (1)..( 3000): cDNA_ID_3058185_gDNA_ID_1620303_Annot_ID_152703 3000 nt of promoter + ATG
attccctaacgattcctatttatagtgatgaaaatctcacaagtcttctttggcaatatttggtagggtactggatcagtcataggtatatcatataatacatccaatatcggagaggtttctgtaagtaagggtgcttttgaaggaatgcgtaatctccggttcctaagaatctttaattatttgtttagcggcaaatgtactttgcaaataccagaagatatggagtatttacctcctcttaggttactacattgggatcgctacccaagaaaaagtcttcctacaaaatttcagccggaacgtctcttggaactccatatgccacacagcaatctcgagaagctctggggaggaatccaggttggtatttgatattctttcttgttcttctagtgattcaaactaaataagatattttctcatttgttgtgtttaacatgcagccccttcctaatatcaagagcatagatctgagcttttccattagattgaaagaaatcccaaatctttcgaatgctactaatctcgagacattgaaccttactcactgcaaaactttggtggaacttccctcctctatttcgaatctacacaaactgaaaaagctgaagatgtcagggtgcgaaaagctacgagttattcccaccaacatcaacttagcatctcttgaggtagtcagaatgaattattgctcgcgattgcgacgttttccagatatctcaagtaacatcaagactcttagtgtcggaaatacaaagatagaaaatttccctccatcggttgctggatcttggtctcgtcttgcgcgccttgagattggcagcagaagcctcaagatattaacacatgccccacaaagtataatttcgctaaatcttagcaacagtgatataaggaggattccagattgcgtcataagtctcccgtatctagtagaacttatcgtcgaaaactgcagaaaactcgtgacaattccggctcttcccccttggctcgagtccctaaatgcaaacaaatgtgcatcactcaagagagtatgttgctctttcggcaacccaaccatactcacattctacaactgtttgaaactggatgaagaagcaagaagaggaattatcatgcaacaaccagttgacgagtatatatgcttaccaggtaaagaaatcccagcagagttcagtcacaaagctgtagggaattccataactatccctctggctcccggtactttcctggcttcctcaagatacaaggcttgctttgtgattttgccagttacgggctaccgatgtcatagtataagttgcatcgtaagtagcaaagcggggtttgcaatgcgcatctgcgacttagcacggctttcagattggtctcctgggacggaacatctgtttatatttcacggtcgcttggtttatcaacgaaacatgattttgagcgagattatatttaagttcaactgtgttataaatgagttcagcgatgaccctgacctcgataacatgattattgagtgtggtgtacagatcatgacggaggaagctaagggtagcagcagcagcgacgtggacaactttgaaactaagagtagcagcagcgaattggaaaactttgaaactgagagtagcagcagcgaattggacatctttgaaactgagagtagcagcagcgaagcggactactatgaagatgaaggtttaaagttctctcaagttgaaagcaccaaaaccagtaaacatacaagttgttggagttggtttacgaagcatggtctgagaaagaagaagatgaataaaacaagagcgaattctcgtggaatctcatgagaccaagccagttctagtactttcttagcaccttctccatctcataaataatagatggagatagagattatgagcctgaagctgtccagctctgtgaagaagaaaacatccttggttgttagatttagtttgggaagcttaatctggggtagaagaaggtacaaaaccctgcatcttacgtcgttggaatcggtcagggggtccaagatatatatcttccattatattttcaatttattaaatttttagagagactggatattatatgatcatagatattactagtctgatgttaaaatagttatgtaaaggcttcatggattactaattctggacactagccatagtgatatcgaggttattttttcacatgttttcccttgtttttaacttgctaattgctattgcttgtctagtgatatcgaggctagtgttctaaatatgttattgtgaagaaacatgtttcatttataccctgaagattttttatcttctcatatttttatgaagcctttgtagttataatttcagaaaagtttgataaaagtgtctggttcgttgtgtttgaaattcagcagccactgtcaaatctcaagaaagatatatttgagctgctcctcgtctatcctctctttgactgttaggatagttgtctagtcattaagaatatattttatgcaactattgaaaagacatacattctgattaggttttgttatactagtagaaagagataataaataaccaagtcaattgattaagtctgctatatttcagaaaacccatttgcaagatttataatgttattaatatcaagcactcacaattgtttcatgaatcccatagattgcttttctaagaaacaacagaagaagagaaaagtctgtctctctctctatcatcttttttaatatcgtatcgctgtttcattgtgacttgcaaaagaatatctgataatgtgttttggttttttattatgtgtagtggaggccacggcgatgaggaagttccatcatacgaagacttaaaaaatcaaccaatcagcattcaaatctctaagagagtttctcctcgatctatttagtgtttggataactgcattagaactcctgtcaaagtcaatgcaacgctccgatatattcttcaagttctctttaccctatctctaatg

SEQ ID NO: 651 - DNA, 3000 bp, Unknown
  misc_feature (1)..( 3000): cDNA_ID_3058181_gDNA_ID_1620303_Annot_ID_152704 3000 nt of promoter + ATG
ttttaagtgacttttgtttttgtttttctttcgaacacacatgatatactgtacgatcatatactagtaaaccattgaatcctatcaatttaattgaacttatagtggaaaggtgtagtagacattgcatacatacatcataaaacgtatgttcaggttgaatttagagtcaaaatcaatgtaacttggtaaaatgctaagtagaatgatttagtttccttgttttttttatgtatctcatacaattcaagtggcgtggctctaaatttaatacggataagcgactaattcaacataaacatgttattatggttgtagtggttaagaatcttatttgacccccaaaataaatcaagccttttaactctataaacacgtggaagtttcctttgacctataatgaatgctacatatgtaaaaaaccaacattaatctcactgaaagacatatatgcgaagaagagagtgcatgtgtttttctttcttcctcatctttttcagactctttcttaaggaaaaaaacagtgaaattacacaattgaaagataaatattttcagtttcgatggtcatcgaaggaagatggaattttattaattcatatttatgaatgaaagtgaattgagatcaaaatataaaaaaaaattaatcaatttgactagtctagaaaacaattttggagaatacttacgaaatcaaattcacttatcgattctataaaaatataacactccaacataaaccatccgcagattccataattttattttcactcgcacaaatttgaaaataatttcttaatagattatatcttgaaccgattaactcaaatacgtttactaaaaaaatttcaacacaaattatagaatcaaaaagtgaaccttgttgatataggcacttaattaattttcttgaaatattcctatgaaccataattgtttattcatattttttttttctttttttgtaaataaattgtttctttattcatattcatatataaaaaacagaatctctattgttatttagagaaacattaatttgaagctggttctagaggtaggcccaatgggcccataaaccctttttcgtttctcccttttatatctctcgtctctctctctctctgtctgaagagaaggaaagatcatcaatcacgattccaatggcgtcgattctgggtgatttgccttcctttgatcctcacaatttcagtcaacatcgtccctccgatccttctaatccctctgttagtttcttcccccaaattcaatttttcaattttacggatctgagttaggctttacttggtcgtattggaaaaaaaatgtgtcctttgttgattcaaagagatgtaattcgaatgtgtatctgggttttgctgcttacttggtcagttccaaaaagttccatcttttcaattatcatcgagtttgctgttggatcttgtgaaaaaccaatacaaattagccatttttgtcagattgattgatcttagaatcataattctgattccatttggccataatttagctgctaagtgacgaagacaagtttcaactagcttgtatcagttaaagattagagttttgatctgttatcgaaggtttgagttttttgttcatgttttcttgcagaagatggttcctaccacctatcgtcctactcacaaccgtacacttccaccaccagatcaaggtgaaacaaaaaatcgtgcttttttgaaaaaccttgcgtgttttttcggctagagattttagaatttcgttacattttatatatagtgtcaaagatttgtcttatgaagttgtgatcttgaacttgctttgattgagtgatttagttactgtctttactatgtatcacttcttagaatctctaggcaaattggtgttaatcagattcaacagtctcgagttttcacagatcatgtcttatgtttttactaatttgtatcttgttcgttatggttgtagtgataactacagaagtgaaaaacattcttatacgcagcttctatcaacgagctgaagaaaaggtgaaacagctctcaactctcattcctcatagtttgtgattctttgattcaaatctccgttgtttccctcgtatatatagttcataacacaggatttcgtaggaaaatagacaaaagaaaacgatatagaacaatcttgaacttcttcagataacaaaactgttgattttggttgtgttatccgaaatcttaatttgttttgtcaaatttgtcaattgcagttaagaccaaagagaccggctacagatcatctggcagcggagcacgtgaacaagcatttccgtgctgcgtcttcttcttcatctactcagggtttataaaaaacttaagttcaagcctataacaatggtcatttgtatgagtacctcttattagtgttttcaatgtagaaaaaaaaagataagagcagttcatgagagaaatgtagtgaaaatgtgtgtgtacataacattaatgtttcttttatttcttgacttaaagttgctcactattcactagcgttgaacatgaaaatcaggttacgttaacgaagttacgagcccaatatcaatttgattttaattcttcattttaaaaacaaattaaaactccggtttatgttccaaaccaaattgacaattggattagaatcttcctcttcgtcttcctctttttccaaatttttagtctctgatactctctgagctcatttcaccgaaaaaagtcaagctttgcaaaaaaacaacaaaaaaaagattccaattgtaaaaaaaccattggtcctcgacgactataaaaaaacacactttagtgagttgtcgagtcgacaacttcgtggaatttcacatttataatcctttacaattacgttacgcgtttttttcttcaatacataatcaaaggaacttgctttctcaataagactttcttcgaaccattctacaaatactttttttgaagttgaagcatttgtgatacttttatg

SEQ ID NO: 652 - DNA, 3 bp, Unknown
  misc_feature (1)..( 3): cDNA_ID_2044895_gDNA_ID_1620304_Annot_ID_152738 3000 nt of promoter + ATG
gat

SEQ ID NO: 653 - DNA, 3000 bp, Unknown
  misc_feature (1)..( 3000): cDNA_ID_2044880_gDNA_ID_1620304_Annot_ID_152743 3000 nt of promoter + ATG
catttctcaaaacgtagtaaataggagatttgccaagtgaaaaatatatataatgagacagttattatgaacacaatttacagttattatgaacacaattttggtgatgtttctactgtttatgaaatttgttttttttttacctgccagtcttatctatttaccaccaacatacattagaatctaatgtaattacatcatcaatcatagacctaatgaatatttaataccacacagtttaaacattgctattaaagtttgaaaagattatactttagtaaaataatgttttcaaacttgtattcaattatactacgtaagcagtgatccaattattacgaacataatacttttccaaatcaaaattttgtttttgttcaccttaccatcagtttcataatagaaatattatatatatacaacacaaacaaatgaatgagaaatgtttttctattattatgacttttatttaagattcaaaagaacgaagaagagttatatatatgcttgtttgtttcaggacaaatacaataaataagtggataagaaaaccacaaaccttgaactagcctgaaatgtgtgaaccaagctatacaaactgtacgtgattctgcatcgtggaagtcacaaacagacttctgacttctgctaaagataaaactcactgtttgcaagcaatttagtataaatatgaagcattgacctaccaagatcgacacaatcacacagtttcttcttaattaaacctagctatttttgtctttagcagaagtcagaaagctagttttgtatttttcttatttcttaaatatatggcggccaatgttatgagacggtttatgatttaaagatacacaatggacccacgacgttgccataatacaattattaggctgttaattaacgtgatcgttacgtttgctacaaactagctagttgtgtcttctttattttagtagataagtataagagtctaaaaatattacaacccaataatggttacattcatggtcgacttagaagatgaaagttgatttcttaaaaaaaaaacacgcacaataaataaaccaccaattcacaaatacaagaaatttaataacctcgagcagttaccctatttaaatcccctctagccttgttttccttctcacacctatgaagcaatggaagaagagagagaccacaatgcatctgagtcgtctctcccatctttgagcaagcagttggagagctcgactcttggaggaagcgcggtcgacgttcccgtcgttgatctaagcgtttctgatgaagacttcttggtgcgtgaggtggtgaaagcgagtgaagagtggggagtttttcaggtggttaaccatgggattccaaccgagctgatgcggcagctgcaaatggttggtacgcagtttttcgagctcccggatgctgaaaaggaaaccgtggcgaaagaggaagacttcgaaggatacaagaagaattatctaggaggtataaacaattgggacgaacatctctttcacagactctctccaccctcaattatcaattataaatattggcctaagaatcctcctcaatataggtacgtacctttcctaataaaatcgtatgagttagtaattcatgttttacgttaaatttcatttctttaacaaaatatcaaattttaaacgttggattttcgtccaaatttttgggggtaccagggaggtgacggaggagtatacaaagcatatgaagaggctaacggagaagattcttggttggttatcagagggattagggttacagcgtgagacgttcacgcaaagtataggtggtgacacggcagagtatgtgcttagggtcaatttctatccgccaactcaagatacggaattagtcataggagccgcggcgcacagcgatatgggtgcaatcgcactcctcatcccaaatgaggttcctggacttcaagccttcaaggacgaacaatggttggaccttgactatatcgactccgccgtggttgttatcattggcgatcaactcatggtatggttgacttttttgttgttgttttttttacttgagattcgttaatgtttttggggttgatttgtggattcaaattaattgcagaggatgaccaacgggaggttaaagaacgttcttcacagagcgaagtctgataaggacaaattgaggatttcttggcctgtttttgttgcacctagggctgatatgtccgtcggacctttgccggagtttaccggagacgagaatcctcccaaattcgagactttaatatataatgactatattgaccagaagataagaggctgggcgctcgaagatcttcctgtctactgaaaaccctcaatacctacaataaatgatgatgaattgttcaaggagacaattctttaatagcttccttttgagggtttctatatgtggtacaataaaactatttcaagaatttaaaataatatgtggaaaagctaagcggttagacaaaatattcatctgattgatgctatacattcaaatgtaatcgctcctatcctatgtacgtagtgattaacctcaaaaataatcagcttaagttgctgtattcgtttacgttatcatgtaaagcaacgccaaccttatgaagtcaaaaagagctcttcgtctgtgccaaagtatacgttgacgtgatttgggtcgtcaaaaatttatctacaaaattatcaagtgtttatttttatatgttaaactacaattttattcgagaatttctatttcggtttatctgaaatgttagatatttagattatttgaaatattgaaaagaaaaaacgctagtaattaaaggtgtgatattaatgttctattataattgaaatttgttctagaagaggaataattccactcttataacacctaataatctcaactactcccacatcacatgttcaaatagctcagaacatgtatattggttgaatgattgatcacaaaaaaattagaatcatg

SEQ ID NO: 654 - DNA, 3000 bp, Unknown
  misc_feature (1)..( 3000): cDNA_ID_2044866_gDNA_ID_1620304_Annot_ID_152750 3000 nt of promoter + ATG
atgctgaaaacggcatgtcgttttgtttgtttgaaatgttggaggaaaataatcagcaaacgacgacgtatcccctcgtgttctgaagtatggaaacggcaggtcgttaactcttgcttcaaaaagaagtttccctctttcaatttttttttacttattcattgacttcgcttcttcctctttgtcgttaactcttagataattaacacggaaaaaccataagtaaaaagcaaaacaaatagataaagaaaaagagcatatacttcaaaacaatggaagagatgatgatggggtcaatacgatgtgaggaatcagaagaaagattccagcgactgcgtaccctaaaaggaaccagaaccaccgtccattaatggaagcgagaaacttgcttgcatcccaaagcactttcataaagtggcaaaagagaaggcaagggatcatagtttccatactcaccatcatccacatttactctaagaaatgttgcactcctgggggctgggacaggatgtccatattttgatgcttccgcactagtcttaggctccatcggttttggaaggaagttgaagaacatttagaacaatacactaaactgtaacgtcgtcattttgccaaagagaaaaaaaaatgggccactcgattattatttgtttagacccgttggtaatcgggcttaaacgggtgaaccctattaaattatttattttttaaatggattcgggtaaaaaaaacataacaaatagcccgtttagactcgcgggcttgaggcccattgtaacatcactagagagagaggtgtcttattttattttttttatgagtgtttaggaccaaaattagattatcgggctttcttcacaagccaattatcgtacaaccatgtttgagttccagtgaagaacctttttgacgacggcgtatactcgtatgcttaaatatgaaaacggcaggtcgttctttttcttcgaattgtttggagaaaagaaatttcgaagcgacgacgtatcgtcatgtcctggaatgtggaaacggcaggtctttgtttcataaaagcttagaattcttggaccatatttagttcatgaatttatcatacgtattaatatggttagtgattgttttaattagggtactagatgatttattatgacctaactgatatatccacctaaatagttttgatccgtagcttttcagttgattcacgagaccgaaaatttgaactaaaatggagaatttgtggattataaccaaattacaatatctatatgaaatataacagatactgaattagaatagaaaacatgttgttaaaaaatttaaaataaaaataaaaataaaaatgggcaaaacaacaaataccaaacgtaaacgaagatattagaaaaagaaattctaaaacagtggcgtttttctgtccaaatccaaaactattatgaagggacgtttctgatatatatataaaaaaacccgagattttatcggatgtgtcgtaatgaaaggggtaaaacacgtggcagtcaaccaggctgtcagttgttggtgaaagcagacaagcgcgtgattttaatataatctctctttacccgcgccaacaacactttaccaagacagatctctcatggcggtgctctgatgcttcagcctttgattttttccttttttgacctttttaatctctaattataataatcagtacaaaatcactgttgtttaccattaatttaaggaattaatcctaatctgattttaaggaattaatctctatttgccaaagaagaggcgcaaaggctccgtcttttttcttcttcttgtttctgtgttaccgatctggctctgtcttcttcttcttcttcttcttcttcttcttcttcttcttcttcttcgtttacgtctctgtgaaatgctcaagctgattagggtttatcaactttttctcaactttcttgttatctccttcgttatcctctctgtcttctcaggtgactaatcactcactctatcgttatccacttgattgttttgtttcctgtttgctttttgatttgagatctatttttgggttcagattgttgtcgacagctaaattctttgatgtatttggatcaaagtatccgtttttatttgatttgttccgtcttcttcgtgatcgtgtttgtgtctgtctctctcctagatttgggttttggggatttgggtatgcgttgttgtgatcagaagggacctttatcgtttagtgatctctttgatacagagagacactaaaaatggtgaaaaaatgacaaaacttcttattggatgagggaagaaacgttctaacgtgttccatcttctatcattttcttcttagatattttaagattgactgttttctgaacatttcatgctttaggaagtgttaagttgaaacctttttctcttagctctccaattgctaagtgttttttctgttgtctttcttaattatcttttgggattctcatgggatttgattgaggtagagggaagaagagagagagacaaaaagagctttaggctattgtctagacttgcttaatttggaatatatgtgtgctgagtctagtattttcctctgtgaaatccagctgatataatcatgatagtaacattcagtttcttttgtcctttcattgattgcagcttagcagctattgtgcatttgaagctgtactcggaagaaaagcccatagaagagtcaaatgtaagttctcttactgattcttgagctcccaatcaatgcatagaagctgcgataataacccattaattatgtagaaagtttatatgctcattggtcgaccatacactttattttggctgtttctgatgttctggcttaacatatctgttttctttgctgttcttgtgattagcatgaactaagtttctgactttgaaatcagcaaaaatgtgtcgtggttggtcatgctggaatctttagtgctaattatctctggctcatacagataacaaaaa

SEQ ID NO: 655 - DNA, 3000 bp, Unknown
  misc_feature (1)..( 3000): cDNA_ID_1582835_gDNA_ID_1620304_Annot_ID_152754 3000 nt of promoter + ATG
attcctcatttaatgggcctttgtaacgtttcatctatagttggtttaaggcccatatatttgtctggcctgatgtagtacaataattaacggcacaataattaagtagtcacatgactaccaaaattagtgtggtgagtgggtaaactgtgaagtttcagttcccattgtcccgtagtgagaaagcaccagtccgcacatgactagccctcactttaaccattcccccataagaaattactttttgagaatgattcggatctagttcatggcctattagtaactttcaaaaaaaaaaaaaaaaaatcttgctttagcttatgttattaacttattattggccgaccattgtccctcgttaatttaatattcgactgcactttttttgttttattgtgtgtggtgcaattcatcgtttatactttatccacacatccttgaccatagcatctaactaataaaatacgatggagactagctcttaccatagcatctttttttttttaatactaataaattgtttaaaactcgatgtttagttgagtacactatgtggccccaaaaagaaaccctaacgaaacctacacttgaatctatatatatggagtcatggagaagtagctcttgctccacttacgtttttagcatttaacaagcaatcaatatcattaggattatatatggagaacaagtttttcgctgcattcttcttgcttcttgtcctcttctcatctcgtaagtcttttccttctatatatatgcattggtccatgaccatatttgattgacaataaatatatatatatatgatatatatgtgaagtcagtgttacgtgatctatctccattcttatgtgttgcattttatttgtgtaattaaatagaggagatcattgggggtgaaggaaggacatgccaatcaaagagccaccacttcaaatacatgtgtacgtccaaccacaactgtgccatagtttgccgtaacgagggattttccggtggtcgctgccatggcttccatcgccgttgctactgcacccgcctttgctaactagtttattttccattaatccatttaaatgtactttttctttctttttattttgaatactaataaagttcatcttcttctttttctcgtttgacatctattgttgggtaaatctcgattctagaggaacgaactgagatatatgtattaataaaaatctcacgctgattctgaaacaagcaatgtactagaacgttgtgtcatgtgtgtttattgattaactagagttaaatttgatttaataaaaatgtcatttgatctatgttttgaatcagcactccaataaagattatcaatatcataaagaagtttctcttaattatgagaatatttataacaatatacatttttagttatcattttaacccaaagtccacattttcttttagtcagttattatccaaaaaatcgtttatacttcccggccaaaggtttccttaaagggattttcaacaatcattttccaaaaacatttgaagaagcatatatatacacatttctatggaaaaaagcgttcaagaaatcacatacaacatctaacatttatgcaaactattttttcatataaaatctgataatttttatacacaatattctgtttatttttacacaatgttctgaaatttgccgattttgattgagtttcaaatgaccaaagttaacatttgaccaatttcaagtatggatttatggaaatgtcataactagagcaagagagacataaaagagaaatagtactaagaaaaatggaaaaagtacatcatcaacataagagcaaatgtctcaatgcattattctatatatttttttttatctatcggttctgttataatagtcaagagaagtaaaaataataggagtatgaagaatgcaacaacccacactaagatgtttataacatcatatgtacacgatgaatgccaaatgaactaatttgcggtctaagtcatcatcatctgttaccattgaatcacttcaactttgtgtcaagtccccaaatccggattgttccatcatcacttgctgaggccaccatatagaggttagtcgggtttcaactgacacacttcaccgatcctgagtatcctcgcaatacactacaagattacgtcagtgttcttcgtatgacccatatgtatacctgacacatcaaagaaatattactcggaagactctaaaagagattgataagaactgttttcccccatatctatgtcttttttacgttgtagattaattattcttgatttgggtatcataaatttaaattaaacaatctagttaaaaatgatgagatctatttggagtgaaattaaacaattttaataaaaatgtatgtgttatatgtatatatacatatatagattaagtggagtgaaaattaacttaataaaaatatcattgatatatgttttgaattagcactctaaaggttatcaatatcataaatgagcttctcttacgagaatatatatatgtaagaatatacatttttagttaattcaaaatttcattcgattatttgtttgaacccaaggtgcacatatgttcccgtaagccgatagtcataacatttgaagcattaacacatttctatgggggaaaaacgttcaatcaaccacataattgtaaacaactaacatttatacaaacgatcgtctgaaaaaaattgattcatataaaatctgataactttagtttatagtatacacactgttttgaaatttgcggatttagattgattcaagttcaaaaaatttgaaaatgtccaaagtcaacatttgaccaagaagtcgagtgttgtttttaatattgatggctaatatgattttaaagcccatacataaaagcccaaatacggcccaataaaggaaaagactcctctgggaagaagaactaaaaaagaaactgggattttggaagaagtggtcgagagaaaacaaacgata

SEQ ID NO: 656 - DNA, 3000 bp, Unknown
  misc_feature (1)..( 3000): cDNA_ID_3058245_gDNA_ID_1620304_Annot_ID_152758 3000 nt of promoter + ATG
tattgttctgtaactctctgcatcaagaacaattactatgagtaatggaacctaaaaagaaacttgtaatggaattggtttatgatctcttacaaggtaaccaagaacttcagttttgtaatagctggagagagtgttcctgtgaatccactcgaggcaagatttctacagattgatacaaaacaagtttttcaacatgatgagaaatcttggtaactaaaacttgagaagtgatctttaagagtacttacagagccacaacactctggcctctgcaggtaacataagaccaactatagcaagggctcacaaaatcgcgtgtccattttagacgattgctcgaatcattaagcgaatctctgagctgcaacagagctcctcctagcaaatgaatcaagaagcgagttaatactacaagatcattaatgatttataaacaaaggctaattatatatagaccttcgatatctggttgagttgttgacgaagtgattcccacaaaagctaaggccatgaaacattgtaagatcaatttctgattgttccatctaaagcaatttctttgaatgaatcctcgaagaggatcatggaaactttcaccgttccctgcagtttattaaatcagtcaatctcagtttaaacagcttttcttttctgctgcagaatctatagtctaaattgcagcaaatcgatggagaaagttaacttactatacaagaaacacataacttgtgtgatcaaactatgttaactaaacataagaaagcaaagaaaagaaaagaccgatttgtgggtctaattatgtcttaaaaactaacagctttgattgctttctgatgtgaaacattgtcagatcaatccataactcctctatcagagctcatttgaaccgaaaacattaagaaaaatgaaagcttataagtatcaagaacaacaaaatttataattctgtctttgactctttgctttgatgatcaaaaacctctccgtttcacctaaatatgtaccaaatattttgtaactcgaaactaaaagaaacaataaagttatgtaaaataaacaacaaaaaccaagaaacctaattaatatacaatggagaaagataggcattaaagtataagtaaaacaaagcttttaaatacccgagtgagccatagaggagctgaaaacactctaaacggaagagaacgaaaacatggggttgaagagagaaatggaggatttgtataataatgaagccaataaaagcaacaataatgtaaaatcatctaaagaaagagaagttagtgcttataaaggacccacaaaaggtatttttcatatttttatctctatgatgtaaaaagaagatgaagaaatgctgctttgagagaaagagaatcccactaagttgaaacatctttgatttcttaatggaggtgtatttttccatcttcttttgcttctttattttgggtgagatctcttttgcaagtgtgtaacttgggatgtgattggggctaaaaaggatatcaattttaacaaaaaaggatatagatggcccaaaataaacataaagtaataaagaatgatttaaacgaattagtaatagaaaacaaaccaatgacttaattaagaacttaataatgtttgggaaaatggcttatgctttaggaagagacagaagcatgtgtaagaaggttccacacttccacttgttcgtgttatattactccactattctggacgatgacaatgcaaaagggcgtttttgtatatattcctttcttctctgaccttcaaatcaaaggatatgatacaaactaaaatagttttaacataacctataactatatatatatatatatatatttaactatctgtttttgagtaaataaattcaaacattgagaagtttacatttttaacatttataaggtaagtaattgatcttttgatatccttttaaaaaacaaaaaaaaaaacaaatttagttaccgcctttcaaaaaagacgtagtaaaacatcaatgtttagaaaactttaggttatttcccttaagagctatgttgaaacatcatgtagaaatgtaggcagaagagaaaaaaagatagatatttttaataggaaaattaggtgaagaaaagagaaagagaacataatgtgaggaagaagagactaagaatatatacggaataatgatatcaatactaatatgcttgattagttggacatgttcttatgctcctccctttatatgttgtcatacgattcttcaccttattgagacttttgttcgatctgcaaaaagatctgatgatcatatctcaatctagaacgtatatttcaaaagttaaatttcatcaacattcacaaataaaacaaactcaaatttattttctatttttatcaggaaaaaatgaacttaggtaagtgagaaaaaagccttcagagcaaaaaaaaaagaaagaaagataaatttgaacattgtgaaaccaaatgccagattacttttcttacttattaaaatcttataacttgtaaatgatttgttcataaaaatgttataattagtaaattaattttaacaacaaatatcacttataatccaaaatttaggtaaagacaaaacttggttcgatatcttttgtacttgcgagcattgtacttcccggtcacaaaacgcaatcgctaagtaaaaaaaaaaggtccatctgaacgcaagacttattcaatttacgaaataacccctatgaaactgtgtttaatggacacgtgtcctggatacgataggggtataatagagactttaggaaagtagaggttggcgtttgggtgattggtcaaagcgaatccttaagaatctagtaatactgacacaggtcactcaaacagctatttatttggctaattttcagccttaatatcagaattagagagataagtttttcttcttcttgctctgtcgccactaactaggtcaccgccaagtaacatcggatcgagagagagagagcgatg

SEQ ID NO: 657 - DNA, 3000 bp, Unknown
  misc_feature (1)..( 3000): cDNA_ID_3058235_gDNA_ID_1620304_Annot_ID_152765 3000 nt of promoter + ATG
gtgaagacatggagaaactaatgactgaatcaggtttgaaaccagttgttattgattcgaatcaagatttatctcgtgtatattgtgggatctgctctaatattggtgatgacgattatgatggtgatgctgttgttgttgatggtgatttgatctccacgcctttttgttctcacaagttctgcaaagcttgttggagcaagtatcttaagaaaaatttcttctctgtggagaaaaaccacactgcaatctcttgtcctgatcgagattgtcgagctgctgttggaccggagacggttgagaagctaaccgtacgtgatcaagcgatgtacgagttgtatattctgaaatcttaccgtgagaaatacctgggatggaagctcaaactgtgtcctgcacggggttgcaattacgtgattgagtttcatctggcaagtgaagatgaagagcatagcttaaacattgtgtgtctctgtggtcatatcttctgttggagatgcatgcttgagtcacacagaccagtgacctgcaacaacgcttctgattggttgtctagagacttggagaaattgatagaagaagtagacaagccatcgaccgtctcctggattgatgccaataccaagccttgccctcattgctttattcctgtggagattgatggtgaacgaccatgggcccagttcttgacttgtgtctgcaggtttcactcttatgaaaataacactgttttttgctattcgcagattattagatttctctatcttaattatttgatcatactaatttgtgtgttttcttgattcagcggtcgtttctgttggaagtgttttcggtcaccggaaactcacggaacctcaggatcctgtttggcaccggcgcgttcgagcaatgttggtttcaatcattggaacagagcaaaaccggggatttcgtgtttggatctctggaatgcgagtcaagtgaatctggtgaacgctaaatacgagctagaagctttcgaggaatccataatcaagaaacctagtgacttgaaggagcaagacgttaaggtactaagggaaggactgatgctcattgttcagtgcagacagttcctcaaatggagctgtgcgtacgactatatccacacagagtatgatatggcgaagagagagtacctgcgattcctccaacaaaacgcgtctggcattgtccatagtttctcacagagtataaaggaggaaacagaagccaaagagcttacttgcggtaagctattgagcgagacaaccaacattgggaacttcttttatcatttcatcaagactttacgagaaggtttgcccgaggtacaggcggagtcgtacgacaactatggtggtccttactggttgtgcgatcgctgcacatatggaaactcttggttccagagggcctgtaagatgtgctgtgatcctactgcgtctaagatggacgagctaagtgattgatcgcttaactaggtttcttaaagataaaacaaaaggttctaggagacagagtaaccttgcaactctttaagttctgtttttttttttgctttctttctttctttctttctgcagttttatattggactaccaactttcaatgtcgaattgactttttctttctttcctgatagttcacagttacaatgctttgtgacaagcaacgtttggctctgatgttctcagactccataagaaaatatgtggtcctgttgttgtcttttttcatccctcgctctactactgtagttttgctctcaggaactaaaagccctgaagatggactaaaacagaagatgaagagcactgcttttacatctgaagatcccaaatttcttgtcaactgataaagaactttgttctttagacttataaattgtgttttcaaatgttcattagtcatcagaataatttctatctttttatttacttgctcttggtaaaataaattatcatagtcgaaattagagccccttggccttttttaatacactcttgatcaatcaaaaccatgtagttagtagaaaacgtctggtttaacagggatttcatttacctcttcatatcatggattaggttcctcaatcaattccacagactcagcccacaacaaaaatcaattgtttatttaaggctcaagacttagctttctaaaacctcaaacacacaacaaaattagtaactgattcgaggagtgtaaaactgagacagaaagtgatgctgagacagatcaagttgttgatgaaaaattccaccaaaagatcaagttgttctgatagttcagaaagaacacagagatgaagagtttattgaaataatcagtggattctctgaagagaaactgaaggagacatatgtaggaaattgtaggggatgtcttaagttcatatacttcaagaaagtgtaagtgttatgcattaagcataagtttatgattcttatgttctcagtcctctgactccacaagaaaatatgtggttctgttgtcgtccctttttccatctctcactcgactagttttgttctcaaaaactgaaacctcagaagattactatataaaccgaattgggcccaaaaagacaaaacaagaagtgctaatgggccatatttattgattagacgattgtttagcttagatgaaggtccaatggtccaattaaaaacttatcaggcaatttagcaaaaacagatagttttttacttgttttttttttgttggtcaatagttttgtttacttataaaactcgatatttcccataagcgagtgagaaaaggtaaaaccctaaaaagttgaaacagaaatcatctagagacgattaagagaaaactaagaacgataactctcgccttcgattctttttgttgattgaggcgcaagctacctgtaagccttaaccctattccttataagtgtatccatcgatcgatctctttgttatgattcattgatttgtttttctgatttttgtcaatcttaggcacacaatg

SEQ ID NO: 658 - DNA, 3000 bp, Unknown
  misc_feature (1)..( 3000): cDNA_ID_3058227_gDNA_ID_1620304_Annot_ID_152767 3000 nt of promoter + ATG
agcacatcttacaggccctctggaaccaagagtttccatatgtgcagcgatcgcacaaccagtaaggaccaccatagttgtcgtacgactccgcctgtacctcgggcaaaccttctcgtaaagtcttgatgaaatgataaaagaagttcccaatgttggttgtctcgctcaatagcttaccgcaagtaagctctttggcttctgtttcctcctttatactctgtgagaaactatggacaatgccagacgcgttttgttggaggaatcgcaggtactctctcttcgccatatcatactctgtgtggatatagtcgtacgcacagctccatttgaggaactgtctgcactgaacaatgagcatcagtccttcccttagtaccttaacgtcttgctccttcaagtcactaggtttcttgattatggattcctcgaaagcttctagctcgtatttagcgttcaccagattcacttgactcgcattccagagatccaaacacgaaatccccggttttgctctgttccaatgattgaaaccaacattgctcgaacgcgccggtgccaaacaggatcctgaggttccgtgagtttccggtgaccgaaaacacttccaacagaaacgaccgctgaatcaagaaaacacacaaattagtatgatcaaataattaagatagagaaatctaataatctgcgaatagcaaaaaacagtgttattttcataagagtgaaacctgcagacacaagtcaagaactgggcccatggtcgttcaccatcaatctccacaggaataaagcaatgagggcaaggcttggtattggcatcaatccaggagacggtcgatggcttgtctacttcttctatcaatttctccaagtctctagacaaccaatcagaagcgttgttgcaggtcactggtctgtgtgactcaagcatgcatctccaacagaagatatgaccacagagacacacaatgtttaagctatgctcttcatcttcacttgccagatgaaactcaatcacgtaattgcaaccccgtgcaggacacagtttgagcttccatcccaggtatttctcacggtaagatttcagaatatacaactcgtacatcgcttgatcacgtacggttagcttctcaaccgtctccggtccaacagcagctcgacaatctcgatcaggacaagagattgcagtgtggtttttctccacagagaagaaatttttcttaagatacttgctccaacaagctttgcagaacttgtgagaacaaaaaggcgtggagatcaaatcaccatcaacaacaacagcatcaccatcataatcgtcatcaccaatattagagcagatcccacaatatacacgagataaatcttgattcgaatcaataacaactggtttcaaacctgattcagtcattagtttctccatgtcttcacccaaacgctccaaaacccgattcgagtcccatcggaatcaagattgactccgaaggtaaacagaggaaagctttaacagacgagagttttcttgtatctactgttctagggttttccttttttttttgctttggagatatcgattgcttctctacaaattgtttttttaatcattattaattggaccctaatcattctaaatatttgtgatttatataagattacaacagccaattatggtttacattgattttttttttaaaaagcctataaatagtttttttttattaactcaacattatgattctttattatttatcaatttaataacaaaagttgacaaacaaaaataaatctaaaaaaaaagatctgtactaaatgtgattaaacttgttaagaaatgttactgaaagcaaaaggcaaaccaaatctaaagtcaataaagaaaatatccacctccatgattcaataagccccctaaatggctaaatcaatcaaaaataggaaacaaacatagacccaaaagtatatttaagtaatatatttgactttcagctaattttattatctttggtcaaaaaaaaataaaaaaaaattttgtttatgttttgacttggtgaacactaaatctagtgcatgtggttaccaactcacaaactaataagcaatgcgattggttctttatcatgcaagtgacgtcacaagagttgagtgaagggtataatagtaaaatcagtaagaagaggcaacgccgacgaacccgtggcccgcacgtcgtgagaagagaagagagtctgtgtgagcagaacagagcgaggaaaggcgcgtttgttgcgttttggccccaaaggccaaagcccgccttttgcttttcacctttcgttataaaaagcgtttcctctccttctctttccatttctctctctctcctctctcgctcgctggcttcgaggagaaaaaagaaaaattggagaaataatttaactggttctcggagaatctagggttctttttagccacgccttgctgatctccttcgtgaattcgattccgattctcacctggtacggttttttatatttactcttggttagaattcgcgtcagatctggaatttttgtcatactttttttttctttcgatatcgattcctatgatgacctcttctgtgtcatatttttgtgcattaggcttgatttgtgtgttgttgtttcgccgaattgcttgatctcgtttagttttggtggtcttagacgatttgtggcttagactgtccaatgtggaattgaacagagtttgatgtctagctttagaaatacagtaatctcctaattgttcaggatttggtttaggaattatgagattgtgctatctctggcacgatagaaagggaaaaaactaggtcactagctttgttgaagcggaattgttgagccattattgaatctgtgattattgaggttatctcttcttacggagacttatctggcaggtcttttgtggcctaaagctcataagtttatgctagtgcaagaagttatataggaatgacatattagatttacaatg

SEQ ID NO: 659 - DNA, 3000 bp, Unknown
  misc_feature (1)..( 3000): cDNA_ID_3058231_gDNA_ID_1620304_Annot_ID_152766 3000 nt of promoter + ATG
catcaactactgaaatacctcttccccactgcaaaactctagataaatcatttcctgtgcctaaaggaagaatagcgacaggtggaggggattcgaaattgcgcttctcaatagcatcaagcacccatgcaactgttccatctcctccacacaccaaaactctaaaatacttcactttgctacataggtctaaaccagcgtctggcccttgacaagagccaagttcaaagacctgtaaattcaccaaagcaattatcaatcagtgatataaattcaatatgtttaaaagcagacaaacttctaaacgtacctgtactggattcaatagcatattaagtctcctgtgaagaaaaggaccgagttgacctccgcttttggcgttaataaagactaaaagcggtcttgcatctgggggcaaatcaaccaaggaaaacttcttcataaaatttaaagcggcacttttatttcgtttgtgcccgcctataccattttgcaaccctttggcattaggcatgtccgagacttgctttaagcaatctatgctcctatctctgcgtagtttcttcactacaagcccattaactacggtttttactggatcgctgactgaatcctccagtagcttaccatttaaagattggccattcccattttttcccctgtggcgctttcttctcacatgccctcgtatagatgctaactcgtttttaatagtagtcagtactccatcgacaccatttgcttcattgagttttacatgtactggagagaggattactcttctgagagagccaagatcacaagcatcaccagattccttggacataatcatgtgacacttaacatgtatgaggcgctggcaccaaagacagtgccacataggagaagcttcaatgaaaggaataccacaaggttcatcacagtagaagcaaaaggcagtcatgtcagcattatcatccatgttaacccatcgctcagaccagtgatgtcggacatggtcagacccagcctgtgcaacacatttgcagtcttttgctgcagagcttgagcaataaaagtgagctgctacaccgcatacagcacatcggtggacgggaatactcagagatgctttattagaaacattttgacctggaacaagggagtagagacaaacacagcaagtggatggctgttgcccataaccataatcatcagtccattgatgatgagaaagtggaactctcagtcttttccataccttcttcttctctctagcagcagctttaacccaatttaaagaagtttttttctgccatttaagaaatgtgtagataacagccagaaggccaacagatccagttacaagccatccaaatataaacggactgtcagcaccagaactgatcaaccactgaataagagagaaccccacttccatcattgtaaatctaatatgtcattcctatataacttcttgcactagcataaacttatgagctttaggccacaaaagacctgccagataagtctccgtaagaagagataacctcaataatcacagattcaataatggctcaacaattccgcttcaacaaagctagtgacctagttttttccctttctatcgtgccagagatagcacaatctcataattcctaaaccaaatcctgaacaattaggagattactgtatttctaaagctagacatcaaactctgttcaattccacattggacagtctaagccacaaatcgtctaagaccaccaaaactaaacgagatcaagcaattcggcgaaacaacaacacacaaatcaagcctaatgcacaaaaatatgacacagaagaggtcatcataggaatcgatatcgaaagaaaaaaaaagtatgacaaaaattccagatctgacgcgaattctaaccaagagtaaatataaaaaaccgtaccaggtgagaatcggaatcgaattcacgaaggagatcagcaaggcgtggctaaaaagaaccctagattctccgagaaccagttaaattatttctccaatttttcttttttctcctcgaagccagcgagcgagagaggagagagagagaaatggaaagagaaggagaggaaacgctttttataacgaaaggtgaaaagcaaaaggcgggctttggcctttggggccaaaacgcaacaaacgcgcctttcctcgctctgttctgctcacacagactctcttctcttctcacgacgtgcgggccacgggttcgtcggcgttgcctcttcttactgattttactattatacccttcactcaactcttgtgacgtcacttgcatgataaagaaccaatcgcattgcttattagtttgtgagttggtaaccacatgcactagatttagtgttcaccaagtcaaaacataaacaaaatttttttttatttttttttgaccaaagataataaaattagctgaaagtcaaatatattacttaaatatacttttgggtctatgtttgtttcctatttttgattgatttagccatttagggggcttattgaatcatggaggtggatattttctttattgactttagatttggtttgccttttgctttcagtaacatttcttaacaagtttaatcacatttagtacagatctttttttttagatttatttttgtttgtcaacttttgttattaaattgataaataataaagaatcataatgttgagttaataaaaaaaaactatttataggctttttaaaaaaaaaatcaatgtaaaccataattggctgttgtaatcttatataaatcacaaatatttagaatgattagggtccaattaataatgattaaaaaaacaatttgtagagaagcaatcgatatctccaaagcaaaaaaaaaaggaaaaccctagaacagtagatacaagaaaactctcgtctgttaaagctttcctctgtttaccttcggagtcaatcttgattccgatgggactcgaatcgggttttggagcgtttgggtgaagacatg

SEQ ID NO: 660 - DNA, 3000 bp, Unknown
  misc_feature (1)..( 3000): cDNA_ID_2990616_gDNA_ID_1620304_Annot_ID_152771 3000 nt of promoter + ATG
aaaaacccagaaattaaaaatcagaaaagcttactcttaagttgttcttcttgttggtagaagcagatcgatcgacattagcgagacgatactcgtgcataatccaattcgttttaatccctttcggagcttttcctgcgtagaagacgagtgctttcttaatccctaacgtcttcggttttccgatcggtttatcagctccagtcgctttccaataaccggttccagctgcccggtttggtctcgacccgtttgggtatttccggtctctatgcgagaagaagtaccattctttctcaccgtacaacgccatttctggaaacaaaaattcgaattctcttcaaaatctcaaagtcaattcacaaaaccatatgtcaatcttgtcgtggactgaagttttacctggaagctcccatggattgaatttgtacaagtcaatctctgcgataaccggaacgttaatcggttctgacgcacatctccggcaaagatagaacttgacaagctcttcgtccgtcggatgaaatcggaatcccgccggcaaattcaactccgccttcatttttggaaaagtaccttgttgttttcttgtggataagattcgattttgagtttttataaaccttcgaatcggaggatctttgtggtttatctcaaagattgaaatcgaggagaagagagcaaagtccatggagcttttataaacgaaggggaggttcatgaaccacacgtgtgtagttttctttcggacacgtgtgataaaaaccaacctttttctttttcaacgttgaccgcgcagccagctgaggtttacacgtggcttggactaattggatgatcgacatacagagtatgtgatgatgtcattgcttccgtcagccgcacgaaccttttcgtggttgtaatctggtacttcacggtgtagcagcttgtgcacgatgttctctggctgatatttatattgtgacttgtaagtggactggtcagagtattactgtgagcttctccgcagcggatttcttctctgttcatgtaattgcatacgtcattgagaatagatgacttcatcttagtcacacgccggcttatatgtatacgtaaagtctgaaagatgcgataatcgaccagtttcgtggaccaaattttccacataaacgacagttactatttaaaatgaaatgtattatagtttgcttattcttttccctaatattttataaaatgttgtttagtaacaagtactaagaccatcttcattggtaatctttaagagtttctaagcacaaatccttatgaaaaaagtttaaaaataattcaaaaatgtgaaattaagcaaggtatgcaccttagcttaggtattctttggtttctaagaaacttatatgtggcagtttttcattgactggagaagaatacaaaacaaaacataaaatctttcacattttttttatatcttctgaagataaatttgaaaataaatctaattgcttttggtttcttttaattgaatagatagcaaaaatattatctgagtcaaatttaaatttaatcgttattccaattttttatttgtctttttatatgtttttatgtcatatatgtttatgatttaagaatttttaataattattatgctttatcaaatcgaaatacttatgatttttcattttaaaactaactttttttctttaaagaaacccacttaaggattccaccattggacaataaaaatagtaaagactcaacaaaatctctaaacttcaaaataatcaaaatttattcttaaaaaaattaaaggattccacattaggactccaccaatgggggtgctctaatgaatgtaagtaaactgatcttatatgttataatttatattggggtatgtttgacaactgtgacaattagaaaaatgggctttttgagaagaaaaagaatgtaaaactcaatggaagatataaaaatggctcccaaaatcataaaacatacgaaaaatatttatgtgtgtttagaaacatatatcatgtttaataaccaaaaaagaagaagaagaagatatttataaactagaaaagaaaaggtaatgcttagctagagcatcaagattgtaaaagcccatatggggcttaactataacttcccttttaaaggcccattttatctttacgtgaaggctgtgttgggtccaagtcttgtcttccaagttccagttgcaatgtcgtatacgcaaaacctcaacacctaggtttcaactttttcccaaattttgcttagacaagtgtatatgcaaaatgaagaactttaatcgaataacttttcttgtcaataatttttttttttttttttgctttaaggttttaattaacctatttaaaatacaatttgatatgttgaaatttaaaacatatattgtaaaaataaatttacaagaaatctttacaaaacaagattggaccattttgttgttttgaaaaatattcaacttgctcatttttagcattgacttgaacttattcaacataagtatcacttaatcactttactaattcaactgatcaaaacttcttttttggtgggatattcaactgatcaaaacagtaaaggttgattattagtttgccttagaagttgaagatcatatagatgctagtcaaattagaaggggcattttggtaattcagttgtagaatcgtaagacaaaggtgaaaagcataatgctattttcaggattatataacacatcaacagaggatccaaacttttcccaattattgcaagtcaatcgatttgtttatctatataaagctcccaaatctcaaatctcaaatctcaaattttttattaaacgcctacatatattactcacacttgttttcagatcataaagttttttcttggatttatatataatgcactaatacatacacacccacatgcttacacacatgttcgaactgtaatcagtaaaagaaacatcagagaggaagagaaggagaagaaaag

SEQ ID NO: 661 - DNA, 3000 bp, Unknown
  misc_feature (1)..( 3000): cDNA_ID_2026708_gDNA_ID_1620304_Annot_ID_152770 3000 nt of promoter + ATG
gtagtatatagatgtacattacatcatatatatcaattaggtcgactacgatacatagttttgcagcaatatctagcatatgattttagatcttatcaacaaaacattgctttcatatatatccaaaattatactcctgattttgtcatatacgtatagttttgttttttgatagcttagttttgtcatattacatcaatagttgatatgacacaagtttatggtccaaccataattatttacgtttgccaaaaatgtttaccattttaatttgataaaaggttcatttgccaaaaatgtttgggttaaagaggtttgccgaaatgttattatcacattaaatcacatctagtttatgtatgatggaaacatttacctcgggtgtgctgcgaggatagtggatggaaccggagaagagaagcttcctctgtccatcgattatcaaagaccgtccgtcgtacgttactcccttcgccgccgtagcaccgccggagaattcaagaaacgtacccacaataagaatcaaacacaacccgaagaccagacgacccatctccatcttttcttctccttctcttcctctctgatgtttcttttactgattacagttcgaacatgtgtgtaagcatgtgggtgtgtatgtattagtgcattatatataaatccaagaaaaaactttatgatctgaaaacaagtgtgagtaatatatgtaggcgtttaataaaaaatttgagatttgagatttgagatttgggagctttatatagataaacaaatcgattgacttgcaataattgggaaaagtttggatcctctgttgatgtgttatataatcctgaaaatagcattatgcttttcacctttgtcttacgattctacaactgaattaccaaaatgccccttctaatttgactagcatctatatgatcttcaacttctaaggcaaactaataatcaacctttactgttttgatcagttgaatatcccaccaaaaaagaagttttgatcagttgaattagtaaagtgattaagtgatacttatgttgaataagttcaagtcaatgctaaaaatgagcaagttgaatatttttcaaaacaacaaaatggtccaatcttgttttgtaaagatttcttgtaaatttatttttacaatatatgttttaaatttcaacatatcaaattgtattttaaataggttaattaaaaccttaaagcaaaaaaaaaaaaaaaaattattgacaagaaaagttattcgattaaagttcttcattttgcatatacacttgtctaagcaaaatttgggaaaaagttgaaacctaggtgttgaggttttgcgtatacgacattgcaactggaacttggaagacaagacttggacccaacacagccttcacgtaaagataaaatgggcctttaaaagggaagttatagttaagccccatatgggcttttacaatcttgatgctctagctaagcattaccttttcttttctagtttataaatatcttcttcttcttcttttttggttattaaacatgatatatgtttctaaacacacataaatatttttcgtatgttttatgattttgggagccatttttatatcttccattgagttttacattctttttcttctcaaaaagcccatttttctaattgtcacagttgtcaaacataccccaatataaattataacatataagatcagtttacttacattcattagagcacccccattggtggagtcctaatgtggaatcctttaatttttttaagaataaattttgattattttgaagtttagagattttgttgagtctttactatttttattgtccaatggtggaatccttaagtgggtttctttaaagaaaaaaagttagttttaaaatgaaaaatcataagtatttcgatttgataaagcataataattattaaaaattcttaaatcataaacatatatgacataaaaacatataaaaagacaaataaaaaattggaataacgattaaatttaaatttgactcagataatatttttgctatctattcaattaaaagaaaccaaaagcaattagatttattttcaaatttatcttcagaagatataaaaaaaatgtgaaagattttatgttttgttttgtattcttctccagtcaatgaaaaactgccacatataagtttcttagaaaccaaagaatacctaagctaaggtgcataccttgcttaatttcacatttttgaattatttttaaacttttttcataaggatttgtgcttagaaactcttaaagattaccaatgaagatggtcttagtacttgttactaaacaacattttataaaatattagggaaaagaataagcaaactataatacatttcattttaaatagtaactgtcgtttatgtggaaaatttggtccacgaaactggtcgattatcgcatctttcagactttacgtatacatataagccggcgtgtgactaagatgaagtcatctattctcaatgacgtatgcaattacatgaacagagaagaaatccgctgcggagaagctcacagtaatactctgaccagtccacttacaagtcacaatataaatatcagccagagaacatcgtgcacaagctgctacaccgtgaagtaccagattacaaccacgaaaaggttcgtgcggctgacggaagcaatgacatcatcacatactctgtatgtcgatcatccaattagtccaagccacgtgtaaacctcagctggctgcgcggtcaacgttgaaaaagaaaaaggttggtttttatcacacgtgtccgaaagaaaactacacacgtgtggttcatgaacctccccttcgtttataaaagctccatggactttgctctcttctcctcgatttcaatctttgagataaaccacaaagatcctccgattcgaaggtttataaaaactcaaaatcgaatcttatccacaagaaaacaacaaggtacttttccaaaaatg

SEQ ID NO: 662 - DNA, 3000 bp, Unknown
  misc_feature (1)..( 3000): cDNA_ID_2044819_gDNA_ID_1620304_Annot_ID_152769 3000 nt of
ttgagacaaattgtacattacattgaaagtagagctgaagaaactcactgtaccatgtaattgatgatgttctaagggttggtttgtgtatgcaggtgtttatgctaagaagagcatcggatgaaccacgagggcatgccgcagccataatgaatgaagtgttactcgatgcagaatgcaaaggagtcataaatgcatctcaaaagaaagtactactacagcaaatggctctccatctctcgtagtaaaaaaacaaaaacagatcatcctctcaccaaattttggtaacaagaagagttaacttacaatcttgtcttacccactagaaagccagtcccgggtacgagattttttgtctatttaaccttaatttttgtttcaattttgttttgttttggtgtttgtgaagagtgccatatgtatagatagtgtgcccatacgaaagccactgagattggcgtcaaaaagtgtcaagtagagaaagtttgattatatacatcatacagtgatcggttttagggtaatacaaaggctctattacccatgagttttctgatattcgttttttgttacttaacattatttacgcaattacgctccatgtgtcataagatccaactacgtgtattgccagacccaccgcctaaaaagcagacccttgacctctctctatatacagaagcttgacttgctgagaaacttcgatttctcattttacattgtttcctaaaaataccatgatgttatatttgtggaatcattttataccaaacacggaatattttgttcaagggaatcaatgatattttggctaataagtacttactaaagtttatctatcatttaattaccttactagttttgttatttccttaaatattgggcttatccagagcaattagtcttttgtatcattaacagaattgggtgcaacactctgattctttaggtagtgtcatcccttatctcactgctataagcctataaaacaaatacctttaatcgtaggatctcatgcattaatgctagtacaattgcattgcacttagtagtagtttatcatatacacaatacataatctttttttttggtaagtggataaataaaacagcttctttccatccatcatgcgacctccaaagaaaatatctacagaaagaaacagaataatttcaaaattcagagcaaaataatatcaagaaaaaattagaaccaaaaagagacatgtcatttgattttagggatattatattatccggatgggaatttcatttattatttgatttgctcaataaaaatgtatgatgcttggatctagtttaagaaaattaaatctaatttctaattctgctagattatattggactatttagtcaacaaatgataattatattatcaaaagatataattttgaatacgacaattaaattacttatttcaactatttgaaaaagaaaaaaaaaacggttatatcttctacatgaagtcaagatttttttcccccaaaatcaacaaaatcataaattcaaaaaataatatttcaatccaaaaatttatacatcatttattattacttatcattatctttttcctttggtttatatatattgtgaaatctgtacagtttttttttcatctttataaaaaaacgttatatatagtgaaaaagaagaagaaaataaaaagaatctaaaaccactcagctctccgcaccatgtgaaaggttggtgtagtggcaagaactctttcgaatctgaacgccttaagctctgagagacgagcattttccagaaaattcccattacctaatccccaggattcgatgaacccagaaatgatggttttcgaaaggctctagctttctcaaatccagattttgctgaggtttgtttactctaaaccctatagattcgttttccttttcttctacgtttatgaaaattcgtttgctttctttccaaaattcattgacgcataatgttctcagattcgcacatgcttgatctctcattttacagatcgtttaaatcttgatctcgtgatttttgtctctgtttttagtcggtgacccatgagttcatgagagaacgaaattgtttgattttgtcttttaatgagttcatgttttatcagaatctgtgtggtgggaatttggtggagtgcttaaaaataaattgaattaattagttgcttaattttgcttgtgttaaaaaaaattaagagtaatggctgctttaatctgcttctggttaaaaaatttggagtgatggctacttaatttgcttatggttaataaaatttggtgtaatggctgctttcatctgcttagatatgtatattttatacactttttagtggtttcttgtgtttggatttggtgaaaaatctttcctgctcagttacaacctgaagcatgatcttattgctttcagacatcattttgttcactttcttttgttttgatcgatctcagcatgtttttgactcttctgacatctgaaaggttgagtgggatctatgatctaattgtttataaatgatacattcttttcacattcatactactataagccttttttataactagatcacagaatccagatttagcttgcttcatcaccattagtttatgtatagtcccttttacatgtaagcttaggttccgtttatatatattgttttgttaaaagtggtatgttaccgtatgctttcatgttgagagtcttgtgtttatgatatctttattgttttcgctgcaggagctcgttgaaagaatgcaaaatagaccatctctctcttgtcctttgtctttcagatcgtttctctttcaacgtgatattagagtacaatactagataccgtgaggtcctttgtattattggaccttgagttgtcttgtctaagtgggataacctttctagtgaacattttcttggtcagttcatctagtgaactttttttggtctcgtgaagaaatagaagttttctttttcgggcttg

SEQ ID NO: 663 - DNA, 3000 bp, Unknown
  misc_feature (1)..( 3000): cDNA_ID_2044831_gDNA_ID_1620304_Annot_ID_152763 3000 nt of promoter + ATG
ttatttcgcttctacgtaagatatgtcaaaaccagcgtagattacaaaaaaaatattttactaaatatgtttggctagttgcatgatttcagttaactcagcgacatttagttatttagatgaaccttggcaaaattataaagcactaaaatgagtattttaaattttcatatttttgttttatcatacactaacatacacttttagtttcgcaaagacaaatcttaagaactagtttctcccgtgcatagctcagaacatcaactaatttatctttaagaaatcaaaagacgatcatatttcaagttaaaccaacaaaaagtcattacatgtaaatgttacatttttatatgagatctcgaagagggagtacatgtaaatgttacatatatattgatataatctccttacatcaaattgaaagtttttaaaaaacattattctactctttaactaatgctattttgaattaatctactaatctctctatttcgcgcgcacacatctcgggttatcatttaattacttttataagttattgatccaataccatcatattttgaatgattttagtataaaattcagtaagactagatttgagaagattattaaatcataagttccataataagggatttgacattaaaaaaaaaaactctttttgaaatcttagtgaaatatgtcctctatgttttcttgaagataaacaaaagatttaggaaacattaaaggttttagccttttaggctttgattacaattcttttgtcctcttattttctttacactcttttaagattagttttcttcatgttcttgaatttgttttggacaaatattgtcttttacctaacttaatttgtgccatctgttgggaaacataatggtgaattaaataaacttctatataggttgtcccccaaaagaaaagaaaaatcaacctagattggatattgtatagttaatacaaatcaccattttgtagcaagattaagatcaaatgggacaattttattaattagaaaactggattatcaaactataaatatagcacaaacagaacaagtttgtatctcgatatatcccaatagagaagggaaaatctcccttcaccttcgactcaattttgttgtttgaggcgtaagctactagtaaaagccttaactctattctttacaagtttatatttctctcttttggtagtttatcgattaatcaatctgatattttgttaatttgaagaaaacaatggagaacgatcaacaaggatcgtacttgagagatgaggataaggaagagatggagaaaaggatcagaaccgttgtcattgattcgaatctagttttatctaattcaacttgtggtatttgccgtacggctgaagatgaatatattaaggtttatgatgatcataacaatgatggtgagggtgatggtgatggtgatggtgatggtgatgaggatgaggatgaggatgcggatgcggatgaggacgaggacgaggacgaggacgaggatgatgatgatgatgatgatgatgatgatgatgatgatgctgatgatgctgatgatgatgaagatgatgatgacgaggatgacgatgaagatgaggatgatgatgatgatgatgatgatgaaaatgatgaagagtgcgatgatgaatatgatagtcatcgtttaatctccacaccctattgtactcacaagttctgcaaaacttgttggagggagtacctagagacaaatttctactctctggaggaaaacttaaccgtaatctcatgtcctgatcaagattgtggagcttcggttagactaaaaacgattgagaaactaggagtacatgatcaagacatgtacttgagttatgttatgagagtttacattgagaatgagagcaaacagctccctgcaccggatgacaactaggccattatatttgaccaaatttgaatttactcaaaaggaaaatttggttcttcttttatgaaatgcatttattccatttttttattttatttttaaattatcgaggatgtcgagctgatcagtgtaatagtctttcaaaacttatatatatgaaacatcatgttcttgccattaaaaacattatttacagtcaaatgattgaatctttttatgattaagactcgaaaatcttttctcttattaccatgataagtttttaaccatacattatagttttgtttttactttgtcatagatttaaattctatatataacaaaaacaaaattcgcgccacaaatctatttcgtcccatatatctatttcgtgccaaaaaatttcaaataaaaattgtgattcttttctactttgtataaatttaatgttactaaataatttttaaatatatataaaaatttcacattttgtgactatacctattttgcgccatttatatttatgccaattattgaatttagtccaaatagtagaaggaagactctagtctctagatatggtcttctaaaactatgataagttttcaaccacttaagtaccataattgattattgacatatcgtataaatttaattaatattactaaatagtaaataattaagtatataaaaatttaaattttgctccaatatatatttagtgatgaataacaatataataaatgattttggtcatattttatttaattatgtaacaacgtaaaatttcttaattaaaaagatatcattatcaaactttatgctgtcaaaaatcttttttatcaaacattatgtaatagcgaaaacataataattttgtagcttgacgatatccccaattcccccgttggagagtgaaaaatggcaaaccctagacgataattagctatctccaccttcgattcaatcttgttgtttctggcgcaagctactagtaagccttaaccctatttctttacaagtttatcttctctagctctttactaatttatcgatttgtctttctgatttttgttttgtcattttcaagaaaacaatg

SEQ ID NO: 664 - DNA, 3000 bp, Unknown
  misc_feature (1)..( 3000): cDNA_ID_3058252_gDNA_ID_1620304_Annot_ID_152756 3000 nt of promoter + ATG
ataaatgagcttctcttacgagaatatatatatgtaagaatatacatttttagttaattcaaaatttcattcgattatttgtttgaacccaaggtgcacatatgttcccgtaagccgatagtcataacatttgaagcattaacacatttctatgggggaaaaacgttcaatcaaccacataattgtaaacaactaacatttatacaaacgatcgtctgaaaaaaattgattcatataaaatctgataactttagtttatagtatacacactgttttgaaatttgcggatttagattgattcaagttcaaaaaatttgaaaatgtccaaagtcaacatttgaccaagaagtcgagtgttgtttttaatattgatggctaatatgattttaaagcccatacataaaagcccaaatacggcccaataaaggaaaagactcctctgggaagaagaactaaaaaagaaactgggattttggaagaagtggtcgagagaaaacaaacgataatgggaagcgcaccagctcagattccgactagcttcggccatgagcttagggcttgtcttcgttgccgactcgtcaagacctatgaccaggtttttctttactcttctttcactgtttcttccttcttttagggttttggtgtttgatttgcctttctataagctgggtttttttttttttttggttcaaacagtttagagacgctggttgcgagaattgtcctttcttcaagatggaagaggatcatgagcgtatcgtggaggtcactacccctaatttcaatgggtatgtatttcatcaattctaaacctttactttaggcttctttggtaggaaagtctttgcgttgatgggtactgtttcaaattacttcttttagggtttcataagatttacttagctgtatagtaatggaaagttctcaactttagagtgattttgcgtcaggatgcttcgtggtttctaagatctctttgaacttggattctttgttggattagtgatttagcttttaagagtaatttttagaaagttcagtgttagagcttattagtgggtttgtgttctttttgttagttgatatcttgatattcctagctactgatatcaagattgttttgcagtataatctctgtgatggatccaagtagaagctgggcggctaggtggttaagaatcggtatgttgatcgcttcccttaactatcgacttgcttattccatcaatgtgttcttattatcccatcattatactctatttactaaggagattactgttacatttattaacacatctctgtattaaagaacgaccatgagatctccaatgaaagattacattacaagatttgtgtgattctctgtttctagaggcctaaaatctgatataaattggaatgtggctttagatctgaagattttcaagatactttgcctccttgtttggtttattgattgcataatgttgctaaatttgtgcagggaagtttgctcctggttgctacacacttgctgtctcagagccactccctgaggaaatgcaggtaaacgattagcaggacaatattttatcttcgtggtttgaaattgtactcagtaacacattagccttcttcttcaaaattagatcatattttgttcacttgtctgattttgtgtgtttcattcggtggtgatttaatgtagcacttatgccaagaggagcgtgtacaatatgttctgccgaaacgcatgtgaagaaatctatcacgatgaaggctagtagggaagaccaagtattccactttttcattaaaagcttcttgaaacattattaggtgctttatttgaatcttcaatcttgtggaatggtcgatgttaatgaagtcagagactccttaacactcttctatgtaaggcgttagtccgaaaagaaaaaaaaaagaaaaaaaaaatctgtgtctgaacaaaaaagtcttctcttatctaaggtttagactttagttaaccaatcggaccctaactaaaaatattaatgagagtaggaagaataaatttgtgtggactctaaagatcaagacaagacaattataattcttcataaagtcatgcaattaataataataataaaaaaataataattttcttgattaattgctcaaagtgaaagtcaatctaaaatttgttcggtttttcaattctacaatttttatttgaaaatatataaaataaaaaaaaatggttaataaagaattgcttagagtttcctctttttctagaacaaacaaaaatgcttagaccttctcgaaagaatagcacatcacgttatatccaaaagcatattcttttgttagattaatcgtagtcatatggtcataagtcatacataacatgtaacatgttagttcgatcattattaactttcaattaagtattttcgtaagacgtaattttcaacaataaacaacaaatccgcgatatacggtttttgaaagggcaggcaattgtttttttaaattattaatactataaaacaattttcttattggctataaactaatatttaattccacgtggaagttactgttcgtcgatataaaactttcttcgttaccattttgagtctccggcggctttcacactccagaaaaaaaacacagaagctacgtttttcaggtaatatgaaattctctccgatcacctcttcttcgtctggcagtatctctgtctcaaattttgttagatccattcgaaaatccgtttatcgaatcactcttagtctcttaccattcgtcgaatctaaaaatcccgtctttttcgctagtttggtggactgataagctgtgatttgtatgaagaatcgatataaagtctctgcttttttgtgtgggttttgtcgcttctttggtaaaatggatctctctgtgagaaagtgacgatcatgatcttaggtttttgattcttatatcgattgttcatttgcaggactttgattaggtttttggagatttacaaaa

SEQ ID NO: 665 - DNA, 3000 bp, Unknown
  misc_feature (1)..( 3000): cDNA_ID_3058256_gDNA_ID_1620304_Annot_ID_152751 3000 nt of promoter + ATG
tttggccgggaagtataaacgattttttggataataactgactaaaagaaaatgtggactttgggttaaaatgataactaaaaatgtatattgttataaatattctcataattaagagaaacttctttatgatattgataatctttattggagtgctgattcaaaacatagatcaaatgacatttttattaaatcaaatttaactctagttaatcaataaacacacatgacacaacgttctagtacattgcttgtttcagaatcagcgtgagatttttattaatacatatatctcagttcgttcctctagaatcgagatttacccaacaatagatgtcaaacgagaaaaagaagaagatgaactttattagtattcaaaataaaaagaaagaaaaagtacatttaaatggattaatggaaaataaactagttagcaaaggcgggtgcagtagcaacggcgatggaagccatggcagcgaccaccggaaaatccctcgttacggcaaactatggcacagttgtggttggacgtacacatgtatttgaagtggtggctctttgattggcatgtccttccttcacccccaatgatctcctctatttaattacacaaataaaatgcaacacataagaatggagatagatcacgtaacactgacttcacatatatatcatatatatatatatttattgtcaatcaaatatggtcatggaccaatgcatatatatagaaggaaaagacttacgagatgagaagaggacaagaagcaagaagaatgcagcgaaaaacttgttctccatatataatcctaatgatattgattgcttgttaaatgctaaaaacgtaagtggagcaagagctacttctccatgactccatatatatagattcaagtgtaggtttcgttagggtttctttttggggccacatagtgtactcaactaaacatcgagttttaaacaatttattagtattaaaaaaaaaaagatgctatggtaagagctagtctccatcgtattttattagttagatgctatggtcaaggatgtgtggataaagtataaacgatgaattgcaccacacacaataaaacaaaaaaagtgcagtcgaatattaaattaacgagggacaatggtcggccaataataagttaataacataagctaaagcaagattttttttttttttttttgaaagttactaataggccatgaactagatccgaatcattctcaaaaagtaatttcttatgggggaatggttaaagtgagggctagtcatgtgcggactggtgctttctcactacgggacaatgggaactgaaacttcacagtttacccactcaccacactaattttggtagtcatgtgactacttaattattgtgccgttaattattgtactacatcaggccagacaaatatatgggccttaaaccaactatagatgaaacgttacaaaggcccattaaatgaggaatgtaaaaactaagaaactcaaatttggccctaaaattacaaacacaaaaatacaattgttgcaataactaatttctacttgatgcgttacaaaccattattgattacagtttgcaatatactctctttagataaatgatgagtgtaccaactacaaaaaatagatctgaccattttttaaatagacagttgaatttgtagttgtaataatcggatcaagacgacttaatctacaataattgtaagatattcaaaagaaatcatagaaaattgaatattctagcatctagttttcaaagtcttaagaaaaaaaaaatactcatgatatataatttaagaggaaagaaaacaatattatccacaagtaattattgaccattctcttgaacttatgtatgagaaagtatgtagcaaccccacgtggtttgacaatagatttggcccatagtaacggaaaacaagttcacatgagatgtatctttatgggtcattcatacataaaatcttcatcaaaaaccttaaatttatatgacacattattattatgatatacggtttgacaattgagccatgcatatttattgcaacatgaagaatggttatgatttgtgattcaagaagtattatcatgtgatggccggcttgacttgctccaaatgtaaaacttattgatataaaaatacaaacttagtgtaattagtaacgtacttagttcgttatggtcggttgatacacacatgcatattgcagtaatttattatactaatcgaaagtaatcaatgaagtttgtctcttttaaaccgacctccaccatgccacatcttgcggttacattagatggactcaaatttagtactgaacatactaaattcggatctactgatgtgcataagaatagaaatctatggtttacgtaacgtaatagttatacacatcaaaatgaaggaaaccttgaaaattagtcaaacctcttcatagtgtaattgtttctcagttataacacaatgaaggtataattaagtacaaatcattacattattacatgtcttaatcatttagactaatatgaatggtggcaaaaaaattaatcatattactaaccaacttatttattttgaaccttagtaaataattattggcataatctaacgagtgagaataattaattagtacttagtatccaattaaagagaataattaataaccgttggattgaagtgaaggtggtcatcggaactcgagcaacctcttcacgtgcttaacttccatacccatctcctccgtttactcctccatcatcgatatatacaccgatacatacaccgacacatacgcatgagtgtaagtatacgctcaagtgtgggagcaatctcagatccctccatgaaaacaacgctttataagatgactcattttctgaaacgaactcaactccaagtgtgacacattctcaacgagagatcgtgatcgtacttatatacacacacgcacacttgcaaagcttgggaggaagaagtgatg

SEQ ID NO: 666 - DNA, 3000 bp, Unknown
  misc_feature (1)..( 3000): cDNA_ID_3058261_gDNA_ID_1620304_Annot_ID_152748 3000 nt of promoter + ATG
gcttatgaatattctctccaatattattcatcaacatctctagcaactgcaagaacaagcaaaacaacagttttaagttaccaaaacgttcaaaagtatgacattctcataaagcatgattctactgtatacgatagatctggaccacaacctacctggacagcatataattgagtatttgggttcttgcttcccaagcgttttttgatagccttgataacatcttttgcttgcctgttcaccatagataaactcattatcagaaaaaaagtatgtccaagatgaagcaaaagtaaagtgtttatatatctcaatcattaaggatgataaaatttaaacatcatagcaacatctgcaagcttgaaattctctggctaaaaagaatttataagttggtaaaaaaatatcactttctacaaagaaaaaagcagtctggctctgcatacctttcatctcgagcagctaattcacagatctcaatgtttttggcccagtccacatctgcaagcttctcacttgttgcagaacttacaagctccgcagccattttttgttatctgtatgagccagagataattagcactaaagattccagcatgaccaaccacgacacatttttgctgatttcaaagtcagaaacttagttcatgctaatcacaagaacagcaaagaaaacagatatgttaagccagaacatcagaaacagccaaaataaagtgtatggtcgaccaatgagcatataaactttctacataattaatgggttattatcgcagcttctatgcattgattgggagctcaagaatcagtaagagaacttacatttgactcttctatgggcttttcttccgagtacagcttcaaatgcacaatagctgctaagctgcaatcaatgaaaggacaaaagaaactgaatgttactatcatgattatatcagctggatttcacagaggaaaatactagactcagcacacatatattccaaattaagcaagtctagacaatagcctaaagctctttttgtctctctctcttcttccctctacctcaatcaaatcccatgagaatcccaaaagataattaagaaagacaacagaaaaaacacttagcaattggagagctaagagaaaaaggtttcaacttaacacttcctaaagcatgaaatgttcagaaaacagtcaatcttaaaatatctaagaagaaaatgatagaagatggaacacgttagaacgtttcttccctcatccaataagaagttttgtcattttttcaccatttttagtgtctctctgtatcaaagagatcactaaacgataaaggtcccttctgatcacaacaacgcatacccaaatccccaaaacccaaatctaggagagagacagacacaaacacgatcacgaagaagacggaacaaatcaaataaaaacggatactttgatccaaatacatcaaagaatttagctgtcgacaacaatctgaacccaaaaatagatctcaaatcaaaaagcaaacaggaaacaaaacaatcaagtggataacgatagagtgagtgattagtcacctgagaagacagagaggataacgaaggagataacaagaaagttgagaaaaagttgataaaccctaatcagcttgagcatttcacagagacgtaaacgaagaagaagaagaagaagaagaagaagaagaagaagaagaagaagacagagccagatcggtaacacagaaacaagaagaagaaaaaagacggagcctttgcgcctcttctttggcaaatagagattaattccttaaaatcagattaggattaattccttaaattaatggtaaacaacagtgattttgtactgattattataattagagattaaaaaggtcaaaaaaggaaaaaatcaaaggctgaagcatcagagcaccgccatgagagatctgtcttggtaaagtgttgttggcgcgggtaaagagagattatattaaaatcacgcgcttgtctgctttcaccaacaactgacagcctggttgactgccacgtgttttacccctttcattacgacacatccgataaaatctcgggtttttttatatatatatcagaaacgtcccttcataatagttttggatttggacagaaaaacgccactgttttagaatttctttttctaatatcttcgtttacgtttggtatttgttgttttgcccatttttatttttatttttattttaaattttttaacaacatgttttctattctaattcagtatctgttatatttcatatagatattgtaatttggttataatccacaaattctccattttagttcaaattttcggtctcgtgaatcaactgaaaagctacggatcaaaactatttaggtggatatatcagttaggtcataataaatcatctagtaccctaattaaaacaatcactaaccatattaatacgtatgataaattcatgaactaaatatggtccaagaattctaagcttttatgaaacaaagacctgccgtttccacattccaggacatgacgatacgtcgtcgcttcgaaatttcttttctccaaacaattcgaagaaaaagaacgacctgccgttttcatatttaagcatacgagtatacgccgtcgtcaaaaaggttcttcactggaactcaaacatggttgtacgataattggcttgtgaagaaagcccgataatctaattttggtcctaaacactcataaaaaaaataaaataagacacctctctctctagtgatgttacaatgggcctcaagcccgcgagtctaaacgggctatttgttatgttttttttacccgaatccatttaaaaaataaataatttaatagggttcacccgtttaagcccgattaccaacgggtctaaacaaataataatcgagtggcccatttttttttctctttggcaaaatgacgacgttacagtttagtgtattgttctaaatgttcttcaacttccttccaaaaccgatg

SEQ ID NO: 667 - DNA, 3000 bp, Unknown
  misc_feature (1)..( 3000): cDNA_ID_2044887_gDNA_ID_1620304_Annot_ID_152741 3000 nt of promoter + ATG
gaaaagcaccaaatttaaacgtatcataaatcaatttaacccaatattttaaaataaattaaaatatttgacttgactttcgtattcgggtcggatccacccggatttgacaaataaaaacccggtggttggccatcgccttatcttgttgactcttcttcaatcataagcccacccacttcgattaccaactccgaccgccagagacagcgagtttcagatcaaagatgtcggcgacgcttacaggatcgggaactgctttggggttttcgtgttcctcgaagatctcgaaaagagtttcttcttcaccagcttctaaccgatgctgcatcaagatgtctgtttccgtcgacgagaagaagaaaagtttcagtcttcagaaatctgaggaagctttcaatgctgctaaggtaaattgatttcgtcccaccgatactttttgattctggttgaaaattttcggaaaagatcagattttgatggacttgactgaatcatgcctctgttttgcgcatagaaatgtgattctgaatgttgaacaaatggtgtctttttcatgatagaatctaatgcctggaggtgtgaattcccctgttcgagcattcaaatccgttggtggacaacctgttttgattgattctgttaaaggctcaaaaatgtgggacattgatggaaatgagtatattgactacgttggctcttggggacctgctattattggccatgctgatgacgaggttcttgcggctctagctgagacgatgaagaaaggaacaagctttggtgctccttgtctcttggagaatgttttagctgagatggttatatcagctgttcccagcattgaaatggttcggtttgttaattctggtactgaagcgtgtatgggtgtgcttcgtcttgccagagctttcactaacaaagagaagttcattaagtttgaagggtgttatcacggtcatgctaacgccttccttgttaaagctggtagtggtgttgccactttggggctaccggactctccaggtgtccctaaagcagctacttcagatactttaacagctccgtacaatgatcttgaagctgttgagaagctctttgctgcgcataaaggggagatttctgcggtaattctcgaacctgttgttggtaactccggattcatccctcctactccggaattcatcaacggtttacgccagcttactaaagacaatggtgttcttctcatcttcgatgaagtcatgactggatttcgtctagcctatggtggagcccaagaatactttggaatcacgcctgatctaactactcttggtaaaattattggtgggggtcttcccgtgggagcatacggtggtagacgtgatattatggagatggtaagatctggctctagacctttaacaagcttcaaaactaggggtggccatgtaccaatgttgctattctttttttttttttgtaggttgctcccgctggaccaatgtaccaagccgggactctaagtggtaatccgctggcaatgactgcagggattcacacgctgaagcggctaaagcaggcaggaacatatgagtatttagacaagatcacgaaggaactaaccaacggaatcttagaagccggaaagaaaaccgggcatccaatgtgcgggggttacataagcggtatgtttggattctttttcgcagaaggaccggtttacaactttgcagactcaaagaagagcgacacagagaagtttggtaggtttttcaggggaatgttggaagaaggtgtttactttgcaccgtctcagtttgaggccgggtttacgagcttggctcacactcccgaggatatacagttaacaattgctgcggctgagagggtactgagtaggatctagaatgttcccaaccctgagtctagtttcacaatcttcatgttttggggacgatgtgtatggtttgatgagcggatggaataattcttgtgtagtgagttgaattttgtttcatcagtagagcttgagattttttgtattttaagatcatctgttaatgtaatggttttatgttatctcctaaagaaatattgcttttaataccaaaccgatttgcctttccgattatttctgagtactatgaagaattcagaaatgcatatagatggatgaaaatcgcattgctactcaaatcgacatatcgcagcaatgttttggaatgagttttggatgtctttagcttgctgaaactaaatatatttgagagcgtcaaggtggtgtagctattgcaggatattgattggacctaaatctctctgttgaaaccaaacaatttccttagagaacaagaaagaagaagtggatgataaggattgggttttaagaattcaggagtaaaattgtaatctaatctctccatttttgttagttttgtacattttaagtagtcatgctatatgttggaaaaaaggagtagccatgctatatacctaatttatacaaacaattgtgctacaactattaagcacagtttttgtagaaatatgtgttattattaatgaatgattcaaacatgatttttcaacatgtgattgatgtaacctttttttgttggcagccttgtgattgaggtaaccgttgacaaaaaagctcaattacctaatcttatcaagaatagaatgataatttcaaaggagaaaaagggctattcgaaaatcaaaagcacaatgacacaaacgttttttttttttgtaatatttgataaagggatcggatctgaatacgggagtatgtgtttactttggtggtggtgatgttttgagtatactatttgttttttgtttttttttgataggaacagtttaccctattcagacaagacatgtgacaaatacacaatcaacaacaacgttgtaaaccgggactagccgtgtccactcattacaatctttatattcactactctagctcacaattaaaccttattgtcaccattatttccagcgaccatt

SEQ ID NO: 668 - DNA, 3000 bp, Unknown
  misc_feature (1)..( 3000): cDNA_ID_3058275_gDNA_ID_1620304_Annot_ID_152742 3000 nt of promoter + ATG
tgttatcattggcgatcaactcatggtatggttgacttttttgttgttgttttttttacttgagattcgttaatgtttttggggttgatttgtggattcaaattaattgcagaggatgaccaacgggaggttaaagaacgttcttcacagagcgaagtctgataaggacaaattgaggatttcttggcctgtttttgttgcacctagggctgatatgtccgtcggacctttgccggagtttaccggagacgagaatcctcccaaattcgagactttaatatataatgactatattgaccagaagataagaggctgggcgctcgaagatcttcctgtctactgaaaaccctcaatacctacaataaatgatgatgaattgttcaaggagacaattctttaatagcttccttttgagggtttctatatgtggtacaataaaactatttcaagaatttaaaataatatgtggaaaagctaagcggttagacaaaatattcatctgattgatgctatacattcaaatgtaatcgctcctatcctatgtacgtagtgattaacctcaaaaataatcagcttaagttgctgtattcgtttacgttatcatgtaaagcaacgccaaccttatgaagtcaaaaagagctcttcgtctgtgccaaagtatacgttgacgtgatttgggtcgtcaaaaatttatctacaaaattatcaagtgtttatttttatatgttaaactacaattttattcgagaatttctatttcggtttatctgaaatgttagatatttagattatttgaaatattgaaaagaaaaaacgctagtaattaaaggtgtgatattaatgttctattataattgaaatttgttctagaagaggaataattccactcttataacacctaataatctcaactactcccacatcacatgttcaaatagctcagaacatgtatattggttgaatgattgatcacaaaaaaattagaatcatggaggtcgagagagaccagcacaagcctccgttgtctctacaaaacaacaaaatcccatcatcacaaaacttcccagtcgtcgacctaagcaacaccaatggggagctcgtggcgcgtaaagtggcaaaggcgagcgaagagtggggaatttttcaggtagttaaccacgggatcccaaccgaactaatccggaggttgcacaaggtggatacacagttctttgagctcccagagtccaagaaagaagccgtggccaaaccagcgaactccaaagagatacaaggatatgagatggatgatgtacaaggtagaaggagtcatatcttccataatctatatccatcatcgtcagtcaattatgcattctggcctaagaatcctcctgaatacaggttatatatatatatatatatatatatatacagatggatcaaacattttttttttttttataatttaccgtttaatttgtgctatgatatatggaaatcatgtacgtatttcatttatgcatttacccaaattaaacaacgtgctaactaaaaacattaaccgctgcgattttgggtcagagaggtgactgaggagtttgcaaagcatgcaaagcagctagcggaagagatcctcggtttgctatccgaagggttagctaggtttacaacgtgagatgttgaagttagcattcggggacgatagtgctggttatcttatgaagatcaactattaccggccgtgtccagagccagattgggtcatgggaataaaagcccacactgatttcaatggactcacacttctcattcccaatgaaattttcggacttcaagtgttcaaggaagaccgctggctcgatgtagattatatatatcccgcggttattatcatcatcggagatcagatcatggtaagtcatatgagttattataggtttcatttttcttttctttttttccaaaaataatgtttatagtttgactaaaaattttagatgagatttgttttgggatttgtagaagatgagcaacggaaggtacaacaatgtgttgcatagagccttgatggataaaaagaaaacgaggatgtcgtcggtggttcatatcaagcctccttatgatatggttgtgagccatttcccgaactcaccagcggcgataatcctcccaagttcgagcctttaacttaccaggattacatagacattgaagtccccaagctttctcgactgatcaagaattgacttctttgtcgttgtatgtatgttgtttgttgttgctctgtttcatttggccgtttggcattgttgtaaccggtttctattaattgaagttcaaacaaaaaaaatttgacttctttgatgaaataattgatttttttttttattttttttttgaaattatgatcggtgtgtgtgtgtctttgtttatttttatttttttccctttgtgtgtctttgttcagtgttctgtttattaaatattactcaaaatttaatggtttttcaaaagtaaaacttattcagtaaccgacagtattgatatatataattcgagtattgtgataacctaaataattctttctttttgtctccaacctaaacaattcagttcaaataattcgacactattatataattttggtgtacccaatgcactattatagtgtttactataattttatgacagtaggaccaaaaatcatgctatttttattttctttctaccgtgccaacgagaaacacaacgttgtaataatcattcatattattggaaagttggttagaatttaatatcgagggaagtgccaagcttttagaaaaaataaaataagttgagaagaaacgtgattagagaaagtaggtcatctgactgtttaaattcaaatgtaacaacagacaacccctaacatcatcagttcatcaccttaccctatttaatattcatatcgcaacttctctcctccgatcaatagatccgtactcgaagcaggaacgagtgaaactgaaaaccatg

SEQ ID NO: 669 - DNA, 3000 bp, Unknown
  misc_feature (1)..( 3000): cDNA_ID_3082046_gDNA_ID_1620305_Annot_ID_152788 3000 nt of promoter + ATG
agttgcctttgtccgtgggtactcctgtcattatttattcttttcatttttggttagggtgttccatttcatctattgatcggtttaataaagaaaggaacataaaattgccgattcagaattattgtaaatgacgaaagcaagaaaagaatagtgacaaatgtgagtgaaataagcaaagtccaactgtaagaacccatgtggtatttggtccttatacattatgtttacttgcatggtactgcatgttactttgctggctgcatgcaacatatgtagtgctattttattttctccaattatttattatttattagtttattctctctttttttcattattatacctctgcacacattttttttattacggtttaagttaccatgataatatataggtacaaacgtaactcatgtgtcatcatacatacttgtttcacattcaaagaaatcaaagccaatgaaaaatataaaattttattttctgttaaagaatggtaatctgaaactgaaagtttgaaacaaacaatgatagtgaagagtggtaatttggtatcttttttaatatatgctatgagtttaatgaaatactcgtatatgtaatagttaactcacgtttgtctagaagatcaacaaattaaatcctgtctattatgttggataattgtctcggtatgtgttctcacatgacatgccaactaaatacagactttaatttgtcaatttactgacttaataactgattaaaacaggaaatatcctatcacaattaagtgcgaaaaaataatctaagtttcaaagattccaaactattttaaaattttggtactggaccgacagaaaatgaatcattcgtatgaagtttacaaactgaaatgtttgtttaaggtgttgtaatgtgagtgatggcttaagtatccgcaaaaatagttaattatttaactaactttcaatacataaaattaagttaaaattcaaattaattttataaatagttactttcaagtttgaatccaattagaccaaacgaatatgcatcaccaagagaagcaacgaaatgtttggatcacatggatccttttcctttaacccaaaactaatgaccgtataagagtcaacttcagccgttgagcagtccttattttccagctatgtgtttcattttatcatcgttttaaaaatgatcgagatccatttacttttttagtcaacattatttcctttaaattgcgatttgaatatattaacttaaaagattacgaagtaaaaatgattgatgaacgaagtcgaaacgtgcttcgaagtttatgaaataattgactttttgtatacttaaaaaaatttgactttaaacaaacagaaaactttttatttatggtacttaattagaatataacaaactggaccgtcggtgggatttgaagcatcatggcaaatgtgcgttgttttaaaatgtcttgaatattcattttctcctttggagagcttctgttcgattttgattggtcgaaatatatgacataacatatttccactgaattgtaaataatgtattaggtatagtggcatataactcaatgctaaaaacatatatcaatttactggatttcacaaaattgtaactcaatgttactctatatatggaccactgcatgatatccatgtcttgtactaaggattcgatcattcgattatcctcatcagagatgttcgctatcttgtcaatagatgaggacaaacaatatgagacgatatattttcctcgagaaatgaaccattagaatcactctacttttggaattaaccggttatgcaagtccatatgatttgtataaatactgatatacataatgctcatctataatgcatagttttttcattcagctctaaaatattataagtaatgttattgagcctcgattgattgattgacaaaaaaaaaaaatgttattgagccttcgattctttttttgagcctttaattggtagttctatattagattacatattatatcaactgattaatcttcgatttcttgagcttaaaaataaaataaaataataaacgctggctagcaaattgttttgactgagatggtcctatagttttggacgcctagacggctataaactatcgagttttaaccttatacataattcatagttgttacgaattataattaggcaattacacatttgtattatattatacatctatgtcacctcgagaagattgaagcattttttttaacaatgacatttttattttttaagaaaattattttatcagaaacttaaaataacaatttgttttgtatcttcgcctggacgtcattaatgtttgtgtcgttcaataatgtttggtagttatatatagaaagagcaaatttatggttgattgatggtgcaaaaaaattcatttctctatattctagagaaataaaataaaagaataatggaatattaaatagagtctaaaacaatatacacaaggacagagcctttatatataaagacattgatctctctctgatttctcacacacacacacacacacaacactgtgtcttctctccctctgtttctgtttttagatctctcttctctcttctttctttccaaaaatcatcttctccttctccacctttcattatctttcttctcttaccaaaaccctttaaatacaaaaaaaaactaaaacacataaaaaaaatattgaattctcctttttcccgacaatctgagtttctcaggcagagaagacagagattttcaccgtaagggcaaaaaacgaaaaactctgtctctctgtttctgtttcgtccttccttggctttgatttcttacaccaaaagagacatctttaaagaatctcacattgttccctattgcttgtctcacaagagaatccttgatctagggttcttgcttccctcccctgtttttttctttaaattcctcctctgttttctttttgttctcgtcggagtaagaagagatg

SEQ ID NO: 670 - DNA, 3000 bp, Unknown
  misc_feature (1)..( 3000): cDNA_ID_3058308_gDNA_ID_1620305_Annot_ID_152794 3000 nt of promoter + ATG
ccggatttttttcttaatccatcgtatcggttcggattgactgtaaacccgatctctgttctttccaaatcaaagcccactttacccaattggggcctgaaccggaaaaagtggtcatgcaacagtaacccaacagctaaggtttggtgttaatggctttgagaagtcagtgtgtgtattcaaagattactgtaataatattcacatggtcaaaaccagttttactgctcatattttgaataatgtagctctcatcaactcgtttaatatactatgacaaattaatttttaatacttttatcctatctatatgctgatgcttagagacgatcaatcttaattattggttgtcatattgatcaataatatataaagtgcactttactctgtttatataaattcatatttactttatagttgtgagttgtaaaaataacgaaaaaatggagcttagcaacttattatgtttataacgaaacaatagatctataaaccaaaaaacttgaaagcatattaatggataaccgaaaaaaaaggataaccgaattcagtctatatactcgacgtaagcaaattagaattttggtttcattaattaggtctagacaaaaaggagatgacgtaggacgagtctcaagaaagaaaacaataaaggtttgttgaatttaggaagtaaaagttaagtgaaacttagtttcattcacatgttttagcatgtgatctctttgtatatcgtttgactaaacccaacgaatgataaactgtttaacaaaaaaaaaaaaaaaaaaaacctatttaacaaatgagtcccgaaatagttataaaaccaaaaaaaaaaaaatcctttaatttgtttgttgtgattgcatgaaaaatgtgagaggtgtcgtatgtcctcttgtggatgaattgcgtgttaaggtctaccatctttaaattccaatacgacgttactaccgaagcatgcaagcttcaaacaaatgaatgtaatttccttaatctatcttcctttaaaaccctatctcttcactcactcctatctctatcttttactacattatttcaaacagaaaatgaagatgtttattataatgttgatgaccttttcggttatcgcctgtttctacgccggcgttgggaccggtgagccacttgtaccggctctaatcataatgggagattcagttgtcgatgccggcaacaacaaccgcctcaataccctcatcaaagccaattttcctccctatggacgtgacttcttagcccacaatgccactggccgtttctctaacggaaaacttgccacagactttaccggttcgaaccagcctaattcactatttacgttatagtacgtaccatctatatatatcatttcatttaatttccttaggcttttgtttgttgttgagcagctgagagtttagggttcacttcttacccggtgccgtatcttagccaagaagctaatgggacaaatctgttaaccggagccaatttcgcctctggtgcttccggttatgacgacggaactgccatattttacgtaactaattaactcctcctcaaccatgtttaatccggctattaagttagtcaaaccggaatacttaataacattttatggtttcatcatattattgtagaatgcaataacattgaaccaacagctgaaaaactacaaagagtaccaaaacaaggtgacaaacattgttggaagcgaaagagcaaataaaatattctcaggcgcgattcatcttctaagcacgggatcaagcgattttcttcaaagctattacatcaacccgatccttaaccggatattcacgcctgatcaatactcagatcgtctcatgaaaccctattccacctttgtccaagtaacttaaccaacaccacaccgtacctatctttaacttttccggtttactctaaaccgatggtccaatcctttttttgttttggcagaatttgtatgatttaggagctagaaagattggagtgacgacgttaccgccattgggttgtttaccggcggcgataaccttgtttggtgaaaccgggaacaataatacctgcgtggaaagactaaaccaggatgcggtttccttcaataccaaactcaacaacacgtctatgaacttaaccaacaatcttcccggtctgaaattggtcgtctttgacatctataatcctctcttaaacatggccatgaaccctgtcgagaatggtacgatttctatcaaaccgcaactttatttaacgactaacaccgacactttaatttctcgttttaaatatttcaattttttatatttttgaacgtagggttttttgaatcaagaagagcatgttgtggaaccggaacagtggaaacgtcgtttctatgtaatgcaagatcggtgggtacatgttcgaatgctacgaattacgtgttttgggatggttttcatccatccgaagcagccaatcgtgttatcgcaaataatcttcttgtccaaggaatacccctcatctcttaaacctaagtttattccaaaacattgattcagatagttaagatgttatatgatcaaacaaaacacagaaaaaagatataatgaaaactattcttgatataaacaaacaaagataagggaaagttagtttctttcacatgatttagcatgtgatctcttcgtgtcgcgtttgactaaacccaacgaattaatgataatctaattaacaaatgagtcccgaaatagtaaaaagaaaaatcttttgtttcttgttattgcatgaatagtgtgagaggtaacgtatgtcatctttaaattcgaatacgacgacgttactaccgaagcatggcttcaaacaaactaaaagtttatcttctttttcaagcaacttcctttaatctctcttcctataaaaccctaatcattcacgacttcttcgtactcagtcctctcaaaatcttttactgcattcaaacagaaaatgaagatgtttattacaatg

SEQ ID NO: 671 - DNA, 3000 bp, Unknown
  misc_feature (1)..( 3000): cDNA_ID_3058301_gDNA_ID_1620305_Annot_ID_152798 3000 nt of promoter + ATG
tcttgtcgattttggcctttacttcttccacaactacgccaaatttagacagactcaaggttccggtttcggtccattcttctatctccccaaaatggaacattctaggtaccttcctggttcggtcatcaaattgatgtttttcggtctagggttaattaggttacttggtttcttgtcagggaagcaaagatatggaacagtgtttttgagcgtgctgagaagatggctgggatagagagaggaagcattagagcaactgtgcttatcgagaccctcccggctgtcttccagatgaatgagatactctatgaactacgtgatcactcagtcggtttaaactgtggaagatgggattatatcttcagctatgtcaaaaccttccaagctcaccctgaccggctcttaccagaccgtgtcctagttggcatgggccagcatttcatgagaagttactctgatcttctcatccgtacttgtcataagcgcggtgtccacgccatgggtggcatggttagtcccctcttaacactagttcactatatgtctctttcaaactacatgaatgctctgtgaaaacattataaataaagttgaaaatgttttgatttgttcggtggtatgatgatcaggcggctcagattccgataagagatgacccaaaagcgaatgagatggcattggatctagtgaggaaagacaagctgagagaggtaagagcagggcatgatggaacatgggcggctcatccaggactcatcccaatctgcatggaagcattcactggtcacatgggaaaaagtccaaaccaaatcaaatcagtgaagcgcgaggacgcagccgcaataacagaggaagatctgcttcaaataccgcgaggagtgcgtacactcgagggtttaaggctgaacacacgtgtaggaattcaatacttagccgcatggttaacaggatcaggatctgtcccactctataacctaatggaagatgctgctacggctgagataagccgtgtccagaattggcaatggattaggtatggagtggaacttgatggagacgggcttggagttcgagtgagtaaagagttgtttgggagagttgtcgaagaagagatggaaagaattgagaaagaagttgggaaagacaagtttaagaatggaatgtataaggaagcttgcaagatgtttacaaagcagtgtactgcacctgagcttgatgattttcttacacttgctgtttataatcacattgtagctcactaccctatcaatgtctcaaggctctgaaagaaagaagatgaagaaggaaaggggagagaggggttgagatatgagtttgtgcttttgtttctttgtgtctgtttctcaaaatgttattgttctttctgtattttggtatattgtaataagcaaaacttgttcttttatttccagtaagaaataaatgttctatatcatccttaatgtgttgtttagacattgtagatacaccaaaagcagagcatttgattacatataacagtttggtaggagagaagaagtcctcatatgcttgtggagtcattgtacactaaagatatggggatgagaagctgtcggctggaacattggggtgatcaatccaagtctgcaaaatccataaactaatttctcattccaagtgaaatgcttgttcctacaaaagtgaagcttacaactttgtagagacaagactctccattttctttcctaaggagatttttcagccgtttggagcagagtctattagtggaggacgagagctggtttcaaagctccgatggtttgcagccttacatgagtgtgacagagtctgcaagggcaaaagatgagatcactgagcacaccaaggcaacgtgtagggctcatggattctttgtttgataactacaagaaggatgggctctggtcttcttttgtctgtgaaaatagtaagatcaacaacgctaaaaagtcgtccctgactacatattaacataatttgttaaatctcgtcactttctttctttggttttctcttttgttttgttttttgggacacatatctcatgttctttatagataatgtttatgaagactttttggtgtttgcttctgttcattctgttgttgaggtattgtggaagcatctttatcaatgtgattttatttgttcaaaccatgaaaaaatctttaagactgctatactttggttctgttcttcttagccctgttctgcaaaacaatagatcaacgtgatcaaaatgagaagcaatgcgttagtagtaatacaatcaaaatacaatttataggagcgtatcagctagtaaatggaaatttttaatccgtataacggctagattatatatcacggaaccaaaggttggtctggacttcctaagtgaaaggggaaaaaggaaacttgagtctagcggctagattatcaccaaacctctaaggtttaacccgaaccgtgtataacggctagattgattatcaccgaacctaaggttggtgtttgctctggagtctggacttaaacaaaccctaagtgaaaaggaaaaaaggaaactttgggaagaaaaaaagggaacttgagtctcaattcttaaacatataagttttataaatatacctcgtttcctgttatctcctcgagtctaaagacgcaatttctctgatttcaattctcttcttcgagatgatgatgccctggttctttcttctcccttcgtttaaaaagaatcattcgttggtctggcccaagaaaaactcatcatatatacaacggctctctgttctcttaaaaagctatgaataagacgagagagatcatacacacacaagcatcacgtcgtctcatataaacgtcagagagacattcttaatttgtttgcctgtgatgatctcaccgtagaaacagagagaaacggaggcgattcgaaggagttagcggcttcaggagtcatgatgttggaggttctctccggagacggagatg

SEQ ID NO: 672 - DNA, 3000 bp, Unknown
  misc_feature (1)..( 3000): cDNA_ID_3083344_gDNA_ID_1620305_Annot_ID_152801 3000 nt of promoter + ATG
gctgttgcctgcttctaccaagttttaaacgctcagataatcttgatttaagtttatatatatgtttcttgtcaaatatcagagggtatatatctacatgaaacaattttttttaatgtttcattaaataagtctatatgaaatgaaaatagcgttgataatttgaaagaaaaataaaggaaaagttagaattttttgcttaatattgattagttttaatgctaatcatgattatttattcccatctgacttgatccaaaaaaccagaaatagattaccaagttgatatgaatatattttcaaaccgaccaagtttttcttttgtgtggaaattttatttacgaaatttatatttttcatttatagtatatattcatgaattgctttttacgaatttagtgacaaccaattcgaaacctaaaagaaaataaaaaattaaacggttgtaatatttggagtcgatatgttttcatttggatttatattgtaatatctggagtatatgtttttcgtttggatttttgttgtatttactttcttactttttggcttattcaagacatgcgattgtgttagtctttactctttatatacttagtgatcgttccattttgacattcactttcttacaaattttttcaagtttcaggactactaataggaaaattctcttaatcatcttcaaaattggggattcgaccattttttacataattttgttatatattgccataatttgagattttgttattgaattttatttaattccaatatttatgaaatgtcttgaatcaagctttgtttttcgactaagttatttgcttcttttttggggggttttggtaaaaactttgtttacttttcgacttattttgcttcttttgtgctgtgttttaagttttatttagtgtttcgactaacattataatattttttagtgtggtttttatttagtgtttcgactggcattttaaggtgtttcgaatgacattttcgtgtttttgtcatttaatggtttattctccttctttttttggggctttgataaaaaatttatttactgtttttcgacttattttactgtttttcgatttatttagtgtttcgaaactaacatttttgtttctttccttttttgttactaaaaaatttgtttactgtttttcgacttattttgctgtttttgtgctgcgatttaagatttatttagtgtttcgtttgttttccttttttgttactaaaaaatttgtttactgtttttagacttattttgctgtttttgtgcttttaagatttatttaatgtttcgactaccatttttgttactaaaaaactttctttattcttttagttgtgtgtgtaagttttatttcgagtatttcggattcacgtttttcgtgtttagttatttaaaataaactaagatttcgggtcaggttcaaattcattaaataggggcttcgggtacctgtcatttgggcgactgtcattccaaggtttgtttgtttttgttattttagagtggttgttattttcttgtgtgtgtctagcgatttgttgtaggttgctgtaggaactacactagtcacgcattgggcgctatgctcactcacacgcccatctatacaacctatacatacaactatacaatctccccctatttatacatctatacaatcacaccctaataatacatctatactatcacaccctaacatacatctaaaccatcgcaccctaaacattcatctatttatacattcacaccctaaacatacatctatatactcacaccctatcatacatctacacattcacaccctaaacattatcattcacatctacatacatacatgtatctttatccggaaagaaagaggaaaatacaaaatattgcacagtcttgtcaacttcaaaggctggcacagcagaaaatggaaaatactggatatagtcccaaggcttcgttttcccttcttcaaccttctgcaaaattaattaatcaaaatcagtatttcgttttttccgttgcacatgcatttacatacaaatcaaacatttcagtcaaaaattaaaacccattcttcctatgttttacataaaaactaaaatcttcattctatgttttcctagacagaacataaatatatctagcttaatttcaacagcaacaaaaagaacatatatctagatataaaatttcagtttatttaagacacatatgtagctaaaaatcagtgtatgtcatagttcatagatgaagtcaagacagcaatgtatataaaacagaacattaatttaaattccaagttcaactccataaaagatgttaaaaagatgaagaacatatctataagctaacaagaaccgtttatatgattaaaaaaaaaactagaataactaagacaagagtatttttaccttgtaagagaggatgcttatgtttgtttctctcggctaatgagcaatgtagacaagtttgactacgagaactcctaaagtagaagaacggaattttttaaaaaaaaagactgtattcgacatttgtaagaaaataaccaagtaaagaggattcagatttctgattcaagaaaggagtatttatagagaggcattatctgaatctctttccaataaaatattataatttcaaacgggaagaaaaatgttaccgtttcacaacgttcatattttttccactgtcaacaagtcaaatcaaactatacgttagaacaatagtaaaaatcgtaaacgcacttaagactctttgatccgtttactgagtaaaaaatctctgaaagcttaaggcccaaaattaaggcccattatatgttaccgtttcacaacgctcatattttttcactccaacaagtcaagagcaaaatattggaaacctaaattatgactcttaaggcccaaaagtaaggcccattaagtgtgatataacgacgttaaaataaatgaattgccaaaaacaaattagaagaagaaaaatcgatg

SEQ ID NO: 673 - DNA, 3000 bp, Unknown
  misc_feature (1)..( 3000): cDNA_ID_3058295_gDNA_ID_1620305_Annot_ID_152805 3000 nt of promoter + ATG
gctcttaatcttttgttgttgtttctcctaattttcgtatgtcaatcttgttcttggatataaaaaattagtttcaattttaaagaataagaaaaactgttctcgctataacataacttcctaggttagacatactgatgacatgcatatgattttttttttctaccattaaatttggagtttgtcgaatatttttaattcgaaaattcctacaatattctcaattaagccagagtaatcaaccaatgtgcttagtttcatctgaactagtcaacctcttcggtttcatagaaacctaactcccctcgccaattcgatttgcagtcgatttgattgattttataaaatttggttattttaaaagtgtatccccacaaaatctagtggacctttggacatgggacaagcatggtgagttgccactagtaaggttttttatatataatatctcagtgtaaagaataaacatatatatctaaatgtacaatgaccacatacaaattatgtaaatgtaatttaactattgcaaaacgtctttagaaattagattaaagaagagtatgtgaataatctatctaaaaaccaattgtctgaatcattaacgaatacttaggacttggtcaaagttttccaaaacaaattccaccgattgagaaatgtaaacaatttttctgccaccaccactataagagagctaggaaacgcattcaatgccctacgttagtaaggaaaattcaatgtcatgcactgtatcacaaagtcataaacatttaattgaaaccctatacctagctagatagttcttatatacccacccattaccagtttttatttattaatttattatttaatagattgtgatgaccatacctatacctttcatcttttagttttaacttttacctctatgttcgttgtcacactcatcttttaaagtcacattcactttctcgtctcgagttattagtaaattaaatcgaattacgtttcttgagatcatggatattaataaaattgattttgtctcatacaaatttatttgtgaaatcatatgaaaatatagaacgaaaaaataatatagactgcattatacgttcgtctttaaaattaaaaattaagagggcataacgcgttacgcgtgcatacgtagtatttgtatatgtaagattttaatgtataataagctcatgttgcatcttagtatgggcatgcaattgcaagtgtatccataatgtttttaatttgtccgtggagtattgaacatgatctctaatttaaagggatacgttttttatttttgacgaatgaatatcaatttatatagtaaattacacatgacatgaatttttttggatttgatttcgaaccaaataatttcttcaagtatatgtatactaggaataataaatatcttgcatgggatcattatatcaaaggcgacacaacttggaatcgtgatgatactaagctcacacagtcgtaaatcgtaatattaaatacgatcatcatgtacacttgcaccgccaactcatgatcatgtaaaggatacattgagtaatgaacaaaatgcaccaccccgaccacaccaccccacccactataatatattgaaggaaaaggagagaaaaatcaaagcaggtcccacttgataaaatggcactaacgaaatcccaaaaaactcttataaatatacaatttgtataatacaaacacaaatctccaagcaaagaacaatagataaacgaaaaagaaaaaagtaagaaaagaagaggaagaagaggaagaagaggaagaagaggaagaggaacgaatatggggaactgtttagtaatggagaagaaagtgataaagatagtgagagatgatggtaaggtacttgaatatagagaaccaattagtgttcatcacatccttactcaattctctggtcactccatctctcacaacaacactcatctcctgcctgatgctaagcttctctctggccgtctctattatctcctgcctacaacaatgaccaagaagaaggtcaacaagaaagtgacctttgcgaatccggaggtggaaggcgacgaaagattacttagagaagaagaagattctagtgaaagcaacagcaatatcgatggtgatgacaccaagaacgtaactgttgtaagaatgaagatcgttgtgcataagcaagagttggagaagctacttcaaggagggtcggtccatgagatgatgtaccagactcttgagaaacaacttttacttacttcgtctgatgatgatgatcttgaatgtaatagcggctggagacctgcgttagatagcatacccgaatctgaaagtctcagaagaacataacagatagctcatatatactcaaaaaacagtttgagctttgttcaaggaaaaacttgtttttaggttttgtttgtaaataaagctttaagctgttataggaaaagactgtgtgatattgatgataacactaagactttttgagtcaagctttttgttttccaagtaaatttaaatgaaaatttcatccatgtttttccatggattgagaagaactcaataggaaaagtaacaaccatgtattagatttaatataacatgaacaaacatttatatgcacttattatttatcatatgtttcagaaccagccttagtttcttgctcatgtctcttcaaatctcttcatcagtataagattaagttaattttgttcatagtcaacaaagaaactaatgtgttttggtaaagtaacgaccactctatgttgaaccgtttccggtttaagatattctaaccggatgattgagagtcgtaccgattggtttgaatcggttttggattttgctgctctatcgtcgtgggagagagataatcatcaatttttccaggcaaaaagcttcgattttgaaccatataaatcatctcccatggcggaaatcgaagtctttaactaaagaagaagaagaagataaagctttgtaatttataga

SEQ ID NO: 674 - DNA, 3000 bp, Unknown
  misc_feature (1)..( 3000): cDNA_ID_2122823_gDNA_ID_1620305_Annot_ID_152799 3000 nt of promoter + ATG
gcttgcttccaacaattttatcaaaatatttcaacaaattttacgtataagtttatacaataaagaattaagaatggtcaacttttgtaattgaaatatataaattcataaggacaggtaaaattggaaagcgtttaacgttcgcttaacgtacaataatagaccgttgcagtctgcaattgaaagaatctaggacaaagaaataaaagagtcacagggtcaaaactaaacaaacaaatactttagggagaaaaatgaaataaatcaggagttttaagtactaccatcagaggtccaatcataacattttaaggatatattcgattaaaacgtaataaaacataaagatcagggacttccgacaaaaatctttcgatccacttacacttccacaacgtccgttcgaaaaatatgaccgttgaaagtaattaaattgttttaaaaacaaaaacaaaataactcctctcttcttcttcttcaatctctctgttcttcccaaaaataaaaactttcctcagtaaaaaaaaaacaagagacagagagagagagagagaaagatgggttgtgtttcttcgaaactaggcaagaagaaactcataagagagattagagtcaacaatggcggcgatcacattgtctctcttacttcaactacttatggtcatctcgatctcgatgaacgagcagagacctctcctaagtcactggaagttactaaaggcgaagtctttgaatctgaaatcataccgagaagatctattaagagagatgatccggagattatcaatacttgggagcttatggaagatcttgaagattcaatgcacgtttctaatccacagaagattagtcccaaatctcgtggtattttcggtaaatcatggaagactccggtgaaatcggttgttgaatctccgaagagaggaagtagtaagagatttggagggaaagagaataattcgagaggtgtgagtccgaatcagattctgaagccgaagaacattcttgaaacaccgaagagaggtgtaatgcgtttgagttttcctcttaaatctgaagaatcttcggtgacggttacgcagaggaggaagagttatagtccaatgtttgatccagatcttgtggcttcttacgaaagagagttgtctcaagagaaagaacagatcaagatggtgatttctccggtggtgcacgagagcagaaaaacagagaaaacagagagaattcttgagaagttcccagagaaatgtccaccgggaggagagcactctgtggtgatctacataacaactcttagagggatacggaagacgtttgaggattgtaatgtggtaagatcgatattagattcacacgaagttcgattctcagagcgagatgtgtcgatgcactcggtttttaaggaagagatcaggggcattatgggaacgaaacatgtgaagatacctgcggtattcgttaaagggaggatggtaggaagtgttgaggaagtgatgaggttagaagaggagggcaaattgggaatattacttgaaggtattccggcggcgaggcttggaggcagttgctgccgtggatgtggaggaatgagatttatgatgtgtgttgtttgcaacggaagctgcaaggttagggaggaagagaagaagagtatggttaagtgtttgaagtgtaatgagaatggtttggttctatgtccaatttgttcttaaaaaagagaatcagttttgccctaattctggaggctgacttttgaagggttgattttggtttgtaatgatttggtgagagagagtttctaaagccgtgtttagtgctcttggtgtgtactactactagtttaatggaatttgtttctaatgtttgtaaacctttttcatttttaagattcaattcaaatcaatgggtatcattcattaagaatttgtcaccagatttgtttaatttagattctcattaggtgtttagcttcgtgactgaataattaagataatatcaatgattttaaggactttgggctacgattattttgttagtgcacttgtctctcaagatatctaaaactgatggatgaaatagcttttgacttattaaaccggtatagtatataacttggcaaccttgttcagttgttcatgatagttttatacttttatatttagtcaaggatggagaaatattaggagagtcatacttggtttctttatctttgtgaagtttagttttccccttaataggttaatatgatcgttatcatgcagtcaaaaaataagaattaagaataatgaccgttgtctttacaagaattaattttatctgaatcaatcagttattaattttcctagatttggtgaacaccagtacaccaccaacccagtagaactaatttataaatgggctaatataaagttatagaggatgggtaattccaaggcccaagcacacctacaagtccgattgattccagatcttacagcatgttgataaaaattaaacttctcccattcatgtatctcaatatctcatattgggatattaagagtttaagaccactttaacaaaaaaaaaaaaaaaaaaagagtttaagaccaaatttcaaaacatttggattgaacccaaaacagtgcctcgattttatctgaatcaatccgttaacaaggatgttttggtctcatcatccaatagaagcaatcagtaaactaatttgcatgacaactaaaactgttttaggttttatgcagagccagaggtattggatgatgaaaacgatatggtgacgaaaaggatattattataaatagaaaatttgtgataatcctatcctaaccgatatagtgacgaaaatcatacagaacttggcacactttcccaaggaggcacacatgtcaatgcgtttcaccgattatacctatccatttccacctttataattcatattacacgatcacatttatatatcactatatcacgttacaaaatttagacaaaaaaataaatatg

SEQ ID NO: 675 - DNA, 3000 bp, Unknown
  misc_feature (1)..( 3000): cDNA_ID_3083360_gDNA_ID_1620305_Annot_ID_152795 3000 nt of promoter + ATG
agctgaatctttaagaagaagagatgttcattattgttcgtcaatgagagacttcaacttctttctgaattcaggaatcttttgtgtctccacgaccagcactgacaattcttcaactactagattcgccaatcgccattataaccaaagattacaaacctgaaacacttgaatcaaatttttgtgattccagggaaagtatgttggcattaaagagataacttacctcttgagatgtaacaagctgcgagtacataggtaatatgaatgaccaagagctaagctgcaatacattttgtaacacatgtttagggtataactttttttgctaacagacgggaagtcgagtaggtaatgtgagaataagtacctcgagaaaaatttcatcttcaggcttaagttatattgttcctcgttctcttcttcaccacgacattgttgaaacaagaaagagaattcgagaaccggaaaaaataaccttaccagaacacttaccttgtagatcttagcgattagaatatatgacttgaagcggaatgaccctcgaagctcttctgtaggctgtaaacagaaacttacaaattgataaatttcgaagatctttaatttgctcataagaaaagaatttgcctaaacttaactttgaaagatcaaacctcgtcttcagtggcccatgagacttcgtcgaacaatccatcatatagtggaggaaggagttgtagaggaagattcatcactctttgagagaccaataaaccaacatctttggcctttttctctaagagtagttctagatcactcgctacattcttctccgaacaaactttaagaagaaactcttttagctctctaaagcacttattctcctgaacacacaaaaaaagatcattcggttgttaatagattgctcaccataagcataatagcaaatacgaataaacacctttgaacatcatttaatacttcaacaagcttaacaagcaaatgaaatcatatacacagcacatgatcaagtcgatcattaagcatatataaatgtaaagttcacttaatagaggtgagtctacatgacttgccttgtatcttgccaagttaagagcagtgataagagcaaataatgcctcatcctcatcatctgctacttttaccacagttcctaacgctgtttgattcagtatcaaatccacaaaacctgcttggacatctcccttcaaagatcaaacaacgaattaaaacgtaacaaaaagataaaagaaatcaatagcagagtaacttcacgaaatcggttacctgagagtcttcttcatcagaggattccaacgatgatttctctttccctttcttagacaaattatggaacttttcatctacaaagttaagaatgagacatactcatcaagtcgctacgatgttctgtctagagaaagtctcaatctttgaggttactactaaccaaaagacatatccggaagaggcaatttacgtctagccgttgaagcaaaggcaagagaacgtataaacgatgaaaatgctaaaggtttatactttgacaatcttcttctccctgatggccttctaggcatctattcaattacttcaattcgaaaactaaacaacatttcaggctaattcaccaaaacctatgcaaagtgtgtccctaatctatgaattgaagatagtaatcttagttcataagagaacagagtatgaatagcaaaactgattcactggactagttctacgagaatcgaaattgatttggaattggattgagattggaaaccttatttggttctcgtggaacttaccgacggtggagcgagttgacaccggtaagagagaatcggcgacgactggggatagacgagagaagtgaactaaggaaacgggacgaaaccgaatggttcagttaaatcagtccataccggatttttttcttaatccatcgtatcggttcggattgactgtaaacccgatctctgttctttccaaatcaaagcccactttacccaattggggcctgaaccggaaaaagtggtcatgcaacagtaacccaacagctaaggtttggtgttaatggctttgagaagtcagtgtgtgtattcaaagattactgtaataatattcacatggtcaaaaccagttttactgctcatattttgaataatgtagctctcatcaactcgtttaatatactatgacaaattaatttttaatacttttatcctatctatatgctgatgcttagagacgatcaatcttaattattggttgtcatattgatcaataatatataaagtgcactttactctgtttatataaattcatatttactttatagttgtgagttgtaaaaataacgaaaaaatggagcttagcaacttattatgtttataacgaaacaatagatctataaaccaaaaaacttgaaagcatattaatggataaccgaaaaaaaaggataaccgaattcagtctatatactcgacgtaagcaaattagaattttggtttcattaattaggtctagacaaaaaggagatgacgtaggacgagtctcaagaaagaaaacaataaaggtttgttgaatttaggaagtaaaagttaagtgaaacttagtttcattcacatgttttagcatgtgatctctttgtatatcgtttgactaaacccaacgaatgataaactgtttaacaaaaaaaaaaaaaaaaaaaacctatttaacaaatgagtcccgaaatagttataaaaccaaaaaaaaaaaaatcctttaatttgtttgttgtgattgcatgaaaaatgtgagaggtgtcgtatgtcctcttgtggatgaattgcgtgttaaggtctaccatctttaaattccaatacgacgttactaccgaagcatgcaagcttcaaacaaatgaatgtaatttccttaatctatcttcctttaaaaccctatctcttcactcactcctatctctatcttttactacattatttcaaacagaaaatg

SEQ ID NO: 676 - DNA, 3000 bp, Unknown
  misc_feature (1)..( 3000): cDNA_ID_2122789_gDNA_ID_1620305_Annot_ID_152789 3000 nt of promoter + ATG
acaacaccttaaacaaacatttcagtttgtaaacttcatacgaatgattcattttctgtcggtccagtaccaaaattttaaaatagtttggaatctttgaaacttagattattttttcgcacttaattgtgataggatatttcctgttttaatcagttattaagtcagtaaattgacaaattaaagtctgtatttagttggcatgtcatgtgagaacacataccgagacaattatccaacataatagacaggatttaatttgttgatcttctagacaaacgtgagttaactattacatatacgagtatttcattaaactcatagcatatattaaaaaagataccaaattaccactcttcactatcattgtttgtttcaaactttcagtttcagattaccattctttaacagaaaataaaattttatatttttcattggctttgatttctttgaatgtgaaacaagtatgtatgatgacacatgagttacgtttgtacctatatattatcatggtaacttaaaccgtaataaaaaaaatgtgtgcagaggtataataatgaaaaaaagagagaataaactaataaataataaataattggagaaaataaaatagcactacatatgttgcatgcagccagcaaagtaacatgcagtaccatgcaagtaaacataatgtataaggaccaaataccacatgggttcttacagttggactttgcttatttcactcacatttgtcactattcttttcttgctttcgtcatttacaataattctgaatcggcaattttatgttcctttctttattaaaccgatcaatagatgaaatggaacaccctaaccaaaaatgaaaagaataaataatgacaggagtacccacggacaaaggcaactagtcgcaacatagactttttagttttaactctttatttactaatcggagcagtttagctttgaacgtacccaagtcataagtatgttataggcccctaccacaggaacaaagttttatttacaaatagaataattcattaccaaaaccaaaaagtttatgcaaatattagtctttcagaaaagagaaaaaatgggcatctttgttactttagctataaaaaatatgaaaacaaaattcaaagaatcaatcaagttttgtagaaaacataattcaggaactaactggtgggatccaatgtccatatacatatcatatataattgatatcctatctactttggcactgaaactcccctagacatttttttttaaggtgttatttcaatctttatttgtcggcatatatatacgcaaacacgtacatttgtgcgtatatattaaattacgtatctatcgaatttttaaaaatgcttttttagtctccctccccttttaaaagctgggaaggggttgttgaaacctctttaattaaatgtttaacaattatatactaagtatgatgttcgatcatctgatcatacaatattgtatatcttatagttctgaaacatttaggaaattttagtgtccatttttattcggcgtgatatacgtatatgttgtataaactataaattgaaattaacggttcattagaaccaaacttaataatttgtctaagcataattgttctacaaatgggtaaacattttataaagtcattaactcattatacagttagggatttaaaaataagaaatactcaacttcggatttggtaaaagtaatatatttaatcggctacgtagtgtgcaaagatacttgccgtccatattgaaatcatgaagaaaaaactattcaacatcaaaggatcaaatcaccataataacatgaaaaataagttcagttatatttttaatttgtgtaccaagttatactaagactacattatatatgagaatttcgagaagctatcattggatatggtctaccttctatgcgaaccaccgagttgatgtatacaatgtggctcgagtggcgaagtagacaccacaccttagtcttcaagaccaagtcttcatcactcttattctcacctacttcaatgtttcattactaattttgctttatatttatatatgtgtaatgggaaagttcctaggtcaagttttttttttttttttttctaattttaaaatatttcacttttagttggagtatcatatattaattacttttgccgcttttgacaaaactatagccatctttgacattatactataaattatttgttcttacgtcaattaatcaaatattttccaacaaacactggtcttcattatatttaaaaatatacataacctgaccagaattgcgttttaacaacggattttttttatggctctaagataaaataaaaagtcgttgcatagctagtcgttattatttcgtatttagaattgatatgtttagccacgtgaaggagaggaactaaaaacaaatataatattaacataaatatgttcattatattagagaatttctcttcaatatcaaaaatgtaactggactacaatttggaacttacaagttagtcgacgagataaatctgaaacgatagataaagctcaccggcaagcaaacatggcacgtgggaagctaaacttgttatcaaagttattcttcaacattttgcactgaagaattttcttaataaaatcagtgaaaaaaaggcaaaagggtaattctcatttcacatttgtttccacaaactacttttgaattattatagagttgtctcttttttcttaaaatagaaattaacagttcataatgtaacaaaatcctgcatttttaagaatcttaagatcattcccacacgtaatgaataataaatagtagttactttaatcgtcgttctactagttgggccatactttggtattattgggctcaaaaataattaatgggcttaaggcctcattagaaaacggcaacgccattgaaggagtctacggtgaaggaaagaagctaacgtcggcgccgtcgttagttgccggagacgcg

SEQ ID NO: 677 - DNA, 3000 bp, Unknown
  misc_feature (1)..( 3000): cDNA_ID_3083365_gDNA_ID_1620305_Annot_ID_152793 3000 nt of promoter + ATG
catgttcgaatgctacgaattacgtgttttgggatggttttcatccatccgaagcagccaatcgtgttatcgcaaataatcttcttgtccaaggaatacccctcatctcttaaacctaagtttattccaaaacattgattcagatagttaagatgttatatgatcaaacaaaacacagaaaaaagatataatgaaaactattcttgatataaacaaacaaagataagggaaagttagtttctttcacatgatttagcatgtgatctcttcgtgtcgcgtttgactaaacccaacgaattaatgataatctaattaacaaatgagtcccgaaatagtaaaaagaaaaatcttttgtttcttgttattgcatgaatagtgtgagaggtaacgtatgtcatctttaaattcgaatacgacgacgttactaccgaagcatggcttcaaacaaactaaaagtttatcttctttttcaagcaacttcctttaatctctcttcctataaaaccctaatcattcacgacttcttcgtactcagtcctctcaaaatcttttactgcattcaaacagaaaatgaagatgtttattacaatgtcgatgtgcttatcggttatcgcctgtttctacgccggcgttgggaccggtgagacacttgtaccggctctaatcataatgggagattcagttgttgatgccggtaacaacaaccaccgtattaccctcgtcaaagccaattttcctccctacggacgtgacttcgtcgcccacagtgcaactggccgtttctctaacggaaaacttgccacagactttaccggttcgaaccagcctagctaattcacattatagtacaatctatcatgcatttcctttttccttaaaatttgtttgttgttgagcagctgagaatttagggtttacatcttacccggtggcttaccttagccaagaagcaaatgagacaaatttgttaaccggagccaatttcgcatctggagcttccggttttgacgacgcaactgccatattttacgtaactaattaatctcctcaagcctgtttaatgtagctatatattaagttagtaataaataacattgatatggtcttatcgatcattattgtagaatgcaataacattgagccagcagctgaaaaactacaaagagtaccaaaacaaggtgacgaacattgtgggaaaagaaagagcaaatgagatattctcaggtgcaattcatcttctaagcacaggatcaagcgattttcttcaaagttattacatcaatccgatccttaaccggattttcacgcctgatcaatactcagatcatctcttgagatcctattccacctttgtccaagtaacttaaccaacactacaacgcaccaagttttaattttaccggtttactctctaaaccggttttcttttttggcagaatttgtatggtttaggggctaggaggattggagtgacgacgttaccgccattaggttgtttaccagcagcgataaccctgtttggtggggtcgggaacaatatgtgcgtggaaagactaaaccaggatgcagtttccttcaatacgaaactcaacaacacgtctattaacttaaccaacaatcttcccggtctgaagttggtcgtctttgacatctataatcctctattgaacatggtcataaaccctgtcgagtatggtacggtattttgacatttcgactaacacctacattctttttttttgttcccattaatatcttttgttaatggttttttaaactgtagggtttttcgaatcaagaagggcttgttgtggaacgggtacaatggaaacttcgttcctatgtaatgcattgtcggtgggtacatgctcgaatgctacgaattacgtgttttgggatggttttcatccatccgaggcagccaatcgtgttatcgcaaataatcttcttgtccaaggaatacccctcatctcttaaacctaactttattccaaaacattgactcaaacagtcaaaaatatgaatatatgatgaaaatatatcctagatcgttatatagttcaatgaatggttggagattattaactaaaggtttggtttggaaattattgctttctttaataaataaatttgtaaataaataatttcagttacggggatatttgatcatatcaatagtaaagagcgaaatgtatatatttcccactaatatagggaccttaaataaattgcttgattacaaaaatggtccttctcttctgaagtaaatagaacaagtgagaaaggtttatccatggcgatttaggcgcccaaaagctcaaaaattcattcatgtccaccgttaatcatcactgcctcctcaattttcctcatatcccaccttcaattcctccgaatcatcgtcccaaacttctttcttctctctccctctatcgaaaaccagaacgcctctttgctctctctgcgtctctgtctctttcaccagcaacaatccatgaatgttcttcttcctcatcttcttcttcttcatcgttcgataaagaagaaacggaagacattgaatctgttattgatgggtttttctatctgcttcgattgtctgctcaataccacgacgtcgaggtaacaaaagctgtgcacgcttcgtttcttaagctcagagaagaaaaaacccgtcttggaaatgcccttatctctacttatctcaaacttggtttccctcgtgaagctattctcgtcttcgtgtctctgtcttcgccaacggtggtttcttacacagctcttatctcgggtttctcaaggttaaaccttgaaattgaggctcttaaggttttcttcaggatgagaaaagcaggtcttgttcagccgaatgagtatacttttgtagcgattttgactgcttgcgtgagagtttcccgattctcgcttgggattcagattcatggattgatagttaaatcagggtttttgaattctgtgtttgttagtaattcgctgatg

SEQ ID NO: 678 - DNA, 3000 bp, Unknown
  misc_feature (1)..( 3000): cDNA_ID_2122922_gDNA_ID_1620306_Annot_ID_152827 3000 nt of promoter + ATG
ggtatactatggatgaaatcctagaattaacaatcaaaatacaattatataatttgaaaaactaaacaaaaatattattattaacataacaaatataattttaaatttcaaaaaaacaaaatttataaattcattacaaggtgtatcatagtatcatacaaaaaaaataatagcatctatctatagatcatcttaaaaataaaaatttaattttttatttaataaaaatatagacttatgatcattgtatttcttgaagatgttatttctatataaataatattaattaaaagaaaaatctctaattttttaaccaaaatattaacccacgggtcaatatctacgtaatacaagttttaaatttttattccctctaaaacaaaactcaaactacaaacaaacaaatactgcattttaataataaattaatatacaataaatatccaaaaataaaacatgaattacccaacctttaaatgtgtcaaaaatatattatcatatacaaataataattcttataacaaaatatctataacttttcaataaatatattttcggtatactacggatcaaaatttgattttttactattagaggtatgttttagcataataatataatttaacataatacattggtgggagtatgaaaaagaaaaccattttcgagcacaagcaaactatatgacgccagcgatttatggcttcactgtgaccctttcaaatgatttctagagaggttaggattttcaattgattgttggttgctgattaagacactttgattgatgaaaatgacgtttatacttcgatcgattgtttaattgtagtggattgggccaaaaaaccataaatatatgttgaccatcgtatgaagaagctattttagatattattttaaagaaggaagaataataaaatatagtaaaaaattgaattcaagggacaaattaaaatatatttatcatggaaaatcagcagacaagaaaaagtcaaattgtagtagagtttataaagtgagaatattatttatttacaagtaatttgcaaacgcttaacgtaaaatttgccatcagaatccatagtcttattctgaggaaacatatcaaacatataccttatatatgacaaaaaaaactttccaagtcacaagtttttacaatttaccttatatttctagaaaatacaaattaattttataaaataaaaaattattatacaatataagcttcatatatattacaaatttgtcggtagcgaaaaatgtttaaattacgcattatctttaacttgataaaattaattataatatatattttttgaggtagagagtataattgcaaagatctgcgatttggaagttctttttacacaaaccccttgttatcacatccaagttggatggagtttgaattttttgaaaatgacaagaaaattttgttcacgaatttaatcttaaaataaaagcgctcaaattgaacattacttggaatggaaaacacaagatacaaacttttagtaaacaatacaaattaaagctttgaggactctataactttagtctttagaggtagaggccacttttacgtccatgaaagaggaacttagacagataggctgagcgaagtgtgtcaaaccaaagctgaaaatgcaacaccacaaatgagagagccgtggcagaagccacgtaaactaagaggattaagctccatttaggttcttgatcacggatcaagatcaatgtcgctgtgaaggcaagaaccattgaaataattgaaacaaacaatgctaaaagtcccaacattagcttcgttggtaaagtcgtctggaaactagcttctgcataacgagatgtcaggattgacaaaaatatcataatagatgtcacagatgataggagggcaaccgaatctgatatgataaacacttcaaaccagaactcctttctaaaagtagggaagcctagtgtttttatgtcgccactcgtatcgtttccaccaggtagagtaaaggcagctgcaaagaccacagttgctatcagtgttgatacaagaatgcatgcagtcgcagtttctttcatccatttctctccttctttgcgtaagttgtcatgctctttcgtaaatagatcatgcgccacctcctcttttttgttctttgttttgatgtatacacgaggaactatctctttaacagcctggaaagtcattagaagttttgtaaagatatatacaagatgttaaattatacccattgtggaatgtgtttagcataccttgtaccaaagaatctctctttgcatctgaagtgctgctcctgatacaacttgtaacctatttggaggtggtaaacgtgccacaagatgcaacaagttgtcgttggattctttctctttatacatagctatcaaatctttgatggccccgagttcatagattctattaaagattttttcatgacgatttatagcagcaatgtggaacaagctttggttcttatgatccaccgtccatatcagatctggataagaacgaatgagaataagtaaaagctcaagatttccagattgtgcagcatcaaagagtagcattggagatgatcccacaaattgcgaaatttcctccactggcaattttataacaaaactccatagctcctctaccaccatatgagctaaagtccgcattttggcttcacgaaatacccctttaaaaactaaatggaaagagttcttgtcaggtgtgatgttcaaacaaaggtttagactataggttatataattctcaaactttggtcacttctgagcacttgttcctactacttatatatatatattttgatatgaaaagaatgagttaactaagaggtgtacttgtgagaaactcgttaccaaacgacctgttcaccccaaggttaatttgatattatacctgtgagtttttggtctaaattcaccaagtatgagaaagactctattcggtatagagggttcgaagttcaa

SEQ ID NO: 679 - DNA, 3000 bp, Unknown
  misc_feature (1)..( 3000): cDNA_ID_2122929_gDNA_ID_1620306_Annot_ID_152830 3000 nt of promoter + ATG
ccaaaaaaatcagataaaagtcttacaacatctgcattaactatttttggtgggtgtctaaataaattaattataataaactttttaacgttatttaattatgaatatctttaaaatgtgcaaaagtgtctaaagacacttataaataaatttgtttatatcgacaaaaaaaaaaaaaaaatttgtttataaaaattctgaagacactcacctaacatattagtctaccaaaaagccgttttttttctttactaaatataaaatttattgatcaacaaaaataactatttacaaaagaaacaaaaagtggagaaagaagaatagaagtagatgctcatgggcaggttccaatttgtgtgaacgatgtgtatcagtcacagcgaggagatatggtttcttattgctttctcaataatgtgcgtaaggtgaagaagccaactatgttgatggtgtcgtgtgtcgcctaaaagcccaaccttataaggaaaagtagcggacaaaatctcttgaatgcatgcttttcagtatttcgctattataggctaattaatgaccgaaactttggtctttcatatgtgtcttattattattgaaaaataataaaatatgcattgaagagattttggatacaaaggagagatacttagaaattggattattattattattacttttagattaatatgtgaattcttattaaataaaaagggttgtagaagctacaatattcttaacacaaaagattgttcatttccaaaaaggataaaaacaagaaaaaaatctactaaaaggaaatatgagcatagatgaatatagtcatactttagccaaactcacataaggttttgaatcctgtgtgttttctctttgcaggaattgcatcatgaattttctgtctagaaccttgaataaggcatgagtatgtggaatgttgttgtggtaccgattgttctctccacccaaatcgcataaatgcatgggtgaggtagagtcttagatggctagccaaactgagaatgcgttagtgtggaaagtaaaaaatgattacagcccagtcttcttgttgttttagaccaaataccttcactaacttaatattgaagaacaatatgatctctagttacaaggagcaagccaattatgatctagtttcaaggaattggctaattatacttaaaacccctaaagtctaataggaaaatattagatcatgagggaagctaaacccttaaaactgtgagcgttagtccaaccaccatggccagtcttgagggaagctacttgaaatatttgtttgtggctcccattttgtttaacttttttattactacgaaactaaacttgaattaatattgccataactttttcataagaggataggaaaatctaatatgaactctatcaaattatatgtttcaagtaagaatacttaaaatgtttagctgagctccattatttttgaaaacagctaaaatattttttagattctattaattaaaattaatacataaatgatatgatacaattgagaaaatgaaaaacgcccccgaatataatacgtatgtggcttcataatcgtatagttgtaggatcgacccagcacaccacagccgtcactagtatttaatagattacaagcagaaaaagaaatttaggtctatttaattagtgaaaataaaaaaataaaaattaaataaggcaaataaagtttagatgtacaacttgaatctttaaacctttgacgtatctaagatgcaaacaaccaacttttctaccgaaagttataagataatgaggccaacattttatttatagtaattgaggtcgcaagcatgggattggcccgcttgtgctcatgaacggctatgcacctaatcacctacaaaatatcaaaacaggaaaatctatgtaaagtgatcatggagatcataaacttcctagatgcttactatgacattcagaaacccacttgaaatgctaggaaatgtattagtagacatcaagaaaatcagaattctatatttaatagtcatgtatggacacatactctattgtgaaaaccaaagatttattagtgaaagttagcatccaaataatcctgatttgcttaactttcttaaaaatccttaacagtcttcaaaatctactttacccaataggcatccaactaatctgaattatagtagatttatcttatagtcagtgtcgtgagtcgtgaccagagttatagaagcttaatgcagtcttaaaaattgtactcttttcaaaaaactattttcgtatttataaagttatcatcttggctatttgtgatggaccgaagggatacgattattgggttttcatattttggtgtttcggtcttttcctttttagtattggttttgagagttttctttttaattatgtttaagtcggtttgtatgaggatctatataagatcctcttataatcaataagaaatcaaacctccaacaattaacctaattctctaagagagacttggattaaaaggaaggttttgcttcaatatctatcttgttctacttcaaatcacggctccaattactagatctaagtcaaaggctttagctcataacacaatgctatttgatctcagcattcttatttctctaatttctaaaagaccaaaataacgcaaacggcacgcagtttagctctcaatacccgagacaacacttctcgtagtccgtacttaaacccgccacgtagttcactttattcaacttaaaaaagcatgacgttttggtacatctatcttcttcttcccccttcctctctcagcttctctcccaccactaaggaggaacgttccaaagatccctttctcagagaattcccagaaaaatcttcaacaattgaaaccctaatggagaatcattcggatccttgaatcctttggtttgtctctcacctccatttctgaaatttcattgctttgtgattcttctgcagattcgttttgaagagaagaaagaa

SEQ ID NO: 680 - DNA, 65 bp, Unknown
  misc_feature (1)..( 65): cDNA_ID_2121696_gDNA_ID_1620307_Annot_ID_152840 3000 nt of promoter + ATG
gatcatcctcttcaggcgtagtagtctcgaaacacttaggtagggttttacagaggaagaagatg

SEQ ID NO: 681 - DNA, 3000 bp, Unknown
  misc_feature (1)..( 3000): cDNA_ID_3058377_gDNA_ID_1620307_Annot_ID_152852 3000 nt of promoter + ATG
tgagacagtgagaaactcatcagtcttttttcctaacgttattaccaactttgcttttaatgaaacataaatacgaggttctgaaattctcttattgttggatctcctgacgtttttatccaatgttggtagggtggggtattgttcaaaggaaatctaagaggcaagcctgctacaagttacgagaagataaagacgaggatggaggtaacaattctgctttttgggtttcctttcttaactatgatcgttgacaagcacatgttgtgacaaagagtaatagtgtattgctcatcaatctgcagaataattttggtgaccagtacaagcttttccttctcacgaatcctgaggatgataaacctgtggccgttgttgttccaagaaggtccttagaacccgagacaacaggtatattgctatacacttccatgttaataaggatatctctctcagattattaagttttagctggatactacatataatttgcagctgttcctgaatggtttgctgctggttcttttggattggtggcattgtttacattgtttctccgtaatgtgcctgccttgcaatccgacttactgtaagaacatcttgaacatgttttctctagaatatgttatgcttccaaaacatctaactgaataaaaaatttccctcccatatatgaatttaattgcagatcggcctttgacaaccttgaactgttaaaagatggcttaccaggagctcttgtcaccgctcttgtccttggagtacatgaactgggacacattttagttgcaaatagcttaggaataaagcttggtgttccattctttgttccaagttggcaggtgaagatgcgatgttctatttgaaagaaaaggaaaaactttcagctgaaatttggtttttttagacatttaatgaacatgttttagatggcagataggctctttcggtgctataacgagaatcaaaaatatcgtagccaagcgagaagatcttttgaaggttgcagctgcaggacctttggctggcttttctctaggcttgattctgtttcttatagggttattcgtgcctcccagtgacggcattggcgttgtagttgatgcatcagtgtttcacgagtccttccttgctggtggtattggtaagctttagctctcaatcaaatatgataaagtgttgcaggctgaagctggagagttgatcaatgtttaaattttgtttctttttctcttatagcaaagctcctactaggtgatgcactcaaagaaggaacttcaatatctcttaacccacttgtgatctgggcatgggctggacttctcatcaatggcattaacagtatccctgcgggggagctcgatgggggcaaaatagctttctccatttggggaagaaaggtaacactaattagaatgacttaaaaagcttaacaatgtcttatactattcgtctttgtgttcgagtccattccccatagtagattgattaggtagtaatcagaattatatatgtctcctaatgatttcagaccgcaacacggctcacgggtgcatccatagcgcttttgggcttatcggcgttgttcagcgacgtggcattctactgggtggttctgatattcttcctgcagcgtggaccgattgcgccgctggctgaagaaatcacggtgcctgatgataagtatgtgtctcttggaatcctggttttgtttctctccttgcttgtgtgtttgccttacccatttgctttcacgggcaatgaagccatgatgattggcttgtgaagtgactcatatcattacaccgcacaataagaaatcagagatatagttgtaactttttgttttggtctctatgctctactttgacatctaaagttatgtttttgttcttgctctatatttttactctcatggagcagtttaggaaacaaaccaaatttctcacagaaatgtgaactaatattttgctaatcagttattaattacgtgtgggattgtcaatctaggttttgaaaaagagactttcactggttggaaaaacagaaaagaccaactttgtttatggggtagtgataatcatattgttaacaactttgtatatatatatatatatatcagacgaattaatagaaatttaaactacattatagacatgcgagagtatgtgacaaatttgatgctataacgacgttaaattctctattcaagaaaaacaattcaaaactttaataacataaagaaatgactaggaaggattaatattagtataatagaaggaaagaataatattatgaaattggaaggtaaaagataagaagaaaagcacatgcttttaatgtggatggatttgattttggttggtagcaactaaaggctaaagcaaccttccaatttacatagtcctactatgatcgttgtttattcaagaaaatgtcaaagtttctacattcgtactattatataattgactgaagaaattaaatactaatctggtaaaagaagtagtattgttaacattccgctatcaggcatgttaccaacttttctatgtttttatttttgttggaaaaaaatgaaaaacgcatacttgaggattgtcttgtaatggcattaataaagaaagacttttcgaacactaaagtaagaagataagggtttttgacttttgagaaagacgaccgttcgtatcgtttgcttatgaaactgatgcaatatctttgtgaatgacaagtttgcttagtttttccgaaaagggttcgctgccttcatggttcatgcacatgacttatagtgaaaaaatgagggaaattggaaaatacaggtaaggggtattaaagtaaattgctaaataagtcacatggtcatcttctttataaatatgccacatctcgtagaataatcactaatcaaatttactcatttagccgtcacctctgaatcttcttctccgatcttcaaacattccggccgccaccgagttcttagccgttacaatg

SEQ ID NO: 682 - DNA, 3000 bp, Unknown
  misc_feature (1)..( 3000): cDNA_ID_2121746_gDNA_ID_1620307_Annot_ID_152856 3000 nt of promoter + ATG
gtttaggcattaattaatctaactttgggcccaaaacccaatattatttccgtcttttttagtttagaaaagtctttgttttttttgttgctgatttcctaatatcaaatttgtttcgtatataagataaatggaatgagaccgaagttttggaatgagtcacatgatccgagccagaccaacaaaggaagcatatgagaagcatgagaaaaaaatcacttaagtatcttaattttgttcatgtttgttgtgaagggcttactaagatattaataaagagaaaagataaagtgtgagattagaaagttgtatataagaagtgaatggaaattaaaggtttggggtaatgttggatggatcagcgacaaacgtggaagcgaggagatccaaaaaggaagcttcccaagcttcgcgaggcgtaggagtctacattttaagcatgccacaatttcatgcccttgtttcccaattttgcgattttttcatgttttttttcttttacgtacaaataacatttattcaaagttcagatgttatgatttatgctttatgcttccatacttaaagatttttagttatgatttatgcttccatgcttttactttttttgccatggaaccatttctgtaagtatataatcatcgattataaacctaaattgttttcatttttatgaaatatttacattcttagcaaaaaaaaatagttcagatgttattaagtgagtgtttactgtttatcaacgaattaattagtgtgataaaaatttgcaatataaatgtattgattctctcaatttaccaatcgttttatcttgaatgcatttagagatgggagttcctgtttttttttttgcaattggaatcataaaacgagaacttacgcaatctgaacaaggtcatttaggatagacattttaaattatacaaaatgacagtaatttgatttttgacaacgcatgatgttaacttaattttcttataagatttttttttttttttttttttaaaaacttttgatgatcacatacacgacattgacctaggagttagagcaagaaaattaaaaaaccctttgccaagaactagtaaccaaaacttatgtcgcatgaagcttcatttcttatacgttatatacagtataacattaatagaaaaactagaaatatttctttaatggtgcatgtaacatcattgggaattgcatgtgagtgggatttacaaatttacaatgtgagaccaccttccactcaatatatatatgttccaaagtgaaattttcgttttaatataacatacttgaatatagaaccaaataatatgtatcatgtgtgacgggttcaacgttttcaaatgtcctaaaagaaacaaagaaacaaagtttttgatttattattttaaaatcacaaaaccatataaagtttaaaaatcttgttaaacttcataaaatccgtctttaaaatttttaatataaaagtttgattcatattattgttctttcttaaaccaacatttcgttgatgaaagatggtcaaatgaattttttgttgtcaagctagagaacacctaaattttttccaattgatattatgtatgttaacacaaaaagagttatctaatacgattagttaatttatggatgattccaagtagaaacgccaacataaactttgactttgaggccgaattgatctgcttcttttatttctcttacaaatttgaaattaaattagtcaagtgtgatgataaaatacataacgtttgtacgcattagtatgttgtgtagcggagagactcttgtttataaaaacaatgtttggtttattctaattgtcattttattctttggatctttagttctcgcttagcgtctcgtgcatatttttcctcaaaatcatcaccattaaatgactcacgtacacaataatcacaacaacatacatatatatcaccatgccaaaatacatctgaaaaaaataaattcctagtcgctacactgtcatattttgattgatatttagactatttagtcattcagataacattgttacgaggaagtatatatacatacgtagcgttgtactactgtaactggttttaaatttatagtattaattttgttgatgttccgattgaaaaagtcattttaggaaagaacgaaaaaatagtttgaaagtgatttttttttaaaaagatataatcctacactgtcatgttttgattgatatttagtcattttgtgtgttaattaacactttattatagacagggttagttattaatttaaatctaaatgttcttgtaaaggcttccacttaattttctaatcaccatctgccgaccaaactactttatcaagtcacagcttttgtggaaaaatttccgttaattcatgagcttttctatttgttcacacttcacacaatcattaaattaaattttgcggctaatgttagaattatcgtacgacaactgatcacacgctacatgttctctagcttaaatttgcaacatatataattgaaacatcactcaaccccacaggctacaacatcccacatttaatcaagaaatcaatcagttcacaattactgatgaaattacgcagcaagtaaccctagctaactaggataaaagaaaacgatcaattctcgggaaaattcagtctctcccgaatcccaaaaacaaaagcatgcatttcgtaataaacaacgcactgattctgtttgattttttctacctttatcctacacaacactagttaaacgacacaaaactcaaaacacgaacacagttacttaatctattccccttattctttctttttgattataatagcatatcggaaaaaaatctacaaacattcaaaaaaacatcatctactcatctatatattcaaaccttggtccattcacatcacgaagtccatcgcctataatcatataacatatccaaaaccctaaaacgcaaacactaagataactatttcttgaaattaata

SEQ ID NO: 683 - DNA, 3000 bp, Unknown
  misc_feature (1)..( 3000): cDNA_ID_2121760_gDNA_ID_1620307_Annot_ID_152860 3000 nt of promoter + ATG
cgtctcgattcccgccggagataattatccggtgctcaaatctcccctcaaagctctcccgattcggaatcaacaacaatccgtcttttctctgtagacgatccaagcaattaacggcgacagattccgatttctcctcgccggcgtcgttaactttcagagagctatcgagtgatctccgaaacgacatcggattcgatttatacgacgaagatgttctaatctcgttgagtcgactcgctcgttcaccagccgaggaatgacgaccggaaattcgactaaccggaataaaccgggttaaaccgggaggattattattaacactgtttgattcatctttagagaactggagctcgaaccaggagttacaatcaccgatcaagagtatatcttccgggtcgacccggtaacggcaaagcgggcaagtggagtgagcgtcaagccacgtgtcaacacattccacgtggaaggcgtgtttacatttcggcaataacctcagaacttccgtcggttcgaaccgagcgagacacacggcgcactctaaaccatccttgtgaccgcttaatgcaccaaaccggaaaaccggtaaagattcaatcacggaccggtctataccggagtttttccttcctcctactactcctccaccgttgtaatatcctcctccgtatctagtgattgcgaaacgctgcgggtggtttacgtaaacgctgccgtttcgtcgtttacagtgtttgacgtagaggagaagtaagaaagtgagagagaaaaacgcagtgaggacggcgataacgactgcgattccgggcatgagagaggaagtgaagttatgccgtggcggtggagaaggcggaggaagtggcggtggagtatctgaggttgttataacaaccgccgtgtgattgtctgcgagtgagacattgagaaagagagagagagtagagaagagaagtatcaaggaagaagaagacatggcttaaaggcttctagttgaaagagaaggtctttagacttaagaaatggttattttattttcgtatatttattttgaagtgcctgaaaataagggagacacttttgtgagtgtgtgagatagggagagaggtttttataaaagggaaagaaaacaaagtgaatgaggacaaagaggatgcattaaaaacatgactcccttctttcatctttcatgccttacaaatttgattttaggaactactatagtaaccaacattttttatttcattttaaattgaattcattaatggaaattaatatatagggacacatatcaatgatgatatctatagaaattgtttttggaattttcgtactgatcataaattctgactctaaacaaatataatggctagcacagagtcgataacagcataaactagaatcaaatcatcaatgcatgtctcttagcccttttctctatcaaaactaaagactacatgccaaaccaccgaaatcataaccaaactctactttggattgaggttttttctcccatgctaaagagtaaagactacatgcattttaagataataaatgttaacatcatagtcatgtgtctgctgctttctcacgatgtcacactaacggtttagagagtgcaatcacattttaaccgttgagacaaaatgtttgttagaatctcaacttttcagtcacattttcaagccatatatatgtcttcctaatatatttttttggtaaaaatcatgtgttatgcctcgttatctttctctctcgaagattttctgtataacacaaaaagtaaagtatacaagatttataacgtgttaacgctaatcagtccacaagaaaaccacgaatagaaaacaagaaaatacaaagtccataacagaataagcaaaagaaatcataaaaaaaaacgagtagaaagcagtttgttccctagtgacgatttgggggagctggagctagctagctatttctgtaccattatttcttaaattttggactaatttccattatttttgtatctggatttatacgttacggcccatttaaagcaaatgttatttattatttggtcggcaccatttaaagcaaatcttattgctggagtcccctattaattttggtaatcgtggtcaccctcccccacaaactatatctatacttatcaatgatgccgatagtcacctaaatatatttgattggaacaataatcaccttttcgataaacccatattcaattctcctaactccttcacataatcagctataaaaatgtttcgataagaaagcaaaaaaaacatctaagtcgagcagaaatttgaacaaaatcaagaccggacccaacgcaaaccagtctcacagtctgtgtcctcttaaccaatcagagtatctcttcaaacggaaacaaatagtcaggcaagaaccggtgtaatttattgggctatgacccatgaccaaagaactcggcccagcccataactcttagaaaagccttggaaaatccgtacagcgcggcgcaaacgcaaaaagcagagaaagagaggaaaaatcgcgatcggcttcttccagccacacccgtcacagagtggccactcaatcgctgtcgcgtttccatcagattcccggtaacgttttcccttcttcagcttcccaattcccgccggcgaaatcctaaccactatcgtagtttttcagtctcccgattaatcgagttagggtttcgtgcaattttccccattttcgtgttcggttactactgggattttgaagtaggcgaagtctcaggtcgcaaaatcatatttttccctgaaacacgtttcaagtaattgcgtctgcgttctctggttcaatgccttgtttatatgatttgtgttcaatatctagaattgttgggttaatgtttatgcaaatgtctctgtctctctgtgcttttgttaaaaacgagttcacaatgataaaggtatcgtttttaattgttaggagttttggagaacagaagttaaaaaagaaatg

SEQ ID NO: 684 - DNA, 3000 bp, Unknown
  misc_feature (1)..( 3000): cDNA_ID_2121756_gDNA_ID_1620307_Annot_ID_152859 3000 nt of promoter + ATG
accagggacacatttttcgaaagaaggttggaggaacatattgatatcgtttcaggagcaaacaggcgccatgtacgatagaatgcagcttaagaaccattgggatacaatgagcagacagtggaaaatatggcgtagactcgttgaaactagttttatgaattggaaccctgagagcaacaggtttcgtgcaactgatgatgactgggctaactatttacaggtttacaaatcaaaaccacttgttacattcatttttgttgattttataaaatgctaaaatgtgattgctttgtgccgtaggagaatcctgatgctgggcagtatcggttgagtgttccgcatgatctcaagaagctagagattctctttgcgggttgtaatgtagaggtgaaaaatgatgaagtctcgggtgtaaggaagaggcgaagaagttgttacgaggaagaagatgaagataaccaaagcatgtgtagttcatctaaccctcaaacaaaagggtattggtctccgtctacacataagctgtttcttgatctgttggttcaagagactttaaagggaaatagacccgacactcattttaacaaggaagggtggaagacgattctggggactattaatgaaaataccggccttggttatacgagaccgcagctgaaaaaccactgggattgcactaggaaagcttggaagatctggtgtcaactcgttggagcaagtagcatgaaatgggatcctgaatctcgtagctttggtgcaacagaagaggaatggcgaatctatattcgggtatgataatgttagttgtcttaactattatccttctcccattggactacattttgaacagatagtgtttgtctttggtttattacaggaaaacccaagagcaggacaattccgccacaaggaagttcctcatgctgatcaacttgcaatcattttcaacggagtgatagaacctggagagacatacactcctccttcgcgttcgcgcaagaagctcctccacaatcgttctgaatcaccacaatggcgtgacacaactccattatcaaagatgcacgtagatgaagcagaaacctccaggcaaaatggttgttatgcagagtctcaagaagatcggatagacagtgaaaacgctcaaccattggatgatatgaagttaatgaatgacgttatgttgcaggaaagtccggtattcgttgagattgaatcggcaaagccgatgtacagcattggagaatgcattaaaagcctcaacgcaattgaagaggtcgaacaaggtagtgagctctacatgtttgcgttggacctgtttctgaagagagagtatagagagatcttcttagagctgaagaagcccagtttgagaatcgcatggttgcagagacttcaatctacttcatttcctattcctactacaacataggttcaagtgtattttacaagccatcctttttgtactctgacctctgtctctgtctgatgttatacccaaaagaatcgttctttgttagttctatgaatatggattatataaaaacagacaggtagagaatcatgttgatgaacctttgaattgcctaattcttaagtggtttgtgttagaattgttctcactttcattcattaggagaagatatttagcatttagttctatgcatattacgagagagcagaacaaggtttgggacaccgacaacaatggagtgtgtgaaaggggcttttgagtgagagttgatgattagaatcttttttgaattaaaaagtagataaagcgagtgacgacaaaaaacagtacccaaagtgggcaaaaaaaggtttagtcgcatcccaataattaattacccctttaaggttaaggagtaattttctaaaaagtaagaaactaaaattaacgcgccaggtaggggtcgaacctacgaccttctgcttaggaaacagacgctctatccactgagctacaggcgcttctgcatttattatatttattctttctttttcaatcttgtttttgtggcggcttatgaaatttcgtagaagtatcattttcaagtggtacgaaatacaaaaaaagacataaagaataaagtgtcgttaagtttaagcttacgtgttatctcgaataacattaattaagttacatctataaacaatttgtagcaatcgcattgtttttgttaagtaaagcaatcgcattgtttttggttttttttagtaaatttgaagtttttctccttattttatgtgtgttttatgattagttaagccttagacatagccgacgtataacacgtaaactatcattaagtatgaacaactttatgtgttgtcgcttttattttgaataatattagagaaaaactacctaacaaaaaaaaacggtgtatactagtggttattaaaattttggaaagatatgaaatgttggcctagctagtagctagttagaattttataattgaagtttattgttatttttagaattcgtgtcattgtgaagaatcctctttggaataaaatgaagccaagtaggggagtggagtggttccattggctaaaacttttacactctctctttctctttataacacaaaccacaaataccttcttcttctctccctttgcttcacaatctctccctatctatcttactgattatctctctctaccatctgagttttgcctgttttgtattactttgacgacccacttttgcagattctcaaggattcttcaaagtcttagtcttttgtgtttctttccagattcttcaattaatatacgctataatctctcactaaatcaggttctttgattccatcattaaactattcgttagttttcccagtttgattcctatatatctttagatcctataagaagcttcagtcttttactaaacccacaaatcaagcttccaagaattagaggaaaaatattaagtactttattttataggtagaacttttatctcgtagcctttaaacgatg

SEQ ID NO: 685 - DNA, 3000 bp, Unknown
  misc_feature (1)..( 3000): cDNA_ID_2121782_gDNA_ID_1620307_Annot_ID_152868 3000 nt of promoter + ATG
taaagagtagaagcaaataaaagagaaaaaaaaactatataccgaaacagagaagcagcggcaggaaaactcaagactgaagatcactttggaaactgatacttgagatatcgtcacgaaaatgtaaaatgaagctcaaagtcatttcatagctgctggtcaaggtaaggatctctaggcggattcgagccaagatactccgagacctcagtaacatacgttttcagcttcgaggtggttcgggtgagccaatcggtgtttgtctgatccatctcatccttcatattcgccatcttctcttcctcttccaacatgctgacccatctcttacccatatacattttaaccgcatccacaccttgtttcacgacttcatcaggcgggacaacaagcgggttttggtccaagttcagtttggtcaagttcacgagcgtgccaaaagcgtctggaagagaatggatctggttgttgctcaagtcgagttcttggaggcttatgagatctccgaatgaagcagggagatcttggagatcgctgaagttactgctcaggttaaggtactcgaggttcgtgagcagcccgaaagaatttgggagaccattgagttcgttgaagtgtgcatcgaggtagcgtaaggatctcatttcaccaatggaagttggtaatgatctgattttgttgagatggatcaagagcttctctagtttcactagctcgaatccgatgtttgttggtaagtaggtgagattgttgtagctcgcatccaagacaaccaacgatctttaaataaaaaaaaaaacagaagtaagaaaaaaacagaggaaacagagtcaacctttaaagataaaaaacacttacccacaatggcagatggaatctggtaaagttgtgagtttgttacaagagacattcaaaatcttcaactttgacaataaaccgatcgaatctggtaatgtctccaggaaattagtggaaacatcgagttcgagaaggttatgcaaaccagctatcgaatcaggaatagcctgttacatacataacctttgatcaaaaacaagcaacacacacttctaaatctatctcaatctagacactaccataagaaccgatccaagaatctacctctatgctaaaagactcaaaatccagagcaaagtttacatctttgacaagcaaacacacttttgaatctatcacaagtactgatccaaatgtcaaagaattcaccctaaagagtcaaaatccagagcaaagtttacatctttgacacataaacatatcagaattctaacagatttgatcaaaagattatgaatttgaccattagggacttagaaaaactgacctgaagctgattgttatagagattaagaacaaggagaccttgaatctttccaaatgcttcaggaagcaacttcaatttccgaccagacaaatcaactcggtccaatggattctccgcagcttgttgcagtatactcacaacctcttcattgacttcaacctccgcagcttcctcctccgccaccgcggcagcattcttctcggcagactcatagatcctcacgagcctctcctctgcttctttcaaaagcttctcataagattcatgaagctcgttaagcttaaggatcgatttataccaaatcttctcttgctccacagcttctctcctcttctgttccttctccgccacgtcaatatcgttaggagagagagcgatctcttcgaaagattccgacaaagacgcgtcgatctcacggagcctagcacgagctctgtcgacggtttcgtgatcgggtcttggtcctagggttcgaagaacagatcgggtctgagaaacgtcggcggttgcgttagtcatggaggcaagaacatcaggatgagccaagtgaggcatctgagtcactatctcgatagagtggtttgatgatgaagaaggatcggatttggatggtggtggctcgacatcggaagaggaagaggatttggcggtgaatgaagggagacgatccaagacataagagagaacagggaagttcttagggttaagctccgtcgccattgttgggagcttgatggaagagacgattgggagattgaggaagaagaagaagaagaagaagcgattattggttcgtgtctcatgtccttccgtactattagcatctctattgccaagtcaaagtcaaagatcgttaaattacacgtggttttgtattaatacaagacaagtgtcaatgttatcctacaaagaagaaaaaaatcattctaaaaacacttcttacacaaataataattttacacttagtagaaacaaattaattaaggttttagaatagataagataaccaagaagtttagagaaaactttaattaaggtttttgaaaaagtgaataatttttgttgttattttgtcttcattttaagattgtgaggcccaatattggtgacacaaatgttttatgggcttgagaatgatcttagggaaaactatattgttattcttttggaaatgaaaaaaaaaagctcatttttgagactatgcaatggagactctgttttcgatatgtatgataataataataagttaataacttttggaattttactgatttttctgtaatctcatgatgattcatgatgatgaagacgatgttatagttatacctaaacatttgcttattttcaacttaaaaatgtatttattttataaaattcaacttttaaagtaaaaaaaaataaaactcaatatctctgatagtgacgacacagggagtattaaaatcgaaaaacgtcaacaaaaccggtggaaagttgaatgggtcgaaaccaaacgcatatagccataaaagcattgtctccattatagattctccatatctgagaataaacaaacgattggataaaccgataaagtacatagaacttcgatctttttcacaataacccaaaaaaagagagaaagcaaaaaaaaaaactagagcgtttcaattaca

SEQ ID NO: 686 - DNA, 2503 bp, Unknown
  misc_feature (1)..( 2503): cDNA_ID_3058356_gDNA_ID_1620307_Annot_ID_152867 3000 nt of promoter + ATG
cccaacctcctggtaggcagatcataggaaccccttcgcatatactctctagcgttgagttccaaccattgtgtgtcaaaaaccctcctgtggcacgatgcgcaagaacctcctgttgtggtgcccatttcacaatctttcctttctcttcaaggctactaaccagcccttcagagagcggttcgatccatttcgcgccgagtactgaaccgggtcgtactacccacaagaaaggctgtttgctattgcttaaaccacacgcaatctccaagaactctgtttccgttatgttcacaacgcttcctagactaacgtagatcacagatttatcttcttgatcatctaaccacagaatgcaagtctcgtcttgtgtgaacaagctgcttgacgaagcagagaagtagctgtgaaacggaccaattgcaaaaaccggaactttaaaaatttcgttagaaagagtcaacgaatctttctcaagctcttcgcaggacatgtatattaaccctgaagatcttattgtcgtttcgactacagcatgtaagaacggatcgagtttctctccgaactccccgaaaacctttgaaagatctctcttttgaagcggcgggaactcaggaacagagtcctctgcttccgattctaagacacaaaggctcaaaacaatcttataaacttgataaccagaattcaaaatagagtgtccatagtaaataacctaaatatcctactcttttccttagttacgtgaacaactttaactttttatttgttagaccaatattcattgacatgccatgctattttattagtagagatgacgccatttttttaaaaaaacaacacaattatgaataaatacaaatataccattttggtcaaatgcaaaaattttactttccttatttttattggatgacacattttccttttaatagactgacatcatcataggtgagagtgcgaagagcatttgtagtcacagtatgcaaatatgtttacaaaaatacgaatttcctacccaagttagataactttttcctatatagcaatttgaccattaaaaataagcatttcatgaagcattaattacctgaaactggaagatatcccttggttcggataagtggaagactcggataagcattgaagaaagtggctttaaaagtacagagaacgagcctcggaagcttcaaactctctgaaacagattgtgtgaagagccatccacagtcatcgatcaaacaagtaaccctctctgactcttttgattccagcaacactttacgcaagcaatcacgaaacggagactcagcgttaaggttgatttgcgcgagcaaagacataacaccatcttgaatctccgtttcagacaaaccatcaggaatctgtaagaaagtgaagagaggatggcttgaagcttttggcgcgttgaagcgcgtgtggatcacggtaatggagaagcctcttacgtgaaggatgttggcgagctgaagcatagggttgatgcaaccttgtaatggaagagggaagagaatcacacgcagaccatttctcttctcctccattgtaattgaaacgctctagtttttttttttgctttctctctttttttgggttattgtgaaaaagatcgaagttctatgtactttatcggtttatccaatcgtttgtttattctcagatatggagaatctataatggagacaatgcttttatggctatatgcgtttggtttcgacccattcaactttccaccggttttgttgacgtttttcgattttaatactccctgtgtcgtcactatcagagatattgagttttatttttttttactttaaaagttgaattttataaaataaatacatttttaagttgaaaataagcaaatgtttaggtataactataacatcgtcttcatcatcatgaatcatcatgagattacagaaaaatcagtaaaattccaaaagttattaacttattattattatcatacatatcgaaaacagagtctccattgcatagtctcaaaaatgagcttttttttttcatttccaaaagaataacaatatagttttccctaagatcattctcaagcccataaaacatttgtgtcaccaatattgggcctcacaatcttaaaatgaagacaaaataacaacaaaaattattcactttttcaaaaaccttaattaaagttttctctaaacttcttggttatcttatctattctaaaaccttaattaatttgtttctactaagtgtaaaattattatttgtgtaagaagtgtttttagaatgatttttttcttctttgtaggataacattgacacttgtcttgtattaatacaaaaccacgtgtaatttaacgatctttgactttgacttggcaatagagatgctaatagtacggaaggacatgagacacgaaccaataatcgcttcttcttcttcttcttcttcctcaatctcccaatcgtctcttccatcaagctcccaacaatg

SEQ ID NO: 687 - DNA, 3000 bp, Unknown
  misc_feature (1)..( 3000): cDNA_ID_2121771_gDNA_ID_1620307_Annot_ID_152864 3000 nt of promoter + ATG
aaaattccttgaagcactgatttaagtgctctcgcagctgttgctgcaatgcacataaggaatccaaacaggtgaaagcttggctcaccctgacaacacccataaattaaagaatatcaagcatagaatcaaacacatcacacacacaaacagaacaaaatctccattactcgaacttttttagcataaagttcacatggttaagagaagatgagagaaacacaaaatctagcgaatacaagcacaaaacaataccaaattttctcatgtgaagcataattcaacaatgtctgagcttgtcacaaagataaaagctagcatcattggccaaacatgaaactgaatcaacgatatcacgttcattgctccagaaccatacctatgttcccaacatatctagttcattgctcctacatcacatctacatcaacctctctaacaactcatccaaaagcatacataagggattcaaatttaagaggtcaaaagaagtgaaaataccccactagcaataacaactccggtgacgacagggacgagagtgaagtaagtcaaccaagcctctttcttacgcgtcatcaggtaagcaaacacggcggtgaaaaacggcgtcgtagcaccaatggcttggttaaacgaaacaggaagaaagcggagagagatgttaccaaagaccaccgacacacaaaaaacgagacttagagctgcgatcttaaagaactgaactctggatcgaatcgtctgcatcggaaccatcttcaaccaagcaatggcgacgtagctgagtaacgaacaagccgtcatgtgacacatggtgagaaagatcgggtacttgaatccgtaattgctaagcaagtacttgttcagcaacaatacaccaatgttcgatgagtaccaagacgcgactagcccgattgtgaaaaaccggccattcgtcgccatcttcatcgcttttcttcttcctaatcctgggtcgactcgatctgatgagatgagattcaaactaaaaccctaacgaatttcacgaaattgggattggtgggaatcgaatctggacaggagatggagatctctcggtcctccgatacagaattttgacgcgtcgtgatgatgttattccatcaatgggtaagatttggattaggttacaacacgcgaaaatgctggagacgaagaaaccgggaaagagaagaaagttgggatttttggagaagaagaagaagaagctctgcaaaaaggagagatctttgggctaaagctgcaacaacacttctctttccttttttaactaatttattttttctttcagtttcatgatattataattggtgcgttatgtaatgtttctttgggctaaagttttttttgtttggttacttgaaaaatcaaagtgtgaagatgtgtaacaatgaaggaaaggagccattgactttgttattggttattaccgaatctgagttctaaatttaatgatttacgttcatatactaatccttgaaaattcctagctaacgaaacatttcagttctgagcatatttaattgactaagtaaatcgaccacgaatctaattgtaattaacaaagcgtttggttagttaggcaatcgattttacattaatttttctaaaaatacgaactattcagagaaaagcttatctaagtagcagaagtttggcagaattatgatgaagttgaataaatttagcaaacgtttttgacaaagtgggtgttaagtctagtggtagaagaccaataaaagctttattagtggtgtagcaaagggaaattatgtaatatacaatagtttagaatcgatgctcgattcttaagtcaaaacaatggtaggatcatctgcatttgggcttgatgttattagccgttacaacttgtgaagatgaattacaactcgtataaataacaatgaaatttgcatatgaatcatttagattcaaatttgattttataaccactcaatttcacattacattagccacttataaaacaaaggatttttcttaggaatctcgccatatccataaataccatcttcctttgcttcccaagtacaatttctacatctagaagaatctctaaccgctttataaatatcgaacacacctttttttacttgttcttggctaaatccacagaagtagagtgtcgaattcataaaattcacgtaaaacatccaaccatataatccacctttttgtagaatatggaagccatgatcatcatctcttgatttacaatgaactcctaaaagataatcattgtcattataaatcacaaccctagtaagaggacctttcattggaaatacttttccatcatgttgtagagtttcacagcctatcaaagatattaatactataaagatgattataaacattgagtagaaaattgttaggaaatttatgttagacgaattcatcatgaagattttcttaatcatgatattgcattttctagaacttataatttatttatatataatgagctaactttacaaaaaaaattataatttacattaatttatgttgaataacctaaaatagtcatgaaatcactagaagtttttgtgaagtaaataagaaagtaaaagttgctttttgttcccaaaaaaaaaaaagactaaaagttgcttaaataacccaaaatataatagaaatacatcaattaggttaggtattcatatccaaaaaattaaattgacagtaatgatccaaaaaatagtagatttattagaggtgggtctgtctaggtgtccaggtgaacaagtgagaggagagagttaatagttttgtctgagaatctgacgatcacttaactccaaaacccagtggcaatcatgtaattttactgtaaagtttcaaccagaaatctctttttttctctctctctctgcgctgcaaagcattgatcatcatcattcatcatcttcacaagtctcgttttcataatttatatgaggattcgtcatccgggtctatacgaat

SEQ ID NO: 688 - DNA, 3000 bp, Unknown
  misc_feature (1)..( 3000): cDNA_ID_2992131_gDNA_ID_1620307_Annot_ID_152862 3000 nt of promoter + ATG
agagttgaacattacttgtgttgctatgtagaaggaacattgaagtggaagagccatgagataacaaatgcaaagaccatacaagctaaaaggaaattcaagaaccggtgaccttgccagaagcttctaccttccaccaatcgtggaccagatgttctcagagttagattctctacaccatttgcttcattccggctttcctcagactccacctcaacacttccaacaacattacccgcaatcgacccacaaacttcacagattctgcaaagcaaaaccaaaccatgaatctcatcacaaagaaagaaaaagctaagctttgcgtctctcatctgacaacaaatggcctcaaaactgaaacttctcaaaaagacagtcaaaagaaagctgttcaataaccaaaagtgacaataacctaaagaaagtaaaaaactttcctacatcaatggaaatgttagtcatttagcctttcctaaactatcttaaagcttagatttttacgtactcctaatggaagtaaccaccaaacaaccattctcaagaaatatggagattttgaacttacttgtttcctttgatcttgaaccaagtctcagcacagtgtttatgagcagcagcgagatcagctttacaagaacagccaagctcaatgggaacaccagattcaagattcgctgcatctaagctcatgtgacaaatcctgcaatctctctcagattgcgacaaatgtacaactttctcaggcaatccaagctccagatctatttccaccgaacacaccgacgcattggatctcctctcctcatctttcactatttcttcctccttctccaccgcaccggagctccgacgaggctctccatcgccatcacagccacttgagctattgattactttaacagagacaaaggtctcgagatgtggctgtacggattccatattcgtatagacccggatgacgaatcctcatataaattatgaaaacgagacttgtgaagatgatgaatgatgatgatcaatgctttgcagcgcagagagagagagaaaaaaagagatttctggttgaaactttacagtaaaattacatgattgccactgggttttggagttaagtgatcgtcagattctcagacaaaactattaactctctcctctcacttgttcacctggacacctagacagacccacctctaataaatctactattttttggatcattactgtcaatttaattttttggatatgaatacctaacctaattgatgtatttctattatattttgggttatttaagcaacttttagtcttttttttttttgggaacaaaaagcaacttttactttcttatttacttcacaaaaacttctagtgatttcatgactattttaggttattcaacataaattaatgtaaattataattttttttgtaaagttagctcattatatataaataaattataagttctagaaaatgcaatatcatgattaagaaaatcttcatgatgaattcgtctaacataaatttcctaacaattttctactcaatgtttataatcatctttatagtattaatatctttgataggctgtgaaactctacaacatgatggaaaagtatttccaatgaaaggtcctcttactagggttgtgatttataatgacaatgattatcttttaggagttcattgtaaatcaagagatgatgatcatggcttccatattctacaaaaaggtggattatatggttggatgttttacgtgaattttatgaattcgacactctacttctgtggatttagccaagaacaagtaaaaaaaggtgtgttcgatatttataaagcggttagagattcttctagatgtagaaattgtacttgggaagcaaaggaagatggtatttatggatatggcgagattcctaagaaaaatcctttgttttataagtggctaatgtaatgtgaaattgagtggttataaaatcaaatttgaatctaaatgattcatatgcaaatttcattgttatttatacgagttgtaattcatcttcacaagttgtaacggctaataacatcaagcccaaatgcagatgatcctaccattgttttgacttaagaatcgagcatcgattctaaactattgtatattacataatttccctttgctacaccactaataaagcttttattggtcttctaccactagacttaacacccactttgtcaaaaacgtttgctaaatttattcaacttcatcataattctgccaaacttctgctacttagataagcttttctctgaatagttcgtatttttagaaaaattaatgtaaaatcgattgcctaactaaccaaacgctttgttaattacaattagattcgtggtcgatttacttagtcaattaaatatgctcagaactgaaatgtttcgttagctaggaattttcaaggattagtatatgaacgtaaatcattaaatttagaactcagattcggtaataaccaataacaaagtcaatggctcctttccttcattgttacacatcttcacactttgatttttcaagtaaccaaacaaaaaaaactttagcccaaagaaacattacataacgcaccaattataatatcatgaaactgaaagaaaaaataaattagttaaaaaaggaaagagaagtgttgttgcagctttagcccaaagatctctcctttttgcagagcttcttcttcttcttctccaaaaatcccaactttcttctctttcccggtttcttcgtctccagcattttcgcgtgttgtaacctaatccaaatcttacccattgatggaataacatcatcacgacgcgtcaaaattctgtatcggaggaccgagagatctccatctcctgtccagattcgattcccaccaatcccaatttcgtgaaattcgttagggttttagtttgaatctcatctcatcagatcgagtcgacccaggattaggaagaagaaaagcgatgaagatg

SEQ ID NO: 689 - DNA, 3000 bp, Unknown
  misc_feature (1)..( 3000): cDNA_ID_2121736_gDNA_ID_1620307_Annot_ID_152853 3000 nt of promoter + ATG
aatctgtacctgagcctcctccttggtcaagttcatcaaatcctttcgggaatttacaacaaccactgtgagttttgtttaagaactacttcctatgtaatagttgttcttatctaattaggttttgtctcctgtaaccgatcagattacctccattaaatactggagctccgccaggtagccagctcaggtatgtcctaattcccattacttacaactcttgattgtgtttgttcaccgttatgcttgaaggtcaaaatgatgtataaaacatgatgttttgtttatgtcatgctaaaacagacgcagatccgcgatcgagaatgctccttcacagcaaatggagatgtccttgttgcagcaaacagtcccaaagcaggagaactatagccaaagtcgagcggttgcacttcacagtgttgaatcaagaataacagagctcagtggaatattcccgcagctagctacaatggtcacacaacaaggagagctagcaatcaggttcgttaacgttttcttacccacaacccgacattttccgagttgctgggaacatcatctaacacctgttagttttatggaacagaatcgatgacaatatggatgaatcgttagttaatgtagagggagcacgtagcgctcttctgcagcatctcactcgaatttcgtcaaatagatggctcatgatgaagatctttgctgttatcatcttgttcctgattgttttcctcttctttgtggcttaaaacaataccattttatctcttgttcctgggggtatcaaatctatacatatgttaagcttgtaagcttctagggctccttttttttgtgtggatagtggagtgtcaaaaagtttaatttttctgcaagactcagttgtattttaccaggaaacttctgatgtaatagcatttaactcaagtaaaaattcaaagcaaacaaagtaattattattctaattaagatataatcacacataatatgtttcatactaaacatcataaggaggacagtaatcaacgtatatgagtttgggacttagaaatcaaactactgaagcatcaacaaaaatgctcagaagttagtaagtaccatagctatgtctcagaacaatccaaccaagtttcttggatttgagtttactaacttggtgcttcagtctctctctgacctggatggtttatgcagcagctgcatcaaacctcttcatcatgtcgcaacgtggcgtttcgcggatatatccccattgttgtctctgaagctcatggcgacaattctggccaagtatagacaagtaatctctatcaacttgctcttcaaccctctgtctctcgaagctacttatcggatattcctgctcgaacttggctgatctcacaaagtaagtgacgcccctatgcgtggtgaatttgagctcgtagttatacgatgagaaagcgagtaaattggttgaggagaaggcaaaaagttgagtagtagtatgaacacaacaggaagtatttgaagaagtacacgaggattgaatcctgtatcagaagcttgattagctgttctagttcctccaccaaaattgaatgatcggaactgagtagtagcaggattcatttcaccaccaccaaagaagcttctgaaaatctcatcagcatcaaattcatcgtcgtagaatccattgaatccgttgtttcttctcgcatctcggcgtggttgataagcaggctcatcggaaccactgccgtcgtactttcttctagtgtcttcgttgcttaggcattgaaaagctttagagacggatttaaaagcttcttcagaaccaggagctttgttcttatcaggatgaactttcaacgagagtttccgataagatttcctcaaatcttccactgaacagttacttttcaatccaaggatctcatagtaatccttcttcgattttatctccctcacgatcgttcgttgttcttccgtggaagacgaagatgatgacgatcccgcggctgatgacgaagatccacgttgacgaagagaaggtcgatccgacggcttagatgactcgttggcagcagatcccggcgaatcctcctccgccgctggttcatccgattgcttcttcagatccgaaacaagaccatcgatcggaagatttggatcaagacgacgagctttctcaagaaatttcaaagcgcgagatctatctcctgcttctatagcatccttgccgatttttaggcatttcaacgcgtcatctttgttaccatccattgtgattgttcaacggaaaaacaatttcccgatgatgctatcggaaactcccgaggaattagagtttctcgaagcgattggagttcatctaagatgtgaggactttcccaaacgagcgacgattgaaaaatatcgcctcctcttccacaatccgcacacagctttcaagcctttctacagatgaacgactttcagaaggattgcgtgcaaacatgcgtggcgttttgtatattaagtagagaacctagtgtcgtttaaataaaagaacatgtatgccgtttttattatcaagaaggggcagtcgtgtcggcaaaaaactggggataatcgggctttggtctttcttattcaggcccggttctttgcatttgcaccaggtccaatatatttaagacctagtatatctaaagcctaattgtttaattttaaggcccaaattctatccttaccacataaacgtgtcgtttgagatattaagaaaggaactacatgtcgctctaaaaggcgaaaacgacgaggcgttattcttggaaagagctcctccaacggataaatgaaagatcctctctcctccaacgataagagaaccacgagaggacacagcatctgaaatcgtacaagtatctgaagaacataaattaaaaatctttactttgtaataatggcatcagagttttgatcggagaatctaaaagtctcgacttttcgaattttgttggtcgctttcttaaggacatg

SEQ ID NO: 690 - DNA, 3000 bp, Unknown
  misc_feature (1)..( 3000): cDNA_ID_3058388_gDNA_ID_1620307_Annot_ID_152848 3000 nt of promoter + ATG
tcactattttcattaaccttcccttcttccctcggaggagggtccgcaacctatataccaaggagaatctgatttagatttgaaactagtactacataagtgaaactgagtaattaagtgaagattaataacctcaacagatattcgataagtatcaatgaaacacttgttaacatatgtgatagcatcttgagcttcttgttcagtacgaaagccaatataagcaaattgtctacttttgccatcactgcaaaagcaaaacgaaatatagtgacacaagaattagctgtgaaaaacactcgatttgaatgtaccttttacgcttcaatttcacgtctgcgatttctccttttcgtgaaaagacatctcgaagtcgttcctctgtcacatgtttggaaggaagattcttaacgattatccaagacctgtaatttacagaaggccgaaacaaaaaaaaataacttgcctacattgattgttttctgctaaacctaattagttaaaggaaaaagaaaactgttgtgggaaatcaatacttacattctcaagttagggtttctaatagacgaagaagatggattttgtttccttcttgcaatgtttttgaagactctaagagtgtcggactaggaagaagaagaagaggagaggggttttaggtattttgttgttccttccagacccggccctgaatggaagcgggtagggtttaggacacttaatgacgagaggaactttccatacatgcatcttagtctgtacgacgaagttattgtatttgatcacgtgcaaaaggtattgcttctgttaccatatttggtaagtacatgtttgaagaaccatataagtctttgaaccagaagcgttgcccttgaagaattaggttttatattatatgtttttcggatatgagttcatgttttcaagcagagacaaagcttttcatttcttgattttgtaagatttacatttaagactccatcaatgaaagctgtgatcataatcactttgacaaaagacaaaaacagagaaactttagtgtttgttatcgtaatcaacgatctcagaatcggtaacggatctggagttttgcacgatggaacgtccaatggaattgatccaatcttctttctccttctccgaatcagcaatgaagtacatagtctcatttctcgtcgatagctcgaacgcgttttgcttgttgagtacatcctctgctcctttagcggttaagcacgattctacggggacgacaccgcgagggcgtgacacacgcgtgacgtcggagtctttgaaccagaagagtttcccttgtttgagcacgaaccatcggcgtcgccaagtcttgatgtactctccttgtttcgtgagccagccggttcgttctgggtttgaccagaactctacgcctccgtagtcttcggaattgttgttctgaccgccgattactgctcgccacaggcttgccatcttccgaagattgaactggagaattagggttttgatccaaatctgccgatgctatcgaaaatctgtttatcgattccattattttttcgtgtttatcttttgccccaaaatgtttttatttttcattttcttcccttaaaatatttataattacataacaaccccttcattttgccaattgcataacagtcagcaacaatgttttaatattgaaaaaaaaagtcaaatgtgaaagaagattatgtcttcttctccaaacggaaagagcttagcaaaattcttctgaatgaataatcggcgattatgtctttgaaaaacgatgcgagtagtagccacgacggtggaagcaacagagaaagcgtaatcgatgatcatggccgccgtaaaagcacttgcggctactgtaaatccccagctcggtccagtatctctcacggttcgtttaattttgcttttcttacggattaggttgttgaatcgatcgattagagtagaatcttctcgaattgctcatatgcttgataagaattgattttgtttatgatcttaaagttccaatgaataaatgattgataaacatagtgaatgtcaatgcaggtttatcagcacagactcttaccgtttatgactaccaaggtttgttgctattattggactctatgtgtgatgaaccaattttgttgacagaatagagatcttttatgtatctttgctttacttttctgtagctcttattgaccgaggctggagaagatctggtacttatctttacaaacatgagatggataaaacgtgttgccctccttatacgatacgtttgaaagcaagtgattttgttcctactaaagagcagcagcgagtttctagaagactagaaaggtgcatatagcttcactttgcttctctttttggatcaatagatgaaagtttttgtggtgttagttgtttcatgttattggcttagtcggaaaggttttacctttgaaacatgcatatgaggagagatctatgattctgatgtgtaaatattcttcacgatcttcagatttctctaatgaagtcgttcattgaagagcttcctgaattttcttaataatgttttgtcaaaggttcttggatggcaaactagatgtgcagcccagggaacaaagaggtgcttcttcctctggtgatgtttcagatacaaggagaaaaacacttggagctgctaaaagtgaagagaataagaaagttgaagcagttatggatgatttgtctaaaaatattgaccaagctgtgcaattatgcatacggagtggggaattcccgtctaatatgcagataccaaaagcttcagtgaagaaggttttctgtgctagaagaaagaaactagctgaaggaacagaacaaatcttatacaccagcaacattgcttttccaatagcagctgcaataaaacgcatccagacatctgagaaagaggggataaatagtgcagaaggaaatagattatcacctgaaactatttctgagatgttgttgagtgcaatg

SEQ ID NO: 691 - DNA, 3000 bp, Unknown
  misc_feature (1)..( 3000): cDNA_ID_2121711_gDNA_ID_1620307_Annot_ID_152844 3000 nt of promoter + ATG
ggtggctctggagaggaacccacctaaccggctctttgggcgtcggagatcgtcgtgaatctggtgcatcctctgtctcgttaaagttaaatttcatactttcttcactcgagtgtatctgttttcgtcggaaggagatgcagacacagacaccagattcacggcgggaagagaagggagaaaagaagcgatgaagcagatacagttgaaacgacttcgtattgacgtttaatgggcttttattcggcccattaactatcttcgaaacaaattgaaatgaagaagcactaactggttttaatatataaaattaaatctgaaccctaaatcatcgtcgccgtgttcttctccgcttccaccgtcgttgtattcgtcttccgcctcctctcccatcggtgcgtttctatctcttccaccaaatggattcatttactcttgggtaaattttagctcttgtttgtctatattcattatctggaattttagaggaatctgtttgtatttttttacatctcgttgaaacagcgcatcaatgtaggattagcatttatcttttcataacttgggatgatcgtgtatgggtctacgggttgtattgatctggtaaaactggttttaaattgggataaacaaattgtgttccttgttcacaagatgattattgtcactgtactgggtttatcacaaggatgaacatgataatgtgagaaccagtattgatataatgtttgcaaatattagagagttccgatttcaatttttgttttcaggaagcagttttaaattattcccatgcatgttgtttgtgtaggagaagagagttttctagttaactctaggttatttttatgtcttaagaggaatgaattacatctctggatgcaggttttgaacagcttggcagaagaagtgaaacttgagagagtaatggagaacttggaagatctgaaaattctggctgagcagtggtcgcatcaaggaattgaatatcttcagaagataccaccgaatcagctgtatgccgccattggtgttttgttgtttacaaccatcttgctcttcctatccagtatgtattagacaccactttgttgtttcttaatcctttcctagtagaattgctttatttatgtaagatctccccctggtagtatcttgtttgccattgataaggacatatagcctgttcttcttctaaatgtcttcaattacttttcttctgcctgctattgtttacaactgcagaggttatagttctcatggtaccattttagacttgtgattaagccagagtattttgtgtattggaattagaactattattgcaatttctgaggtttattcatgatttttctttgattatacataaacaaacttttgatcttttgttgctaaacttgttgttcttgctggggtatgcagttcgcctggtcagacgtaccaaatccaacactgtactcctttctgggctgaccggaagtggaaagactgtgctcttttaccaagtgagtgttttggcttgacgttacctttttcatatgaatattgtttatgactttccttcaaatgtactttttttttgtaatgtgtcactattgtgagtcagtgtgagtgactaggtcattgttggagagttataacacgataattgtttgattggcagctccgagatggatcgtcgcatcagggcactgtaacatcaatggaaccaaatgaaggcacttttgttcttcacagtgaaaatactaaggtaaagaatcttactgtgttctgttgtaaacaacacgtgcagttgattgtgatggatggaataacatattactaaaccatgtcccgtgcttgctctttgtgacagaaaggaaaaatcaagcctgttcatcttgttgatgttcctgggcactctcggcttcgacccaagctagaagaattcttgccccaagcagctgccattgtgttcgtagtggatgccttggagttcctcccaaactgtcgtgcagcttcagagtaatttcaaacaccctctctcttccacacacacgcattgtaagacacagataagagacatgtttgcatatgtttgcatctcaatgttgaaaatgaggcattgccatggttttttatggtgataggtacctatacgagattctgaccaatgcgaatgttgtcaagaagaagattccagtcctcctttgctgtaacaagaccgataaactcactgcacacaccaaggagtttatccggaagcaaatggagaaagaaatgtaagaatttcagttttcttgacaaaattttcttatatataaagcctatcttcctgcataaaagctaatcatcattggttgatgagtttttgcagtgagaaactgagggcttcaaggagtgcagtctctactgctgatatagcgaatgacttcaccattggaattgagggagaagtgttctccttcacgcattgctccaacaaagtcactgtcgctgaggcatctggacttaccggagaaaccatccagattgaagacttcattcgagaatacatcaagccatgagctccaacatgccttcatagattgaatctaccacaagtttcttatgctttgggctgtgactttgatttgagtttagagatccttttgtatatgagatctttggatgatttagggtgttcaaaactgagtagctgtattttcgagttagataatctgttttaaatcggaatgattttaaggaaatgttaaatgacttaattctcttgcaaaaaaggaaaagaggataatcatagataagtgatcgtgcttatcaacttcgagaagataacgcgagaagtccttggggataagctagaaactgtcttaactaagccggtaaatccaaattaaaccggtaatttggtcattacaatgctcacgagagcatcacgtgtcttcttcttcttcttattcccccccaaatttctggactttgtccttaagaaggagatgaagaagaagaatgactaatatg

SEQ ID NO: 692 - DNA, 3000 bp, Unknown
  misc_feature (1)..( 3000): cDNA_ID_2106505_gDNA_ID_1620307_Annot_ID_152845 3000 nt of promoter + ATG
gctcagtcaaatctggaaatgtagcttccaaccattcaatagccagactggagttgctaactgctaacgaattggatgacttaaccccatacatattagcatcgttgtaaatctccattacggattcccatttgtaaacactgttgcaatatacatccgaagcaatctcagtcaacctcaagggcagttaaacacaaaacatcacaacgaactaaaacatcttccatgacttatagaagttcgacataaagaggatagtctgtggaaggaatgcatctgttgcatatcaagtcgtcaccgcgtcaacatgcataaactatttgatacatcaaaggaatcatgggacccagctgattttacccctcaaaagcttcaaatgagcctagatttgggatctaaaacagcttaatgagaatcattcatatcttgttcaagaaaccagaaaaccacaaaaaattgataaatgttatcttggaaacttagcataccaggtacaacttcaagcgataagaaactaattaaaaaactgccagagagaaatgaaaaggagaaagaaccatcatctgcctaccttccaaatggcacaacggggcataagatataaattgaaccatcagtgaataatataaagacctgcaccaattgaaagattaggtcaagacctaaacatgtaatcctcaaggctctatttgacaagacaactaaacaaaatcactgtcagttatcaaacaagtggagcaagaatttgtactgaacttacagtaaatctatcccacagatgatctcctccaaaactgaaatcagcaggataaattgatgaagctgttctagatcttcctggctcaccgggctgcagataatattcttgctctggtagctcagtatctgaagacaaatcgaaaagcctagcatacaaatatcttttagtaagctaaaaagctcttaaatcaggattaaataaaacgatttgattctttataatgagagactggaccagatggtaacatagtaagtcattgcatggcagaaactaacaatctacaaccttaggaactgattttttctacaatttctctaacatctttccataatgatattgatcaatatattgacatgtacatccaccttcactatcagccgaaaagattgttacctgaaaactgcatccgaggatagaattcccaaatgggtgtcactatcagggtgccacgatgcttgtagcaaggttatggcactgtcactactagtatagatttctgaaccaatagaaactaccctgcaacacatagattatgaagtgataacgtataagcagaaggccattaatttaagcaagataacatcataatcaagataacaatgaatataaatgcatcttattagggtaacgttaatcactacctgcaaatgacattgtcttctatcacagaagcacgtccaaataggtacatcacacatatcccatctgagccggcaagaagtacagctgatccagacttattgatggagattttgctaacagaaaatgtcacctgaaggtctggttgcatcacctataatatcatttattagtaaagcttagtcaatcactacatgatgaatcaatcacctataatttatcttatgtagcaaagacaacagaggaaaactaaaggtttttgacagtagtacatagcaagtagaaaagatcttcctattatcatccatcagtaagaaatctaatttctcaaactcttcctaaacctaatttctcaaagtcagtaaaatgtcagcactaaaaaagagctttcgataaatcttcttttcaatactcattttggccgacttagcggtgaaaacagaaagagagagagagagagagagagagagagtaaatgaccttggacgggactgcggcgaggacggaggatggttcaggttcacccaagcgcagagataatcggtgaaggagatatcgtctcgaatcccagtagtatacgcgcgagtctccgtcccaagccatgaaatttctcggaaacagctgcgacacggcgggttcatcttgggaggaaggaagagaagcgaaaaccgggtggctctggagaggaacccacctaaccggctctttgggcgtcggagatcgtcgtgaatctggtgcatcctctgtctcgttaaagttaaatttcatactttcttcactcgagtgtatctgttttcgtcggaaggagatgcagacacagacaccagattcacggcgggaagagaagggagaaaagaagcgatgaagcagatacagttgaaacgacttcgtattgacgtttaatgggcttttattcggcccattaactatcttcgaaacaaattgaaatgaagaagcactaactggttttaatatataaaattaaatctgaaccctaaatcatcgtcgccgtgttcttctccgcttccaccgtcgttgtattcgtcttccgcctcctctcccatcggtgcgtttctatctcttccaccaaatggattcatttactcttgggtaaattttagctcttgtttgtctatattcattatctggaattttagaggaatctgtttgtatttttttacatctcgttgaaacagcgcatcaatgtaggattagcatttatcttttcataacttgggatgatcgtgtatgggtctacgggttgtattgatctggtaaaactggttttaaattgggataaacaaattgtgttccttgttcacaagatgattattgtcactgtactgggtttatcacaaggatgaacatgataatgtgagaaccagtattgatataatgtttgcaaatattagagagttccgatttcaatttttgttttcaggaagcagttttaaattattcccatgcatgttgtttgtgtaggagaagagagttttctagttaactctaggttatttttatgtcttaagaggaatgaattacatctctggatgcaggttttgaacagcttggcagaagaagtgaaacttgagagagtaatg

SEQ ID NO: 693 - DNA, 3000 bp, Unknown
  misc_feature (1)..( 3000): cDNA_ID_2106021_gDNA_ID_1620307_Annot_ID_152846 3000 nt of promoter + ATG
cagatccggagtctgaatctgaatctgaaatgggttgctcttgtgacggaggctgtggtggtgatttccaccggaactcggtggtggcggttccggccatattagtcattcttcttcttcatctccttcttaaggacaaagtccagaaatttgggggggaataagaagaagaagaagacacgtgatgctctcgtgagcattgtaatgaccaaattaccggtttaatttggatttaccggcttagttaagacagtttctagcttatccccaaggacttctcgcgttatcttctcgaagttgataagcacgatcacttatctatgattatcctcttttccttttttgcaagagaattaagtcatttaacatttccttaaaatcattccgatttaaaacagattatctaactcgaaaatacagctactcagttttgaacaccctaaatcatccaaagatctcatatacaaaaggatctctaaactcaaatcaaagtcacagcccaaagcataagaaacttgtggtagattcaatctatgaaggcatgttggagctcatggcttgatgtattctcgaatgaagtcttcaatctggatggtttctccggtaagtccagatgcctcagcgacagtgactttgttggagcaatgcgtgaaggagaacacttctccctcaattccaatggtgaagtcattcgctatatcagcagtagagactgcactccttgaagccctcagtttctcactgcaaaaactcatcaaccaatgatgattagcttttatgcaggaagataggctttatatataagaaaattttgtcaagaaaactgaaattcttacatttctttctccatttgcttccggataaactccttggtgtgtgcagtgagtttatcggtcttgttacagcaaaggaggactggaatcttcttcttgacaacattcgcattggtcagaatctcgtataggtacctatcaccataaaaaaccatggcaatgcctcattttcaacattgagatgcaaacatatgcaaacatgtctcttatctgtgtcttacaatgcgtgtgtgtggaagagagagggtgtttgaaattactctgaagctgcacgacagtttgggaggaactccaaggcatccactacgaacacaatggcagctgcttggggcaagaattcttctagcttgggtcgaagccgagagtgcccaggaacatcaacaagatgaacaggcttgatttttcctttctgtcacaaagagcaagcacgggacatggtttagtaatatgttattccatccatcacaatcaactgcacgtgttgtttacaacagaacacagtaagattctttaccttagtattttcactgtgaagaacaaaagtgccttcatttggttccattgatgttacagtgccctgatgcgacgatccatctcggagctgccaatcaaacaattatcgtgttataactctccaacaatgacctagtcactcacactgactcacaatagtgacacattacaaaaaaaaagtacatttgaaggaaagtcataaacaatattcatatgaaaaaggtaacgtcaagccaaaacactcacttggtaaaagagcacagtctttccacttccggtcagcccagaaaggagtacagtgttggatttggtacgtctgaccaggcgaactgcataccccagcaagaacaacaagtttagcaacaaaagatcaaaagtttgtttatgtataatcaaagaaaaatcatgaataaacctcagaaattgcaataatagttctaattccaatacacaaaatactctggcttaatcacaagtctaaaatggtaccatgagaactataacctctgcagttgtaaacaatagcaggcagaagaaaagtaattgaagacatttagaagaagaacaggctatatgtccttatcaatggcaaacaagatactaccagggggagatcttacataaataaagcaattctactaggaaaggattaagaaacaacaaagtggtgtctaatacatactggataggaagagcaagatggttgtaaacaacaaaacaccaatggcggcatacagctgattcggtggtatcttctgaagatattcaattccttgatgcgaccactgctcagccagaattttcagatcttccaagttctccattactctctcaagtttcacttcttctgccaagctgttcaaaacctgcatccagagatgtaattcattcctcttaagacataaaaataacctagagttaactagaaaactctcttctcctacacaaacaacatgcatgggaataatttaaaactgcttcctgaaaacaaaaattgaaatcggaactctctaatatttgcaaacattatatcaatactggttctcacattatcatgttcatccttgtgataaacccagtacagtgacaataatcatcttgtgaacaaggaacacaatttgtttatcccaatttaaaaccagttttaccagatcaatacaacccgtagacccatacacgatcatcccaagttatgaaaagataaatgctaatcctacattgatgcgctgtttcaacgagatgtaaaaaaatacaaacagattcctctaaaattccagataatgaatatagacaaacaagagctaaaatttacccaagagtaaatgaatccatttggtggaagagatagaaacgcaccgatgggagaggaggcggaagacgaatacaacgacggtggaagcggagaagaacacggcgacgatgatttagggttcagatttaattttatatattaaaaccagttagtgcttcttcatttcaatttgtttcgaagatagttaatgggccgaataaaagcccattaaacgtcaatacgaagtcgtttcaactgtatctgcttcatcgcttcttttctcccttctcttcccgccgtgaatctggtgtctgtgtctgcatctccttccgacgaaaacagatacactcgagtgaagaaagt

SEQ ID NO: 694 - DNA, 3000 bp, Unknown
  misc_feature (1)..( 3000): cDNA_ID_2121700_gDNA_ID_1620307_Annot_ID_152841 3000 nt of promoter + ATG
tcatagaattgtggatttgattgatgaactacttgtatgtatgtagggaggtgatagaaaagatgtgtttttttaccaagcggatgaccaacactatataccaagagctctcctcattgatttggagcctagagttatcaatggtattcagaatggtgaataccggaatctctacaatcatgaaaatatcttcctttctgaccatggcggtggtgctggtaataactgggccagtggatatcaccaagggaaaggtgttgaagaggaaatcatggacatgattgatcgtgaagctgatggaagtgacagtctggagggttttgttctttgccactctattgctggaggcactggctcaggtattttactttttattgccaatccctatcttcgtttagcttatgtttattcactgaatgacttttttttatgtattttcacatgaaggaatgggatcttatttgttggagactttgaatgatcgttatagcaagaagttggttcagacatacagtgtatttcccaatcagatggaaacgagtgacgttgttgtccagccctacaactcactgttgacgctgaagcggcttacgttaaatgctgattgtgttgttgttcttgacaacactgcattgaacagaattgctgtggagcgtctacatttgactaatcctacttttgctcagaccaattctttggtgtcaactgtgatgtctgctagcacaacaacgttgcgttatcctggatacatgaataatgacttggttggcttgcttgcatctttgatcccaactccaaggtgtcacttcctcatgactggatatacaccgttgactgttgagcgccaggttagatatctcaatcagttttataactaatatcatcaaaccatttttatgggaagctgctgttatctggaacatgacttctgaatgttatgattgacattttcattgatttcctactctcttatgtgaattgttcttggcaggcaaatgttattcgtaaaactactgtgctggatgttatgaggagacttctacaggtgagctgtttgctttctccagtcttttttcgaaaattgaattagattttcttctaacatgattgtattcgcagacaaaaaatatcatggtttcgtcttatgctagaaacaaagaagctagtcaggcaaagtacatatcaatattgaatataattcaaggagaagtcgatcccactcaggtacttttatgtactaatttttttgttcgatatattgaggatgaatcggtaattctttcttgttgatgttatctgctctgttgtctcactacttgatattaggtgcatgagagtttgcagaggatacgagaaagaaagcttgtcaatttcatagactggggaccagcaagcatacaggttctaaccgaattgcgtcgtcaaattaattattgcttttggatttaccatggacttgcatcacaattttttccatatcttactctcaacaggttgctctttccaagaagtccccgtatgttcaaacttcccatagggtaatcttatatcactctatatatatctgtcatgcactcatgctgagagttggtactccttacagttaatgtctaaggctgcagttcctgctttagtagatacatcgaagactcttaagtttggtggtgtatttgatatttcaggtcagtggtcttatgttagcaagccacactagtatcaggcaccttttcagcagatgtttgagccaatatgacaaattgaggaagaagcaagcttttcttgacaattaccgaaagtttccaatgtttgctgtaagttgactgctcaaatatatcggctgatgtttagtgcaacccaccctattattagcattgacagttaatgttgaaatcatgagaatctacatgttgatatggacaggacaatgatctttcagagtttgatgaatcaagggacataattgagagtttggtagacgaatataaggcctgtgagtctccagattacatcaaatggggaatggaggtatataagctaagcttttgccatctatagtcacacactaaaggaagaacttataatgattatcgaatatatgtgactctctcaggaccctggacagcttatgactggtgaaggcaatgcttcaggagttgcggatcctaagttagcgttctgaacaaaaaataaaaactcaagagtaagtcatatgatgtttcacttttaactgagattttcaggtcatgataggttttctttggtaggatcagtagtagtaacgataaagagtgttggcattgtaaaccttgaatagtattatgatgtggatgagtttcaatctatgagatgaatgtgttttttttgggtactttctaagattaagagcacctaaaagttgcatagcaggaatcttgaattgtattagtaacatatattcttggaatcctatgcatattgaagttacaccaatgtaacatcgtggacccctcctaccttaaagtttgtagctgcgagaaaacaggttgttctaatagtgcagcaacaaaaacaacctcgttttaaccttgagatgcatgcttattaggtgagtgagtgctaaaatataaaagattttcttttgggtcggcaatacaggaatttattcattgatggattttatctaatagggtttttaaaaaatattaaagaaaaaagaaggttttatcgttatctaacatctcttatgaatttattatcctacataagttgtcaataagaagccttgtttcctttttctttctgtatttcaatataagataaatttctgaaacctggaacaacaacatctgcgattgtttctgggtattcattcttttcacaaagtgtaaagctttaattttcgatttcgcggagctcaaagtttcaaacttttccatgtttcttgtttcttctagctctgttctgtgtacgtcgaagcaacttccctagcactttctcaattattttaagttccaattctcg

SEQ ID NO: 695 - DNA, 3000 bp, Unknown
  misc_feature (1)..( 3000): cDNA_ID_2121786_gDNA_ID_1620308_Annot_ID_152876 3000 nt of promoter + ATG
attaagccatgtatttaagtaccttttagtgaataactgttgatgtttgagcttctggggaagaaaaatacagaaagctccatggggcatgttgggggatggattgcacccctcattttagctcggcccaaatcaagaataaactaatcaacatcaagcccaaaaagcccataaaagttggtccattatcctatcaccagcttagtttttctataaatagagaggcatctcaaggaaaaaaggaggaagaaatccatattaaaacgtcttcaagctcctcagctcgttctctagctcctctgctcgtcctcaagcttatcagctcgtcctcaagctcctcagctcgtccttaagctcagctcgttctcaagctcctctgctcgtcctcaagcttttcagcttgtcctaaagctcctcagctcgtcctcgagctcctcaagctcctcagctcgtctttaagctatccagctcgtctttaagttcttcagctcgtcttcaagctctacatcactcaacgaccatctcctcgcctagctgtcagctcgtccaattctcacctagtcgtcagctcgtccctcaagtgcacaactcatctatctcctcgcctagctgccagttcgtccattgactacacagtccgcctatctcgtctgccagctcgtctagactttcaccagaactcgatttgtccgactcgtctctctactacatttcgtctagcttggcccctggctaccagctcgtcactcaaatactcagttcgtctaactcgttgtctatcaaccagttcgcctcgtaactaagttcgtccagctcttcgcctacctgccagctcgtcacacatctgctagctcgtcgcctagctgccagctcgtcaccaacctgccacctcatctctaaactgcctatctcaatatacgacctacctccaacgatgacctagctcacttattataatatgaactacgtatggcttgatcccttttctaagggtacgtagacaaccttttacaaggtgcagctataaaactaataaactcttatgtttatcgcaagaacgacctaactcccgaccttcaacgcgatgagaatgtttttcccttatcaaagaacttacaaatatactttgttgaaattcgttcatcaacagggcagtgactgaaacactctttttctctttcgtcgtcctctgaattgcgtcgatcgaataggagaaaatgaaatcaagggtttgcagttttaactgggttttcttaggtcctttcggttcataggttttttactaaatcttggcccgatacacatcactaagtctatttggttctttggctcatgggctttttgaccaaatcgtggccccataaacatcactaaatctatttcacgtatagaaaaaaatgtgaaggcgagtaaaaacatgtgggctccacattaaaaagatgtagtgacgtggacacttttagaggagagaaaactctgctattatatatatgatttaatcttcttggttgaagaggccatggtggcatggtccatgtatatttttgtttcaaaagtaatcatcttgaccttgtaaacaagatgtaccttcttcacttcacattctgaatctagacgaatacagatgtctatttaattagtaaaactaaaatctagagttttgtgttcatgtagaaattatttataaaatcaaatataaataaatggaccgacaacatgtaagaatatgttagtggatagagatctcaatagccatagatttctgataccattctctttttaaagatatgggatgttttgactatcggaattgaagataaacctgctagggttggtaagtgataaaagatgtagttgttcttgtggggttatcttatcttctaaccatttttcttgttttattcatacggttagtacagtcgatcaatatctcacctaacgagttccaaattttaatctcaaacacttagattcactcattcaccaatattattgctagaaacaaatttgttctcttcttgaacaggaatgatcacacgtctgcgtatgataagaacgtcgaggaagaattgcaaccgagtcaagtgcctgatgaaatgataaagcctgactctgacaaatattggtctcctcatccccaaaccggtgtctttggaccttcctcctcctcgaccaacgcaaaggacgaatttcgcggcggtcaggaggactcagtgatggaggagaaagcctggttccgtccaacaagtctcgaagatttggacaagactcaccattcgtagcaaacaaactcttccttttatttgtgttttccaaataaaatttgaagtaaaactgttatgcaatgtttcgaaacgaactaacttttggtgttatgatgtgtgaatgtatcacttgttgcagtttgaaaaattacttctggttcatatattaactaaactaataaagagaaaggtaggataaataataaattgaactttcgatcataatactaaacaagttatattgcaatgtgattactccctacacaacgtatggcccataacaccttatctgggctgtattgtttatatggcccataactatacttttatgtttactcaaatatggcccataactttataaaaacactattaaaatcctatgatttgaattaaaaattcctaaaatgctcttgaaatactgtaattttcttattccggtgtcctttttcggaatatttcttcctttttttggcagatacatgacaaggtggagagtgtaagagaaactaattaaaatattaatttcccaaaaaattcaaaatttaaaagctccgctccaacaacggtcacacttgcaatcttagggattcaatggcttcccttggaaacgagatataaataccctatttgctctcatctttacactcatagcaaaaaacatcttgttttctctgccaatctcaatttctctcccaaccagaaaattctctcactctctctcgatttcgcggaaatg

SEQ ID NO: 696 - DNA, 3000 bp, Unknown
  misc_feature (1)..( 3000): cDNA_ID_2121839_gDNA_ID_1620308_Annot_ID_152891 3000 nt of promoter + ATG
acatggttgagtatattagtaaacaataacatttgaatacaaaatatcgattcaaattgagtttctctatatatggtttttatttgttttattctgtcccctgtaaaatatgttatctctcaagattaaaccctaaggtacaaagtgtagactatcataaaagtgtggtggtccatgagaggttaacgaaaagtatttgaggatttgaccagagggaatcctacaattgcgtatgctctaatcaatactactatagtattatggctatattgttatataatatattcagaaaaatcatatacttccaatccaagttgaattgacaaaaactaatccaaacgttgaattgattcattttaattgttaaaattttgatttcttgatatatacgaaaaagtcaaagctagtaccaaaaaaaaaacacatggtatcacaaaactctttgttatttaaagggatttctaaatattagttaaaatcctcatgattagtgaattctagaaatatttcaaaattttgcttcgattttcaaatcaatcaaaatatgcaaaccaatataaatgtatacatataattttggtaaaagtgttctatattatagttgtcctgttattgtgatatatattctttttcttttcttcactctatctttcgaacctatacgttcaaaacctattcagcgcttagaccataaaagggtctcattccaaatatatatatatactgatagattgatttatggttaactaaataattcttacctggcaagtcccatggttcgcacttgtagaggtctacttcagggataatctctagctcgatctcttggccgttgatctttctcttgagatagtaagtgattagttcttcgtccgttggatggaacctaaaacctggaggcaacgagaccggagccatgtatatactcttcaacaatattgaaacctctctatcaatttaatatcggattatataacaaaaaacttaacgaacggtcttgtttacgagataaactccaacaagaccgatcgtttttgtttatataaatagttttataagtatggttgggtagtagagagaaggagaatgatgatacgaaaacctcgagagaaagaaggaaacagagagaagacaaatgttttgtgttttcagggcttgaagggtatagggttataaataaagaagagaaagacagaatttcatataaaaatagtggcaggaaagtgaaagggatgatgccaccctcaaataatatatggaacttataatataaaagttataaaaagtatggctatacccaatttgtctctcgtaattttgtttcttccttacacatattctgattcttactgtcgttttcttcaagattcataggtaggttaatgcaaaaccgtgtttcttcatcaaagtggtcgcctcaaataatcacattcttctccaagtatggtcggtttggaatgtatccacgtggcggaacatcattggcttcatggggggaacgaatcttggtttaaccaatagaaactggtttcaaatctttgtctggcggcgcttctaactgaataaaactgtctcctttgtatcgtatccccacttgcgagaatcctttagttccttcgtgattgccgctgatcaatatgccatcatctcaattatttcttatatctaatctcttttctgaaataaaaatattatacttcattttgtatcatcttcattgtgtcgtcacaagtggctcgagtatgatcgtttgattggtcattagtgttagtttgttcatcttcccccatatatatctgatcttgtgttcataagttatgtctcgggagtatgttttaataccgcccaaaactatattataaccttttttcagtgtaaaaatatgaatcacttaaacgaggagtcgaggatgagagacaagctcgctcgttcacgagcatgtggctctagatggatatgaaacacatgatatagtgacgcaaacacaaacacaaacacgagcacaaacgcacacattaattagattcatatgcaagttcatacatagataaattaaaggcatagatatataaaaccaaaatttgtttaaaggtatagagatgaagaataaaggtccacatggtagatcatgtgggtccagcttgtaagcatgtgaagaaatccttggaggcatagatgggccaaccccagcatcacttctcagcttttctcatcatcatcatacacttttctgtcattatgcaaattccatattctagatctatatctaattaatcacacatataataagcattagcatatataacacatgtatataacaaattgtacatacccttctttacacttttccctcacatgaatccatctttttgttctttacttttatttatttctctttcacacacatctataagttaatgtactccaaatatctttaccaaataaatgtatcttaaattcccaagttgagaacatgaactatttgaatatagtttcaaagaaagtatttagaaaaaatatataatatgtaagacaaaaacccaaacttctgtctctttgtttatgctaagctaatttaaatttttaaagtgttattaacatttcagagtctagtgcatgtttattttctcctagaaaagatgagtgacaaaaataccaaaagagaaaggtacatctgtaaaattgataaagagttaagaaggaaaaaatgtttaaatcataaacttaatcgcatacacaacttagcttcaataaatttttgaaaattgtcaaaactcaaaaatggggagaagaggttaaacttggtttaaccggttcgttcattatacttccgggttagcattttgagcggttcttttccggtaaccaaaccggatagacattcgagttattgttcaaccggtttcaccgtcaaacgacgtcgttgtcacagtactgtccctcacaaaaacctcacaaaacctctctttcgttctcgtctcctccagaaccagtacaacc

SEQ ID NO: 697 - DNA, 3000 bp, Unknown
  misc_feature (1)..( 3000): cDNA_ID_2121851_gDNA_ID_1620308_Annot_ID_152894 3000 nt of promoter + ATG
gagattatataaactttggcttaaaaataaatggatggtggtgaagaaaagggaaaatatcacaatggttgtcacgtgtcacttcacacaatccagtagaccagtacctaacatccagcaccaccaagcctaaccataaactcctcaaatgacctaaaaggtttttttaacacttcgtttcgacacctgaattgttatctgttattttatctttttcacgtcttacgcctcctaaatcctaatcgcttaaatattttttgaacatgttctcatctgtttttaaaaaatttggattttcttttcactaatgattgttacattagataaatgtgatttccactacaggtttggattttattgcattagaaaatatggtaataacaaatatttttataagagatgacaaaaacaaatactctaagtagacaacagccacacaccaaccactttctgatatttgaaaccctaagtaaagaacgagaaggaattcttgtggctgagaaattttgttgtattatcagtgaacgtgaataaaatgaataagaaacaaataaaaagaaaactagtggctagaaccctccttctcgtcattccacatgtcaagtttctgtagaacagacggctaaaataagaatcagtgacatggagaaaagtgcactgacattcactaattattagtattagtactatattataaattaaagtgtaattactttcacttccaccgaggatgacttttacaatttgaggagtatattaaattatgtgcttaacaatgatttcaataaaatatctacacatttgtgaaaattgatgacgacctggacgatggataatcatattaattcgagaaagttgaaactaattataaatatcatagatagattcgtatctgtatatattatattatatggtatgtatacgtagacttacgttatggatagacccccaccatgtttttatatagaggcagaagatatttaacttatggttttcgttttttcgtaaaatatgaaacaaagacaacgacaaaacgaaaaagaaccaaaaatagtatctcattctactttcacttgattttggaatttcatttatttagattgtgattcaaaaccatttcaactatgtaaaattctgtgcaatatttttcccaactaaacatataagtttgacatgaaaaagaatataggaaaatttagaggtccaaattttatatgtatatcggaatcatggtaggatacgttatcaattgcatttgtatgaggcttgctattgctagtatagaagcatcatcaacaaatcttaatatcagtccaaatttgaataacccattttgtggatctcatttcataaaataaaccattttagtgtcctgcaaaaatgtgtttagacagaaatcttttttaaaatctgaatttagatattatgatggttataatttatatataaatttactatcaaatattgtgttcatatatggaagaatggagaaaaaagagtagaaccccacaaaataaaaaatggatagactatgttttctaagattggacaaagtgtataataaaatcttctgatctggtccaaaaataaaatgttaagagttttcgaattcgaataatttgattttgattaagatatccacttcggatatgttttcatatgtagctttttaaaataccctaataaatattttcataaagagtttatgtaaataaatcaaaatatatttttaactttttatttattatagttttatatattactgttttaattattttgaagtatttttgatagatatggatttggatggttccgcaaacaaatcctatggatccggatccaaagaaccaatcataaattttggaatatgtccacccatatatggatcaatagagatatagttaagaaaagaaaatgaatttatcccgcaaatttacatttttatctcatgtagtggaaccaatgaaaagcgagtaagctaagaagtcatactctcgagagtacgcctttccatattttcctttaaaagtatcttctggtggctcacatttctccgtccagcaaaatcttttttgttacataaatattatatttcctgatattttatattaaaagattatccaattgaaatgatgtcaaaaaaggaaaggaaaagtaggggaattaaataaatacatacagtgataatcgaagtaccaaatctaactgttttaaaacaagtagattcattttaaaaaattaaatatttgatttttcaaagagataaatgaataaatctagtacaaattttgttgcaaaaaaagaagatgaagaatatgagaaagagcgacacgtggcaaagatggacattgaacgtgagccacaagattttccatctgtttctcgagcgttccatggaaaaccaataagaattattatttttattttttaaaaattgggaaaaagcgcacatagcagaagctgacgtggcatcaccctcctttttgtcttccctattttctcacccccctaattcccttcttcctccttcacagaccccaaactcttctcttcttcttctttctctctgttttcttcttcttccgccgaatcagaaagcttgtctttttctttactccggctaccaaaacttctcggagtttctctgagagtttcatttccgaccttcttcttatccttatttgcggcaagatttccagcgagagtttttttctcttttcctttatcgaacataagaaatctctggtttgctggaagttttttttccggaaggtggaagcttagattggttctgatttcagaagcaaatcgtttgttgttgcctaagtaaaccgaatcaatttatgggatctatagaaacagacggagaacagaggaaattaagctgattttttcaagtctagattcgcgaatttatcttggtgtttccttttctgtgttccacacctttcgagtttttttttgttttcctccgccgagatcttaatccgggaagttatg

SEQ ID NO: 698 - DNA, 3000 bp, Unknown
  misc_feature (1)..( 3000): cDNA_ID_2121867_gDNA_ID_1620308_Annot_ID_152899 3000 nt of promoter + ATG
ttccttttctaattacttgataaactttaatctaaatttattgtggtgtcattttatcaacctcacaaactaaaagctaaactacatctctttgtaaaatagttcacatatgtcactattacattaattttacttttttatgaaaaacataattataagatcaaatcttatacctaatattcttatcacctctgtttgatcctaggtgaaacaaaaaaaaggtgaatcatctgatcatttatattgtaagaacaaaatttttttgcatatatgattcgagctagtttgtaacaaaaaaagcgctcaaatatgttgttggatgttgaagaggagaatccaatatatatgagaagtaatttttaaaagatcaagatatgtgttttcacatttcacaagctttcttaaaatattatagaccaaaataacagttgtttttttacattattacatgtttgcaatttcaaaaattaatctcacttacttatttgaaaatggaacaaaacctctataaattaatattctatctcataaattagtaacttctataattttaataaattctttctgttccaagttgggaccagtgtaaaaatgacataaatcgataaaataatattttttttcaaaatcatatataaacatatggtctctacaatataaataattaataattgtataaagttatcaataaatatattaagtgaaatataactctagtatttttatatattgtattaattcttggtagagtttatttctaatatttttactacattgaaaaggtttgcactatgttttaaacttaataattgtttttctacttgtaattgatttttgaaagatattaattataaaggaaataactgtgtttgagagagtatatatatattatatgataggattaagaaggatgttttatcttcattggtcaagatggaaaaaatagttaacatgatctctcatcttgaattatgtaataagtctatgcatttactgatccatttgaaatagcagaatatgaaatcaaattaattttattgagatggaagctaatgaactattaaatatgaagaatttgaaatcctttaccttttgcttatgtgatattaccaagctatgatgtgagtttgtatgtgatatcatgttttatatgtaatatttcgaaaacaaatatataaacaaataaagagaagcaaatgaaacaaaactttggcttttttatatatcatttgtcatttatcatttacaaacctaaaagtcaaagataaaccaaaggataccctgatttgttaatgttatgatatttgagcaaaactgtggagtataatatattataactcattgaatataaccacatagtcataacaaatcaaaataaaataaaagtttccaaaacgtagtcataacaaataacaaaattatttaaaggttttcaatttttacaagataaagtatattaaaaatgataaaatagaataatatgtaactttgttaacatcttggaaaaaatagaaaatttaatatgaagttgtgtctacgaattctatttatgttctagttattgtacatattcaaattaacgatgctaaatcattcttctgatattgagttgtgtcacatgttaagtatatttattttaattttcttagtatcataatgttttctttcttgtatgattaggtgcacatggaatatatgtcatactattttaaaattcatattttattaattcttttgtcatagctagccatcatatataggtagaccagtatataatagaaaaaaagaacacattcaaatgattttgatttcttctaacactagattaatcttaacttcacctttttttttgtcacagttaacatcttatataacttcatttcaaatgtctatattttttaatgtctacataaatatacatttcatcacacgatttacaatatgaatacatgtttataagcttttagatcatggaatataaaatagtgcactttttaattatgtcgatatagtctttgatttttaaaaaattaaagatgaaaaattagaaaattatgtgatgcattaggactcaataatagagactatacataataacaattgcagttagttcttagttggatataataggtcagtaaaatatattattacaaacatcaactctgcactacgcaagatgtagtaaattacgaaaatatatgataaacaaattcgcatactacattatgactacaatagccaccttccctatacattatgacttctaacattgaaaaaatttgcaaacatttggtgtaaattaacaaattaaaaacatttggtctaatgtatgaagaaaaaactagatattccgctaatttaaacaaacatttggccttataagaaattttaggtaagaaaaaattctgagaagtcttttttattcacatcacatagtcaatattcaattcaatgcatataaatttcatgtaaagcttcttttttcctcggatcccattcattattttacttaccattgaatactttcaccgtgtagtctttttttagaaatcgttgaatatcaaaaacaagaagaagaaaaagaaaccgtgttttcaatgtgctgtcatacgattcatgaccctttatgaatctaatacagagtttgaaacataaactaaacttggaagtttgccaaaaaaaaaaaaaaaaaaaaaacttggaaataacacttctcaaaaagatattgggtcaaagtctaaaactgaaaacgaaactagaggcattattctctaattcaaacaaagtttagggcttgggaagaaatattcacaaaaaggaagtttccgaaaattcttttatattattccccaagcaaaccattcaatatcattgattattgatataaaacccatataaaggtgtctctcatcatcctccattcccatacatcactttcctcgatctcactttctctctcttatcatcatctcctggtattctctctctctcatctccgtg

SEQ ID NO: 699 - DNA, 3000 bp, Unknown
  misc_feature (1)..( 3000): cDNA_ID_3058405_gDNA_ID_1620308_Annot_ID_152896 3000 nt of promoter + ATG
tcggaaagttattcacatctatattaataaattctattacaatttcaataactttggcattaactatatgattggtttttttttttgttttcttatatagccttcaattagggatattaatactaagctaatgatactccaagatagcttcaaagatgcattgggaggaatggtggcctacgctccaatggatctaaacaccgcctgcgctgccatttcaggcgatatcgatcctaccaccattccaatcctcccttccggttttatgatctcccgtgacggccgtccttccgagggcgaagccgagggtggcagctatacactcctcaccgtggctttccagatccttgtctccggtccgagttactctcctgataccaacctggaagtttctgccaccacagtcaataccttgattagctccaccgttcaaaggatcaaagccatgctcaagtgcgaatgatggtcagtgagagtcgtttgatgaagttaccagttcccaactctcaactctttggttttttatctttctttctttttcaaataagtgagaagagctttctccgtttgattctctaaggagagtcctagtacttttccatatttttcgttggttttaaaacttattccaataaatttctaaggtaagggccttagctgaacaatatttatgttgttgccttttggcatgtttgttttctgacattggtgttggatttataagatattattgcttaatttctgtttttatataatatttttgatattttctgttttatgaaattgatctagttagagaataaatgtagctttcatgcatgtttgtaagtgatacatcaaaatatcttgagataagttgccaactagacacttttatcacaaataatttgtaaactagatagtttttttagatattagaggaataggtacttttctcttcttctctaatagagctcctctctaatatagagattttggtaatagacaaatatatccttttgttgttttgttatgtaaacatataaaaacaaaagacatatgagtgtgatattaaatgggctagcccaataatttttttatcttctaattactaatatatttcttaatttaaaaaatacacatcaataaaattctttcaatcactttatacattttaaaatactaatctttttaagtattttaaagattttaattttgttatattttgcggatatgtattatttttaacattttactatactaacattttcaatttttaatacatattaaaatactaattttgttatatttagctaaaataagtttactaaaatactaaaattttatttttattatattttgcgggtatgtaatattagttttaaaatactaacatcattaatatttttatatattttgaaatactaaattttatacatctctaaagattttaattttattatattttacggttacgtaatattctatcttgttttatctgaattcgatggtgtacaaaataatattaaaaatagtgtacaacaataattttaaagataaaacaacgatagtgtacataaaataataaaatagtagatgacgccatttataactctttagatcgtctatcgtacaccttcaaaaatattgtacaccgaatctatgagatagagaattatttggtgtacttgaaagtttatgagatagtgtacagacatcagtgtacaaaatgatgtacactagtatattgaagtaataggttatatattcaaaaatattatacaccatatctataaaatagagaattatttggtgtatttgaaggtttatgagatagtgtacaaattcagtgtacgaaatgatgtacaccagtaaattgaaataatggtttatatatttcctattagtataccccaaatgttgtacgttatgtctaccaatctcacaagctatcatttaaaattgtgtacatcattctgtcattattctcgtatatcataatattgtacaccaacatgtacaccattaaatttaattatattaaatcatttaaaaattgtgtacaccatcccgtcaccaatatcatgattttaatggtacaccattccgtattcatttaaaaattgtgtacaccatagaattttcctaaatttcgttttaatcgacaaaaatgatataatgttaagtttaaccgtctgaagaaatagattgaaaaacgaaaacgattggaattttttttgggccaaataacataagtcaaattaattaggctatgaaaatagtatttgacccattatctctaaaagatttgggcctacaccaaaagttctttcttacaaaacaaaagggtacaattgtatttaacatttattttgtttttttagttatgtaccttctatctcacatattttctatcccacaaaagaaaaaaaaatacctatttctctaatatctaaaagaactacctacttctcaaataacttttgaaaaagtgtctagtttgccaataaacccaaatatcttttctcgcacgagaaaactgcaccatcgaaaatggatagctaagcttacctacaagacgtggtactcgtttttccaccatcatatgatgatataataactggactagggtgtcttcgatcggttatgttgaaattgtagttaaaactggtttttagcgggtatacaattcgggtttttatcggtttagtttaaattcagtttacatttttcattagaaaaatcgattcacatggttaaaatactaaaccgaacggtacagtagtaaagtttgcatgcgattgcgcgagagggtgtgacagatatctgaattttctttcaattggtaaagagaagacaacggacatatttttggtaaccatccatttgtcaccactaactttcttccactataaataccccaccgctttaactctagaacactctccatttttcaatattgctcaaatctcaatctttctctcctgcgttttaatttctctcggattgaaatcatccatg

SEQ ID NO: 700 - DNA, 3000 bp, Unknown
  misc_feature (1)..( 3000): cDNA_ID_2121847_gDNA_ID_1620308_Annot_ID_152893 3000 nt of promoter + ATG
ctccggctaccaaaacttctcggagtttctctgagagtttcatttccgaccttcttcttatccttatttgcggcaagatttccagcgagagtttttttctcttttcctttatcgaacataagaaatctctggtttgctggaagttttttttccggaaggtggaagcttagattggttctgatttcagaagcaaatcgtttgttgttgcctaagtaaaccgaatcaatttatgggatctatagaaacagacggagaacagaggaaattaagctgattttttcaagtctagattcgcgaatttatcttggtgtttccttttctgtgttccacacctttcgagtttttttttgttttcctccgccgagatcttaatccgggaagttatggcgtcgtctccgttgactgcaaatgttcaggtctggtctcaaaatttgatttttatccactttttttgttttgtttctgctttattcaggtctggtctcaaatgaatctatgagtttaaaatactgtatacggacatttaagtaataaagcttagagttaaagcaagttcgttgcaattcatttgcagactcttgtttcttttgagctataagttctctctagatttgtgtgttgcaactacattcatttgaatccttgagatggaatcgactgtgttggaattttgtgattaggatatgtaaatcgagtttaattagttggactttgtgaatgaatgttcattgagaaactgaagaagaaagtaaataatccaatgccactttgtgtcatagtccttaaaatgatgtttcctaaagtcgttttgcttgatgatggctttagggtaccaacgcttctttgaggaatagagatgaagaaactgcagacaagcagatacaattcaatgaccaaagttttgggggaaatgactatgcacccaaggtttgtttcttttaacatcaaatgtcaaatattgttatgtaaagtgaagatctgtggctcagttcatcttttcttacttaggtacggaagccatacacgataacaaaagagagagagagatggacagatgaagagcacaagaagtttgttgaagccttgaaattatacgggcgagcttggagacgaatagaaggtaaattaatgatttagtaatatctcttgctactgagttatggccttacctggaccctcaaaaatatatgtttgtttcactaacagaacatgtgggctcaaagaccgcagttcagattcgaagccatgctcagaagtttttctctaaggtttatacacttatttgctattatatctttacccttgttcaaagaaagtatcagtctaatctctgtagcaaacctaagttctgcataaataaggaatcattatacatacattgtttggagacttgtgttctgacttggctttgttctgttgtattcacacaggttgctcgagaagcaactggaggtgatgggagctcagtagagccgattgtaatacctcctcctcgtcccaagagaaagccagcgcatccgtaccctcgtaagtttgggaacgaggcagatcaaacaagtagatcggtttctccctcagaacgtgatactcaatctccaacctctgtgttgtccactgttggatcagaagcattgtgttcccttgattcgagttcacccaatcgaagcttgtccccagtttcttctgcatcaccaccagctgctcttacaaccactgcaaatgcacctgaagagcttgagactctggtacttgacataaacaaaaccgaatttatacttaacagcaatacctgctgttagatgcttaatgcttaatattcttggtttaatcaatttgtacagaagctggagttgtttcctagtgagagactcttaaacagggagagctcgatcaaggaaccaacgaagcaaagtcttaaactctttgggaagacagttttggtatctgattcaggcatgtcctcttctctaacaacttcaacatattgtaaatccccaattcagccattaccacggaaactctcatcatccaagacactacccataataagaaactcacaagaagaactcttgagctgctggatacaagtccctcttaagcaagaagatgtggaaaatagatgtttggattcaggaaaggctgtccaaaacgaaggatcatcgactggatcaaacactggttcggtggatgatacgggacacacggaaaagaccacagaacccgaaacaatgctatgtcaatgggagtttaaaccaagtgagaggtctgcattttctgagctcagaagaacaaactccgagtcaaattcaagaggatttggtccatacaagaagagaaagatggtaacagaagaagaagagcatgagattcatctccacttataacacattttcttacgtaccctaaagaagagactttaaatttactattcattcgactttctaagttttcatcaatgtaatttttgttgttgtttcattgttttctcttgaggtgtttgttctctaggctaaaattttctgcaaaagtttgtaactgtaaaactcgtgtacaatttatacagttaaatctaatgattatgagatctttcttaattgatggttcaacaaaagcaagtttcaggtgtctctcttcaatatctccgattaaattaggtttggtaaagagtttgctttgaaatgaaggcaaagaagaaaaacagtgaggttaccaccaactgaacaagtgtgtgttcaaagttcaaacccaacaaataaccgaaccgattcggaaaccaactctaacctgaaattttgatagaatttgaccagaccaaattagaccggttaacaccctttcacgttagccaccaacagattaagcagtgtctaacgtacgccttattaataccacataaagacgcaagagaagatgacgtcatacagaaacagcgtcgttttgaaagctgagttttttttgtgaagcgagcgagcgtgagaaggtgtgacggggaagagaatg

SEQ ID NO: 701 - DNA, 3000 bp, Unknown
  misc_feature (1)..( 3000): cDNA_ID_2121832_gDNA_ID_1620308_Annot_ID_152889 3000 nt of promoter + ATG
agcttagagccttccaggataaagtcatcttgatgcagaccaaagagcaggaaatatcaagatcattctactataagataagaaaaaacaacaagcttgtgtggacatatctaaagcataatacatttggtttattcctctcaaacattaacgtccaacaaacaccctccgaaacacaaataaagactgggacaacaacaaagctcgaattgatgaaattgaaaaatgcagtagcacgaagagagtacctggagattagaaaacttcccaagcaagtcagaaccgacagacatgagctgaatcttagcccagttctcccactcaactaattccttactctctgacactctaaggggcaacgaacatttcgttgatccttccgttgacctaacagtttaaaaacaatcaaaagcctcaatgagaatttgaatataaccagattccgaaatttgaagaacactggaagttcataaattacgaagaattaaactcggtgacttacccagtcagattgcaacgggtgaaccacaaagcagtagcgattgctaagcacatcaccagaacagcacggcgagccttatcgatttcatctgaagaatcgttcaccacgaacgattcgaccttgtcgagaagctcggagtaaacttgctcggcggaatcaaccgtatcaaccaagtttaactcggaatctccgagtattagcttagtagcgtcggaggatagagctccaagatagtctccagcctcgattgaagacaaaagagacgttataagagagtcgtgtggatgggttccggattgagttccatcgagcggctgggattcgagaggagaacctgtctgtggaaaggatacagtgcaccggaggagacggagctcgtaaccgcgaaggatttcaacttcgccgtcgaccatggttgtactggttctggaggagacgagaacgaaagagaggttttgtgaggtttttgtgagggacagtactgtgacaacgacgtcgtttgacggtgaaaccggttgaacaataactcgaatgtctatccggtttggttaccggaaaagaaccgctcaaaatgctaacccggaagtataatgaacgaaccggttaaaccaagtttaacctcttctccccatttttgagttttgacaattttcaaaaatttattgaagctaagttgtgtatgcgattaagtttatgatttaaacattttttccttcttaactctttatcaattttacagatgtacctttctcttttggtatttttgtcactcatcttttctaggagaaaataaacatgcactagactctgaaatgttaataacactttaaaaatttaaattagcttagcataaacaaagagacagaagtttgggtttttgtcttacatattatatattttttctaaatactttctttgaaactatattcaaatagttcatgttctcaacttgggaatttaagatacatttatttggtaaagatatttggagtacattaacttatagatgtgtgtgaaagagaaataaataaaagtaaagaacaaaaagatggattcatgtgagggaaaagtgtaaagaagggtatgtacaatttgttatatacatgtgttatatatgctaatgcttattatatgtgtgattaattagatatagatctagaatatggaatttgcataatgacagaaaagtgtatgatgatgatgagaaaagctgagaagtgatgctggggttggcccatctatgcctccaaggatttcttcacatgcttacaagctggacccacatgatctaccatgtggacctttattcttcatctctatacctttaaacaaattttggttttatatatctatgcctttaatttatctatgtatgaacttgcatatgaatctaattaatgtgtgcgtttgtgctcgtgtttgtgtttgtgtttgcgtcactatatcatgtgtttcatatccatctagagccacatgctcgtgaacgagcgagcttgtctctcatcctcgactcctcgtttaagtgattcatatttttacactgaaaaaaggttataatatagttttgggcggtattaaaacatactcccgagacataacttatgaacacaagatcagatatatatgggggaagatgaacaaactaacactaatgaccaatcaaacgatcatactcgagccacttgtgacgacacaatgaagatgatacaaaatgaagtataatatttttatttcagaaaagagattagatataagaaataattgagatgatggcatattgatcagcggcaatcacgaaggaactaaaggattctcgcaagtggggatacgatacaaaggagacagttttattcagttagaagcgccgccagacaaagatttgaaaccagtttctattggttaaaccaagattcgttccccccatgaagccaatgatgttccgccacgtggatacattccaaaccgaccatacttggagaagaatgtgattatttgaggcgaccactttgatgaagaaacacggttttgcattaacctacctatgaatcttgaagaaaacgacagtaagaatcagaatatgtgtaaggaagaaacaaaattacgagagacaaattgggtatagccatactttttataacttttatattataagttccatatattatttgagggtggcatcatccctttcactttcctgccactatttttatatgaaattctgtctttctcttctttatttataaccctatacccttcaagccctgaaaacacaaaacatttgtcttctctctgtttccttctttctctcgaggttttcgtatcatcattctccttctctctactacccaaccatacttataaaactatttatataaacaaaaacgatcggtcttgttggagtttatctcgtaaacaagaccgttcgttaagttttttgttatataatccgatattaaattgatagagaggtttcaatattgttgaagagtatatacatg

SEQ ID NO: 702 - DNA, 3000 bp, Unknown
  misc_feature (1)..( 3000): cDNA_ID_2105477_gDNA_ID_1620308_Annot_ID_152884 3000 nt of promoter + ATG
catacttaatgtttcagacaatccacttttgaagcaaataaagacccatgagcatttttgcaggaagaaaacaacttgtgaccaaatgtcgctgaaaccatattcacattgtccatcactatatctgagcatcccaagtctgcatcgcagttcaatgtaatgtcttgatcgcttgcagatgacccacggattctagcgtaacgcacgtcagtcactttcacgcctttcccattaccagacggagtccgttgttttgctgttaaatgacagttctgatagctactagatgacttgcttattcctccgttcgtacctccattgtggtaagtctggtctatgataatagggttctctgaggcaaccatgttgatatcctcgaatgagattttccgagcatatcccgatccgttctacaaaacattcacgccaacaaaaaaaaacagatttagtttgtgaaaatgctgaataagaccaagaactaatgatgtataataaaaaaagaagattaatggacaacctggtatgtcttgattcggacaccgttctgtgtttttgtaaaagtgcagttctttaccctcacttcttcaacagtttcgaaatctccagttactccaagacttcctacgctataatatcaaatccatactataaatgatttagcatgtaccttgctgtatattatatgatgattgtttgtgaatctgtgattttaggaatcacctgataccgtgaccggggccacaaaaaatgccggttatgttgatatgagaggaaccgctattaatggcgatgcagtcatctccagtggcaatcactgagtcatgtatgtggactcctatacagttcgatatgtcaataccatccgtgtttggactatcaccgggtgctgtcatccttaaacccctgacctcgatgttctgtgaacaacttagacctacatggttccgagggctgttcaaatgtcggagattagatatcctaagaccattacagttgttgaagtgcattgcctaagaaaagcaaggaagaaaaagaaacatcattaataactgagaataaatatttgatcgaagttcatatttatggttgtgaggatcttgcaaatggacttacgcaggggcgattattaacgttgccccaccacaaagaaccacgaccgtcgatggtaccacctccggtgacaacaagaccattgatactgtcaaaactaatccatgttgtgtatcttcccgcataccaagtgtaacccggtgccacaagattacctcttatctaatgtaaataaatcaccaaattatttaaacattggttcgagttattgtctactcataagctaaaatcgatcactattgaaatcattcacattagggctggattttccaatataatttgaaacaagagaaagagacaagtatatatataccgataaggagatggtcgaagacttgcatggaccgatgaatgtaagaggcttaagcatgaaggttttcccttgaggcacaagaatctttctattgtgtcctcctttgcatacagcttcccatgctttaagaaaagcctgaaatatattgatacacataacacatacattaaaacaaaggttatacataccactttgatacaaatagtgatgattctataaataaacaccttagtatcatcagtctttccatcgccaatagctccgaaactagtgacacttatgaatccattgcttccaaatccgtttttaacctttagagattcttcttctaagcagaaacataatttgtttatttgaaacaaacataacaagacaaagaacaacgaagatttcatttttggacgactcatatgcttgacgatgagaacgaatttcgatgataatacgttttctatctatatatatctctaaatgtatatataggtttgtataaagaaaggtggttaattgaaagatattgcgtttgattttgtgtttctatggtaagagattatcgctaatcactaattttgtgtgctataacatggaaactaataatggactataattgagatattgaaatctttataactatggaatattcaaacttattgacgtatttaacaaatcgcaaacgatatatttttataccgttttgtttagcgataagagtgaaagtttacttatatgcttgattctttctattgcttacatgcttgattctaggaatgaattaattatggcttatctaaagatagaaaatagattcatcattaacttatgtcataagagagaaagagagacctatgattgaatcatttatatgatgaatatatccaaggcggcactaatcttttttgattcacaagaatctttagattgattaaaccaaaatgtaaatatgacgaaacctcataagaattttatcaaatataagtccatctaatttctttaattagataaatagtaaatttgaaatgaataaagataaataattcatggacgaataaaatacaaatgatagaacaaaattctcattttcattctttatatttttggtcaagaatattgtcattctattcatttttgaattatagtaagaaacagataaaatgtgttcgtcttataaatgatgaaactcttaaataaaataaaatctatgtaaccaataagctattcttatttagttaaatggaggaaactttaaatagattaattttctctaaataatttctttgcatacctcagtagcaaaccggtccggtcggatctgaattgaacaaatcaaaccaaaatcagaaaccaaaccaaaacagagaaaatacattttattgaaacttgaaagtaccattacgcgtggatctatgtaataaggaggagagagtagagtactttgccgactaaaagtgagtgcggtgtttaatgggtttgtcaccaactttccattttcttaccaacgaagaagaagcagaaaaaaagtaaacaaagactaaaaaaaaaaagccagcatcttcggagttggtgggagagagacagag

SEQ ID NO: 703 - DNA, 3000 bp, Unknown
  misc_feature (1)..( 3000): cDNA_ID_3058409_gDNA_ID_1620308_Annot_ID_152888 3000 nt of promoter + ATG
tccacacgagctcgaatataagtggtagctcgagttttgacgtttgttcagatcttgaaataagttcaaacacaccttataataccgctgcccatatccaaccgcgatttggaaacgcaaacgcaattagtgatcatgatgactggtcgcagtacttgtcacaaaacatgcctacaagcttttcagattacggatctccttatggaccatacctcactcaatcaaaggtaatttgttaattaatacagttgattccgtatcatatacagaatcaaatatacatgtatcttaaaatgttgtattattatataggtgaatacagaagtgcaatgtgagatgtttcaacaccaaatgtcattgccaccattgcgagtagaaaactcgcaggctcaaaccagcgatttctccaagagactacatcaaaacagtggtcaaagtgggttcgacgactttactttcgctgcaagtaactccaaccaattctacaacagcaacgttgatgatcatttgatacacattggaaatcttgacgagcaggtaattttatttcatagttaccaatttgatttcgtcatttatattttatatatgctcgaagaccaaatattaattgtctctataatctatatgatgttaacagagttatatagaagaacaagaattgattttgccaagtttccagagtaatgatcaagatcttgaactttatggtgggtatgatataaaactcattataattggaagtttggaaccatataaaatgttgattataatgatctaatcggaaataattgtatatttattacaggcggatctcggaccaatacaatagacaacatagagatcgacgattttttctcgtttgagaaccaagcacaagacaacgacaactcaaacgtaaccccaaactcggcaggattcgaaatgattggagaagagattatagtaaaccataaaatgctcattagtacacggcagactacggagattttatactatcaagtggtaccgtcgcagatattgaaaattcacataaatccggttcatggaaatgaagagagaacaatgttaatggaagaagacagtgatgattcttggttccagaaggctgaaaatgttgcgaagatgaaactgaaacagattagtttagttgcaaaacgttattacaaatgtcttactattattttctgatttatgtatttcattatttattgtcgtatactaacccccttttggaatgaagagaggaaaaatacatatactcaattacttgtatactatatagtttgatttcactgtcattgttaaataagtaatctttgctagttaccaaagcccaccaaaacataaggatccaataagaaattcctaataccacaagtcacgtgaataacacgcgcattagggtttctagaccgacataagcctcaccaccgtacctataaatactcttttgactaaacctcaaaacaccaaaataacaagccgtcgacttctctccgctagatttcttatccttaatatgttcttcataaggtttcctaggttatgttctcattagaaattgtgcgtcaatattactgattaccaccgtacttgtttatgttcgttgtgtatgagctgacgccaaatcgtttccctatatctgttattcgttttgattttcttcggaaaaccctctggggttttcttcaatcagctcgaatttgcagattagggtaaatctgattttgtattagtgttttatagaattgttttaggttttagttcatacacaacattgaactcgttttttttgttcttagaaatcgagatttggattggttaataatggagaatggaggtgatgacaatttccccagatgatcgaatctgattatactgagcgaatagaacttcctcttcggaggaagtcaagccaattagtctgatccttctccttagattattacgattgatttgggtttgtttgttgattttaaaactttcgtggtttttttgaaaagagatatggaggtgatgacaatttccccaaatgatcgaatcagattatactaagcgaattttatttccttctcaacagaggaaatcaagccaatattctgatccttgtctcttttatgtttttttgatgagtttgcctttagataggttcactagattcaattgtgattcgtttttaatttgttgggtcttttttatgattaaactataagattggtattaaggagaatggaggtgatgacaatttccccaaatgatcgaatcagattatactaagcgatttttatttccttctcaacagaggaaatcaagccaatgttctgatccttctcctaaaccttttttaataatagcttcgattatttttctagaataatttgaggttttagatttttttttgttttgggtttattaggtatatgatgatactaaactgagacaaatggatttaagtttggactgatttggatttgatgaattgaaacacatatctacaagctgtattgacaagacgaaacctttgttcatatcataagagatgatagtaatcggatgacgaaatcattcttcatatcataagagacgactgtaatttgattaacttatactgttgaatgctagctaaatcggaatcgtataacttactcagttaatcaaatatcaaaggactgaagcttattttgtagtaaaaattcgccagaataatttacttcaataaccggagtagctaaactaaatttttattatgcaccctccataccggttataacctgtaaaacgaatcgattacctaaatgtctgaaaatataacgcgccattgctaaacaaaacgcaaagcagcaaaaactcgattacacttacaatgataagttatacgacgtcgttttccattcacgtcttcatcaccttcaatagtttattttgccgcggtcagtagcccgtcacggcgaaatctacttatcggaaatacgaccggagaattttgatccggagatg

SEQ ID NO: 704 - DNA, 3000 bp, Unknown
  misc_feature (1)..( 3000): cDNA_ID_2121883_gDNA_ID_1620309_Annot_ID_152907 3000 nt of promoter + ATG
ttagttttcgctgatgtttaaacagaacaaagtcgaagggatgatttggaatcacttggttatgttcttatgtattttctcaaaggaaggttagcgtctacagcttctctacctgagtctgtaaaattctgtatattttcttgaacagagtttaaaccatatgtttttttgggctatcagcttaccttggcagggattaaaagctgggacaaagaagcagaagtatgacagaatcagcgagaaaaaagtgtcaactcctatagaggttaggttacaacaacttgacaaaccgaaaggattttcattttggcattggtaggtaatctagcttttctaactgagcttggaatgtttcgatgtaggtattgtgtaaaaaccaaccgtccgagttcgtttcatactttcattactgccgatctttacggtttgatgacaaacctgattactcttacctcaagaggcttttccgtgacttgtttatccgagaaggttcttatcttaacatcattattccgagaaattttattcgcttactgtttcaagccactctcatcttatctttttcatattgttgaaactcttacaggttatcaattcgattatgtatttgactggacagtcttaaagtatcctcaaatcggatccagctctggttctagttcacgaacaagggtgattattaaaaatcttatacttgtgtttttaccctcatggtttttgagtttctctgtacttacgtaaatgtaaatctttggattttccagcatcatacaacagcgaaacccggattcaacgcagatcctattgaaagacaagagaggatcctaggtaaaattctgcttttcctacttctattaaaaatctcaaaaccatacacatccattcctcactctaatttctactctttttttatttaccattcgtgtaggaaaggaaacaacccgatataaaatcccaggtgcagtggaggcattctccagaagacacccgactacaacttcttcgcctcgagatcgttctagatcaagaaactcagacgacggacctttctctaagcagacagtaaaaatcttactctttacatacattgttgatcagaaccgctaaataagacaaagacctaactgtgtttgttttatttgtgcagcatggagactccgaaagagcaaacagttcctcaagatatagagcatcttcttctaggaaagccgttgctgcttcaagctcccggccaagttctgcaggtggaccaagcgaaagccgaacttcaagtcgtctggtttcctcaagcggtggtggtggcagcggcagtggaaatggccgtccctcaactagccagagagtgcaagctggatatgaatccaagactctgtctttctctcgtgcaacagcggcaagaaacactcgggaagatcaattaagaagcttcgagcttctctctcttcggaaataaaggaaaatgatggagagagagacagcaaactccatgaaaacccaaagaaattacctctgaagaaagatgagaatcttggtttgagggaattcatatatttgaacctgatgaaatcctcagatctttttacatgtaatttcagcttcagcttgcagagatctttttcactcgttttgtttatgtaatcgtgatatgtgttagacaaacataacaatcaaaaatgtagagagagtttccatgtaaaaacggtaaaatttctatccgtatattcgattacttcgaacctatctgtactggtactgtaataaacaaaacaatcaactgctctttggtctcttttaatgcttctgtttttttggggcaggcatactctggtcaaatcatgtaaaaacggtgaaattttggcttaatagtaaaattagctcatctacttagtcaaatcatactttagatgactccaatctaaaactctttatttttattttttccatacttcaaatgtttacttattcactgatcgtatacttgaatggttatagttaaactcttcacattttgttagcgctcatcttcgaataaagtggcaaaactgaatttcatattgaagttacacatataaaatacattcatttttagattcatatgatctactcctacatacttttgcatttcgactaaaaaagcaagtgctccaatacaatttttgagaaatgacaaatattcatcatcattcttcaaaactaggtttacacatgtgaagtcacatttttatgactttaatgaatcagttgcaatcttgatgataacagtcgaaacgtcatgaagtttaacaaccaaacaaacaatttgatcgctaatttctgcgatttattaattgactcgagactcaaataaacatgatcgcaaaaacggataaagaacgctggatttggttgactttttggtcaacgttgaggactaaaagtggaaaacaaaaataccaccaccaccgctagtactactgcgtctgagactgagagagagtattaaaatcaaaattaaatactttttcctttttaattcattttctcatcaataacacaatctccctggaaaaattctctacgacttcctctcgtcgtcgagcttgttattgatcggagagagagatcagtgttctttggatcttccaatttcttccacgtttgtgcttgaattgcagaagaagttttgtataggactctgttttgcttgttgatagaatttgggaatctagggtttatcgaatcgtttattttggttttcgtttagtttctcttcttcgagctggtgtttctcaactagttagagagtttctcgattggtcagagctgcttttattgaattttctttggatttcgtgcttatagatctttgaaaagtctgagaatcctgttttggagttactgcttcaagttattggaagaaattagggtttcgatccaattttagaattgactcaaggaattccgatattggggttttgttgtagttctgattctcagtgaataagatagaagataatcatg

SEQ ID NO: 705 - DNA, 3000 bp, Unknown
  misc_feature (1)..( 3000): cDNA_ID_2121939_gDNA_ID_1620309_Annot_ID_152924 3000 nt of promoter + ATG
ggaagtcatgaataataatctgtattagcgattcctgaagaattaagatatgtcagctctctgttttcaaattagttaaacaaacaaattttaatatgaggtgaataatcttctcatgtctctcgttttccagggaaagtcgtataggatccatgcatcttcctacaacaaaatattaaaccccaagcctaatcacattcaaacgtttaaggccaaaacatctattacccgaagtaatatttatctaaacgatggaaaatacattttttcactcaaaagagatgggtttgttattaatatatgcctttaagcactttacataccaaaaatattcaattgaaataatctcatttatccggttttgtaatcttattattataatttatgatttttgtaccaccaaatattgtggcatacctatatatgatctcattcctctttattttgaagtgcctagaacactagtcttcttcttttcatggttacgaaaatgtttacagaaaatcatggatgattcaagaaaatagaccactttttgagatacttttccgtaaaccctaagtatatccataatatctctacattgaccaatgacaaatagtagtttagatattgatggacttatgggagctagtttttattattaactagattttaacccgcggtataccgcgggacgatttatttttaaaagtaatatatattaaaacttgcaaattttatttttacaaaatatttatattttacagtttataattgttattaagtaacgctataccacgaattcatgagacaattgttaaaaaaactgaagttttgacccctattaaaacagcatattaataatattttaaaattttataaatattgattcaaatacatccaccatataacccaattccaaaataaaacacgttctgtaatttctttacccgtcccatgattatttttttaagtagtaatttttaaaattttagaattatttttatatataaaagttttgcaaattgtatcattctctaatacatttatattttatagtttaaattaaattaattaaaatttagatatcaaatcttataagttgattttgattggctattatttttaaaaattaataatgtatttcgtttttaattaattaaattaattaaattagtatttgactttttaatccttaaagagataaattaatttactctttaaaattttatttctaatggcatacctatgtaattacttacaaaaattaaggttacatttaaaatgtacttcccaaataatatagtaggataaattgttttatctatgatttatgaatatccacatcagttctgtaaaaaataaaactaaaagaaaaaccaaggagaaaacaaatcgccttgtaaaaaaccgtttttgataaatgtaacatttaggttttgtgttagttaagatccgaaacaagacaaatcttatacacgccataatccagtatgtcgaaatctacaccgtattaattattgctactatgaacaaccattctatccgatcatagactttactcttatttgtcgttattatcataaaatgtcgtttaaataaattatttgtaggataccaattctttaattatattagttcaaacacgtataattttggtggtttttgaggatgaatatcatcaaagataaatgcattttggtgaaataaataatcaaataattattttaaattatctttatgcaccactatttttaataaattggactcttacaacgttttccttaaaaaaaatcatggatcttaaaacttatacccaaacaaatatgtagaaaattattattatatatataaatatatatatatatatataagctatacaaaatcttattatatagtagtagcgcttgattctaaaatagcataattagacgaaaaagcatgcattttgtaacattttatactttgtaagtaaaacacataaaaaataattttatgaataagaaatccacataaaaaaaaaaagaagtaacatactgtgaaaaattaggaaactttttgaggcaccaattttttatgccactttcaaaaaagcattaatgaaaatttgtttaaaatatcattttaaaatttgacgtacaaaagtacaaaacctcatacaatttcaaaactttacaaagactcaataacatgtgttatagagactttataaactttcttataacatactctataattttttatatccatatatttgtgatatttttgaaaatggataaaataaatttgatatttttataaatagaaaatattaatggtatttttgaatttttcccaaaataattattagtcttatactccaaaatgtaaaaaaaaatcactttttattaaaaaaatacttacgcatttgcttaattgctagtcgtcaaagttttgtcattttatgcaaatactaaaaaaatgtagaaagcatttcctctttatttttgggacaaccaagaaaggagcatttcaatagtgtatacatagacaaaaatatttctcatttcctatatttgactctttaaatctttaatagctcttgtaattttttccattcattgtaatacagccataatgtttaaaaggaaactgtcaattataaacttatactagaatataaaatatggtattgaattgaatattttcaaaaataaaatattaaatttacgaaaagaataaaaaaacttaaaaatctctctctcctatctctcaaccacaacttatttttcatgtcagtatccaccaacacatatatacggcatataaaagattttaataaaaccttggaactatctatatctattcagacacacacgtctatatatatatatacactcatatactactttcactgtatcattcttgttttctctaaatttttcaaaaaacctttagaattttcatttttttacgattccgatgttaactgtttctccggctccagtactcatcggaaacaactcaaaggatacttac

SEQ ID NO: 706 - DNA, 3000 bp, Unknown
  misc_feature (1)..( 3000): cDNA_ID_3058443_gDNA_ID_1620309_Annot_ID_152931 3000 nt of promoter + ATG
gtgttccaatggatccatacgctcgccgtgtaatcgagcctgttcaattccggaacccgtttctatggaccgcagtgattcgtgggtatgcgatagaaggtaaatttgatgaagctattgctatgtatggatgtatgaggaaagaagagattacgcctgtttctttcactttctctgctcttttgaaagcttgtggaacaatgaaagatttgaatttgggtcgtcagtttcatgcacagacgtttagacttagagggttttgttttgtatacgttgggaatacaatgattgatatgtatgtgaaatgtgaatctattgattgtgcgcgtaaggtgtttgatgaaatgcctgaacgagatgtgatatcgtggactgagcttattgctgcgtatgcgagagttggaaatatggaatgtgcagcggaactgtttgaaagtttgcctacgaaggatatggtggcttggactgctatggttacgggatttgcgcagaatgctaaacctcaggaagctttagagtattttgataggatggagaaatcgggaattcgagctgatgaggttactgtcgccggatatatatcggcttgtgcgcagcttggagcaagtaaatacgctgatcgggctgttcaaattgctcagaaatctgggtattctcctagtgatcacgttgttatcgggtctgctttgatagatatgtactcgaaatgtggaaacgtagaagaggcagttaatgtgtttatgtcgatgaacaacaaaaacgttttcacttatagttcgatgatcctaggtcttgctacgcacgggcgtgctcaagaggctttacatctttttcattacatggtaacacagacagagataaaaccaaatacggttacatttgttggtgcgcttatggcttgcagccactcgggacttgttgaccaaggacgtcaagtatttgattctatgtatcaaacatttggtgttcaaccaacgcgggatcactatacttgtatggtcgatcttcttggccgtacagggcggttacaagaagcccttgagctgattaaaactatgtctgttgagccacacggaggtgtatggggtgcattgctcggtgcctgcaggattcacaacaatccagagatagcagagattgctgcagaacatttgtttgaattggaaccggacattatcggaaactatatattgctctccaatgtctacgcgtcagctggagactggggcggagttttaagagtgcggaaactgattaaagaaaagggtttgaagaagacacccgcggttagttgggttgtagataagaatggtcagatgcataagtttttccctggaaacctgaaccatccaatgtcaaataagattcaagacaagttagaagagcttgtagaaagattaacggtattaggatatcaaccggatttgagctctgtgccatacgacgtgagtgacaatgcgaagaggttgatactgatacagcataccgagaagctagctttagcgttctctttactcactacgaacagagattctacgataacaataatgaagaatttgaggatgtgcctagattgtcacaagtttatgcgtttggcatcagaggtcacagggaaggtaattataatgagggataatatgagattccaccattttaggagtggagattgttcttgtggtgatttttggtgagaatcgaggttgtacacagaccaaatgcaatcttcgaggagacttttcttgtgaatcaagaaaatggctatggagaattgagaaactgggatagttttggtcgaagaattttgaacacatctcgtgaagacttgagagttttaacagaaacgccacggatctgaatcagatcatagctagtgtatttttatgcgacttcgatcttgcttggtcctcatgggcttgggctgtctctataggcccaattatatacgtccttttgtgttagagctaattcgttcttttttgtgttacagctaattcgttcgttttttacgcatagcatatacctaccaaaacgaacgcatgtcttcgctgtagcctgtaattcattttttcactttaacaacttcgaatatgatcaataatacaaacactttcgtgttaatttttttcttcttaaataaacttttctattagtctctttgtattgctatcataagagtataatgtttggtatatattaagactttttggaaatatgatggtccacacaaagaggtatattcgactattcgtagatttgcgagaggatcaaacttttcgtcgtaaaatgtttaccaccgttttatttgtctgaaactgaaaacaacgaacagtgtctatttaattaaccaaaacggcagacacaaatctctgggtggagccgatttctacggaagtcaacaaaacgcaccgtcgctgcagatcactacctcctctttcttccttaacgaaaacgaaaacattgaacagagagcaagaacaaaaaggcacgaaagcaaaagaattctcaaactcctgagaaaaattcgagctccgtgtgattaattaggtaacgtattgctcgatcttcagatgaatttggagttttgctttcttcaagcttattctattttgcgagattttcggagaaatgataaattaattgatgtttttgagtttcttcctgatctcgatgtgttcgaatgtaattagatttgagttgcgatattgagagatctctgttgtttgaattttgaatttggatcttcctgatgtggttttgcttcttcaacgatggggtttatcgttgctttcccaatattttactgagttcttaagcttactcgtaaagtgattatctgctaggtgttcttctgcaattgcttttgattcaatgtcctctttgatgtgaagtaatgcttaatcaattcatattttgcagtttgtgttggtaaacttcaatcagatgagtttgatgatgaaagtttagaagagtgtttttgcttccaaagcaaaataaaaacaa

SEQ ID NO: 707 - DNA, 3000 bp, Unknown
  misc_feature (1)..( 3000): cDNA_ID_2121943_gDNA_ID_1620309_Annot_ID_152925 3000 nt of promoter + ATG
aggaaaaggtttttggtttagagaaagagaaagagacggtcaacgagggtttgactgaaaagcgccgcccaaaaaacagacaatgtgagaggttttaatgtttttgtgacggctttttgccttaacgtcccgttactgcggcgtgactttgcgtaatttgattgcttgatctcacgctccttcattaatctacatgactaccacgctctctaacgattaaatgagttttacattaatatgaatttccaagccttattttagtacccaccaatatgaatagccttttttttttttttttgtcggcccaatatgaatagctaatagccacggttctatacttctatgttgacaatgttgtcatttaaattttgtatagagatatatttatgtacaatgtttcgaatgaaatatgtagtaggtgatttagatatatggtttgataatatgtgagtaggtaaatgtgtcaatatctttttttaataaatggttagcagcttaagaatccagtttattttaagaatccaatttgtatcaacttaattatcattatatgacatatcatattgcaaaaagttttttctttttttttgaatctattgctaaaagattttgatttgttatttagatacatggcatacaggttgatacacaattttatttactttgggagatttcgttgatttcctgttttaagaaatcaacaacaatcaactttattgatgaacattgtttttttttttttttgaataaaatgtcaaattatatttaaaagaaaaaatatactttttacatcagcttttttgatattttgataataagagaaatagagctagatcaaaaacagagtaaatagaattgagagagcaaaaacagagtcttctttcttagaggatgctatggacgcatgtcaaaccatacttgcagccccttctcgagtcgaagatcccctttctttttgattgtcgatagctggtttctaatagtcttgtctatctgtcggatgaggtttgaagctgaacgtgacttctctccgtgacgacgagaatttctctccctccaaatggaatgaatagagacttggaatgtgtacctggataagaaactttggatgcgatcaggctgagaatcagatatgtaattcaccacagcagaccattttgtggaaaatctatctttgtacacattctttgcgattgatgtccagatttcagaagaatagcagcattggatattgatgaacattgttgtgtaacagctgtagaggatttcatatatgtaatatatgttatagttaactcatttaactcgataaataaaacaaatttagaattatattaacttttattgaataagtattttactttaacacatgaataatggatacgtctaacgttattgtcaaatgttaatccacacaaaagtcacaatttttttgatcctacaacataacacaaaaaaagagaaaaaatggtatttgaatcccgttacgttacagatacacgtatgtatgttagagtatcttcagtgaatctctcaaaaatgagtattggagtaataaaaagtgatctggagggaacaccatagtagattatgaagcttcaacacagatttaacgagagctttaacttcgaaaatgagtcacctaaaccaccgcttacaacaacgagaaataactatttctatgtctcctcagcaaagttccttatatgattttcttgtccttaaagaggtattttcttaaaacattactttgaagatatcttcataggcaaaaatctagaaattagaaataaaggatgtttaaaaatataaaatttaaggtttgctaatgctgaactgtgaaattaaaaccaacaaccacaacaaaccaaaccggaatatcatttaaaccaaattaaaactaaagggcgttcagtattcggatcgaatatttcgagtttgtgtatttcagatttagaagtttaagacccgttcgggtattttaaaattttaaaccgttcgagttcaggtttatttaaatattaaaatatcaaaattttgtatgtaaatttatcaaattacttgaaaatttcaaaaactctcaaaacaacacgaatagttttactttaatatatccaaagtaacctaaaatacacaaaataactaaaatatccaaatatccaaatattttctgtatttaagtatgaatataaataatatatcaaatatttgaggtatgtttggatatttgttcagatcgggtttgggttagagtttttcgggttttgaagtttaggacccgttgaatatttgaaatttttggatttggatcagggttttcggtcgggtttgggttggttcgtagggttcgattattatgtcgagacctaactaaattgaattacaaattggttttatggtttaaacaaataaagcgaaaccgaaataattgaaccgaaaccaaaccggaattgttatttgattgaacattttagatgcaaaaaatttgggttttttatttgttttaatattaaattaataccaacaataatatttgtgaattaattgtaactttgtaaggtttcgtaaggtgggccatgaaaccggatactcgagagtcgccggagtgtccttgccttcttctatcagttctgcttctgctttagaaattagggttccctttttgaagaagacgagtgtaagtgtctctccttctcgatttctcgctcatcttcttcttctttcaccccgcatagacctaatttaagctatcctcctctctcatcatcgcagattcacttcttctcaccgtgaagcgatggcttctttgttcaaggtacataaagtttagatttttatcggaaaccatttctgggttttgctttttctagcatagaaaatcgagattcgttaatgtttttagtgaatttagtatccgggttgtctggaatctgatgggtctgaagcgattctaattgatttttgaagttgttgtctagggtttggtctcacgatttcatg

SEQ ID NO: 708 - DNA, 3000 bp, Unknown
  misc_feature (1)..( 3000): cDNA_ID_2121929_gDNA_ID_1620309_Annot_ID_152921 3000 nt of promoter + ATG
tgtctataaaatatttgtttgtctataaaatatttgtttttgtacgaaattgcatagattcgtttgagcatttcagcccaagctttagaggaagaaacattggttacataacgaactaccaagcccattcaaaagcccattagtgtataaaacgaaagccctaatttctccaatacgcaaagtgagtgtcgaagagagagagataatcgaagaagaagagaaatgaaattcacagattctccggtgatcgatctgacggtgaacggcacaaaactctcaatccaacaagacaatggctctatgcacgtcggaacttccgtctggccttgctcactaatcctatccaaattcgctgaacgctggtcaacactagactcatcatcatcaacaacatctccaaatccatacgccgaactcttcgatttccgtcgccgtcgaggaatcgagctaggaacaggatgcggagtcgccggtatggctttttacttactaggtctaacggagatcgtactcacagacatagcaccagtcatgcctgcgctaaaacacaatctgaaacggaacaaaacggcgttaggtaaatctctaaaaacctcgattgtttattggaacaatcgagatcagatctcggcgttgaaaccgccgtttgatttggttattgcggcggatgttgtgtatattgaggaatctgtagggcaattagtgacggcgatggagttgcttgtggcggatgatggtgcggtgttgttaggttatcagattaggtcaccggaagctgataagttgttttgggagttatgcgacatcgtttttaagattgagaaagttcctcatgagcatctgcattctgattatgcttatgaagaaactgatgtttatatctttaggaagaaggtgaagaagaatgaagctgaatcagtgtcatgaagctagttttggttctgtaatgttgttgttacattgatatgtaatttgtttcttgttatagaattcgaattatctcaactatttatattttcttagatattggctactaaaagatgacaaaggctgaaatcaaatttttgtaacgatttttttaagaagtatacaagttttgttgtgtgtttttgaaatatatacaaagtaagttctcttgcccaaagaaatatgtgaagtaaccaacattgtgtttctatattagactgataaatttgttcacaaatgtatttgtagaactctcaattgggtgattgtatttgcgagttttattccacatcgttgtggagcggctgcggttgaagaaccaaagttcggattagaaacagctcgaacaagccaatcccaaatcaaaccgcatacatacgtgatatggtatttctatagtgaaggaagtgtcagggtattactttcacctttcaatgttagctctctactcatatcataatctatggaaggaaaaacaaaattaaaaaatagaggaaaaaaaatgatctatatatcggacatgtaatttttagagcacacatattatcactagagaatcccatctaagcacatgttatgatgtttgtagtaagagttctcatatatatatgtatatggtgtaagacactgatgacagttctcatatatatatgtatatggtgtaagacactgatgacagtaaccaaatatgccgttttgagcagccacattcaacaatttatgaaatataatcaaaatctaaattgttcttgaaatcaaacttaaacacttccatctttctttgttctttgcataataaagctcttcatgagctattcaatttctatcttaatatttctcaagcttaatgggcatcagtctaatcttgtttattacaatttgaagttcatgatgattaaaagggggagctaaaccacattttctatatgctaaggtcgtagctaaagcatctagaatcattttcactaagaaatatattctctcttccaaactacacgtttactcttatgaagattggaaaatcagagtaaaaaaaaatgaatcgattggacgacaaaagaaattaataaacaggcttagttatgggctaatttggataatgggcctttatagaaccaaatcagtgaaaactactataaaaaaaagtaagcggttggatttattacatgaactgggcaacggtcaggtccaagatccaaacacaaagcgacaaaacacaagtccaaagaagaaaaaatatatttattttaaaattaaatttgataaatgcaaagcgagagaaacaaagagagagaaacgcgagccctgaatcaaactccctcgattttcacaaaaaccaacccaaagaaaaaaaagaaaagaatctgacaattcaccaaacaactctctcaaagtcttaaattaaaattttttgtcaatcaattcacaaactcaaatatctttttatttttcaatataaattttcgaaggaaaaaaagaaaagtagaaaaaaatcatgattatgaaagaaacgaatagtcagaggcaaaacactgttgttgttgttcgttcgttcgttcgattgttgttgctgttcttcttctcacgatttcatcttttatttcttttaatattaaaattgttctcggtttatattaatgatcttgtcgatattgcgagactaaaatgtttaatgtttttgattttatttgtgaaattcccaatcacattcttagtagtagagagagaaaggttttttctttttggtcttttggtggacagatttttattcttctttacttcttcttcctctttttcgtcaaaccataaacaataatccaaaccctttgttcttcagatatgttcttctcttgacacacacctaatctttctccaccaaaatttccgaccaagtctcatacttttgatctgtttttcaactttctcatcagcccaagtaagtatttttttcttacccatgactgaaatcaatttcattagtttttgtaatttctagggtttccaattttgtggatttggggattgttgcagaaa

SEQ ID NO: 709 - DNA, 3000 bp, Unknown
  misc_feature (1)..( 3000): cDNA_ID_2121887_gDNA_ID_1620309_Annot_ID_152908 3000 nt of promoter + ATG
gctgagaaggtgattgtcgttgcgcgtttcattgacagggaaaactacgttattgaagattcttgctggaaaacatatggttggaggaaagaatgttgtacaagtgcttgatcgctcagcatttcatgatacagagcttgtttgtagtggtgatttgtcttacctaggaggatcatggagtaaaactgctggttctgctgtgagtactgagatctcaaagttaatacactgcaagagttttgatgtgagaacgttttgtttctaattctttaaaattctttagggtgatattccactccaaggagacttctcagcagaacatatgatatttggaggtgagattctctgatcctagtatgagtttttagtgaattgtttcgttgtgcttatactctgaatatgttttgtgtttagttgaagggattgatcctttcagaagagagaagttgattgatcttcttgatatcaatcttcaatggcgtatgcataaggtttctgatgggcagagacgtcgagtgcaaatatgtatgggtctattacatccgttcaaggtagtataaacaacaatcaactcttcattgtggtctctgttttttctttgatcatatctgatacttaaattgtaatgatcacaggtattactactggatgaagttactgttgacctcgacgttgttgctaggatggatttgttggagttctttaaagaagaatgtgaacaggtaagccattcactaaccccccctcatcttatgtttagaaatatcaaatgctgattttcatgttttatatttgagtagagaggagctacaattgtatatgcaactcatattttcgacgggctcgagacatgggctagtcatttggcttacattaatggaggagagctgaaactctcggccaagttagatgagatcaaggatctcaaaacctcaccaaatctgctatctgttgttgaagcttggctccggtctgaaaccaaagttgagaaaaagacgaagaagaaacctgttgttacctctccatttatgtcgtctagacaaatggcatattaccgatgaatcttaacttgtttatgagatcagtaagaataagagcactgcttctacagatgcctttgttttctatggtacttcattgtttagaatccgataacttttatcacacatgaaagaatttctgtaaaaccacgtttttaattaaattactattttgccaatatttaagagcttatattcaaaataggcattttaaataaagttatttcaaaataggtattttagacagttgaatgtaacagtatcgatttattgcttcaattgggacaattttgtccttgtcttcttttctcttcttcttcatcgaacatagttgcagaatctgatcaaatcgatttcttcttaatttttcaagcaaacttaatttttttttttaattacacaatattaaaccttaagatagtatatagggaacccaatcaaaaaattttatagattttatggaatttcagttctgattttgtgtatatatgcatgtatatacatgtgtatttgtgtaattatgccactgaacaacaacccataaattataattgaattctaaatcaacgcaaaggcatctcgattcctctttaaacttcacttaattggctttttgtttgagaaatcataaaatttggaatcagacatcgccatggaatatcaaaattgtttttgataccgacatttctctattcatcatcttcatcggccagatattccattttgatcagtttctgaattccaatttcaacgctgcattaacttaataaactattataaccaaacgttgaggattcaacgattgaaaccgttcacatgtctcgtcctttgcgagtgagtaaatagaacgtgtggagaagatgacactagtgaatgagggagaaagatgacttttcacgtagtgatagtacctgtttttgaatgctgggtcaaaagtgcctaaaagcaaatatatttataaaacaaatgccttatttgaaattaactcaatatttaactgtttatgtccaaattttggtttggagcggatccttcttaacactcgcatggcaaaatatccgatcgaatcgaacccaacctaaacccgaagttaaaccgaaatacctactcatagtagagaaatctaaataaatactaaatcttaacgttttacttttatttttaataaactatataaaaatagaaaagcatgtacatgttttgccttttgcgtttatagtttttctttttcaacacaaaaattgctgtaacacaataaaaaatattaaaatactagtgtaaaaacaatttttgcaaaatttaacaactgttagagcatgtcacgcttaacctctaaatatcaaaaaccaaaaaaccaccatattaacttttgttcccctcttcacacacctttttttgtttgtttcctacacaaaaccttaatctggatatttttgttaatttatccgactgtaaaaataattaaaacctaacttatcaataaataaaaaaaaatcttttctaaaggaaacccaaaacaaaaaaaacacaaaggcacgacaaaaaaatgtcacaaatctccatttcttctcgtctctcttcgtattaaccaatttacccaatatttcgtgcccaattctcgggtcaaatccatctaaaagtttgtgcttttcgtattgggattagttcgatttctaaatctgatttagggttttaatcaatttggcaatcgggtctcttgcgatgaagttttcggagatttattgatttcatggtgggtttttgttttcgaaggtcgttgatgaagaattgacttctggaatctcaatctctgaagggtttttcgatgttaaatccgtgaatctgagttttaaatgctgaattggaaaacagatccaggggctaattaacgaaaaaaggaggtttctttttgatatcgatttttgggaattttgaggtttgagagagatcggagaagatg

SEQ ID NO: 710 - DNA, 3000 bp, Unknown
  misc_feature (1)..( 3000): cDNA_ID_2121922_gDNA_ID_1620309_Annot_ID_152919 3000 nt of promoter + ATG
tataaaattaaactataaaatataaatgtattagagaatgatacaatttgcaaaacttttatatataaaaaataattctaaaattataaaaattactactttaaaaaaaaatcatgggacgggtaaaaaaattacagaacatgttttttttttggaattgggttatatggtggatgtatttgaatcaatatttataaaattttaaaatattattaatatgctgttttaataggggtcaaaacttcagtttttttaacaattgtctcatgaattcgtggtataacgttacttaataacaattataaactgtaaaatataaatattttgtaaaaataaaatttgcaagttttagtatatattacttttaaaaataaatcgtcatgcggtataccgcgggttaaaatctagttttcttttaagaggatactaatataacaattattgtaagacaataaccacaatggtttataattttatattatgatgtaacctactttaacgtttttcggaaaatttactataaataaaagttttcgtattcaaaatctcccctttgccccactcatgttatttttcgcatcatgtaaatgacatttgactcagcatctctattatattcatcttcgaatttcactatttatcttattctcctaaacaatcaactttattgaatcagggtaataattaattatatttatagtgttcaactctttttccatgggatgcattgtctattatattgaaatcatataaatgggaaatggtgtaaagtttgagcatcgtcatttaacccaaaacacacataaagttaactaagttgtatcatcgatcaagagactgattcacgtatatattgggtcaaggaataaaggaattcaaagaaataatctggttttataagcatattcggtgcagaagataaagtgaagatccatgcatattctccattaaagagtaagaaaggtcttttcttcttgtatgcaagaatatacaaaaacaaaaagcatagatagagtggagaagtggtggctgtggggacaatgaaaggtggagacttttgaagctcaattattaaaatcataaccctaactcgaaggcaaaaattttatactttatagtggaggaaaagaataggaaaagagaaaaaagcttgatattcctagcttaggctttttccaccttttatcttatctcccttttgctctctcatgaagaaaattagattcagtcaaataagaaaaatagaaattaaaaattctccaaaacacttttaagttttcttcaaaatttatcgacaatataaacagtggcggttcaaaaatataattgaaatgactacaaatattttcgaaataataagatataacattttctttaaaagccacaagataagttcaatatttaagggtcaaacaaacataaaatctataaaaacatgtatataatggggtcaacacatacaaaagtagaaaatattacaaacattcaagggtaataacaaaaagttgtaattttagggggttcaaacaaaaaaactacaaaactttaagaaccataaaatcaattcaccccctaaagcttgctcgataacatcatataatattattttttaccatgtagtcattgtttcggagatgtaagatatgcatgacatatatagtttaaaaaagaaagtaatgaacatttagggttatttttaatgacaataaaaagttaactactaaggctaaaattgtatacataataattatagtatactcggactctacctatgaaacataggtcactactatattgcctcagtaaccttcaaagacgaaaaaacctcaccaaactgcttctaaccgtgaccatcagattctttaaaaataacatcttcaatataatacaattggtcatgtcatttctgttgcttatgaaccagagcacacagtttataaccctcaccaagcatagccttcaaagcttcaccaacctactctaccttagcagtttgtatctcatctaccttactagataggccgttgatttgtgtctcagcagcagtctcaccaaactgctccattgccaaatttttagtttgtgcctcaacaccaagctgatatccctaatcatgacacatacaatatatgtgttggcgacgattgggaggttgattagatagttaagcatttaaaaattttgaaaactgatttgatgaaactttgtaatttttttgtttgttgttgtgcaagtgagattttatttatttgaacaaagacaattagggtgatatagtagtttcaaatcatataaacgacatagtatgagtaaagactcttcttcagcgcaagtatctcctactcgagctcttccttcttgaatcctttctcttagccactattcctcatcctttgcctcttctcataccttctagccattcttccctttctggctcctttactcacaaaggctaatgacacgacaagactatcaaatttgagtaacaagtgatttgtgtttaaaaacaattaaaaataaaaagataaatacagttataattgttgaaacacaccaacaaaacatctccgatttgacccaataaaagaaacatgtagggcaactaaattcattgtccattcaggacaaaatattagaccaaccaccaaactttagcttttgcctatgacattgttcttatatcctactattatgtttgcacaaactcgagtataaatgtataataaggcattaagccattaaattgtttaagccattaaattgtttttgtaaaatatttgtctataaaatatttgtttgtctataaaatatttgtttttgtacgaaattgcatagattcgtttgagcatttcagcccaagctttagaggaagaaacattggttacataacgaactaccaagcccattcaaaagcccattagtgtataaaacgaaagccctaatttctccaatacgcaaagtgagtgtcgaagagagagagataatcgaagaagaagagaa

SEQ ID NO: 711 - DNA, 3000 bp, Unknown
  misc_feature (1)..( 3000): cDNA_ID_2121918_gDNA_ID_1620309_Annot_ID_152918 3000 nt of promoter + ATG
atcaaaatctattaacatatttaacataaaatatattgtaaaatatacaaataatctaacgtagctgcataatgtgcttaattagctcaaatgacaattacaagtattaagctgattgattttatttttttaatcgatcaacttgagaaagagaaaagacacagttttaatgtggactggctagaggtttatcaaaaactgctttcatgtataaaatttattaaactcagggattattagtagttaacaaataagaataagataaaaacagcttatgagtttgtatgactgtcaaaatgtaatgtagaagtatagaattcaaagaagattaagaactcaaattataaagaataactctctttattagtttaggaagattctctcaaaacctaaactctcttaatctctcaaactcataagttgtatcacaccttgatacctccttatataataagcttttaaccttatcctaattattaaataactcctaatattataagataactcctaacaatatattctagattatctcctagaataataaagcttaatttccttttctctttagtaacttgctcttcaagttacttcttcttcttcaagcttattccaacaagaagaagttcagattgatgatattccaaaatagtgatatatattcgcatgagatgtaaatgaatttcgcaaagatgtgagaccaatacattcttatgttttgcggaagagataaaaatttactttgttaaattacaaatatttatgtatatactttttccaaaagaataataagctttgttacttgataccactttcttaaagaaaaaagaggggagaaattttatcatcgaaaagcaagaaaaattatacttttatccaccattcaataaagacaccaaattttcttctcaaatcgaaaaaaaaagtgttagcaaaaagaaaaaaatccaaaaaaaaaatattcataaaaccaaaatgttaaataataaataaataggtaggcgaatcagtttaagagttgtaggttctgaagagattgatttcagctagcttcatcgtaataataaaatttcaacatttgattttactgtcgaacgaactctcaagtctgaatgaatgtctaatttatcttaggtatttttgtcgtatgttgttggagtatacctaaagagcacgtgcatgggtacacgtgcatggcaggctttgttcgacttcgacaaacaagagatgtgaccataaccgttggatctgttttacctctttcacatattgtgaaaaattctgattcatgaataactaacaaaaatgactatgtccgtatatgatatctgatgggagtgaatagtgatcccgttaactgtgtatttaaactgaatacaactattgcaaagaaaaaggtgatagataaagttataattttcttattgatcactaatgtcaatcaatttttttaatacattgttttgttacttatactgcataccttcaaattaataagcattatagagattgtgcaattgataaatcagattaatgtttttatttgttggcaaagcaaatgtatcttattgtaactagatatacattacaatactttgtaaacataattcatttaagataaaatttacggatatataaaaacatatatatatatatatatacatataacaatttctttatgctatctgtatcaaagtactccttgaatccaaaaagattaactacactccactacagcctcatcattctttaggcagattgatcgatgcatttcgtattatatactctacaagcttgaaaaaatcacaaggcgtacacaattttgatctcccagtagtttgtttacatatgcgtaaagccctttctagtgcctaatattgttgtatctagatttttgtttatttttattttatttttggcaaatgaacctttgatgctacgaaaagatcttctaataaactgttccttttggtaaataacttcacattttatccccaaaaaaacatatagaaagaagtgtaaaaaataaaataaaaaacaaaaaaaatatagtaagattgtttttttgcactgagttaacatgagcatgtaggaacaaaaagtaagtaattattggacccaaaaaaccagaaaaaaaaatggagaggaaagggcaacacaaaaataacgagataatcattctcaatagaaaagatagaaatatcaactttctatgtgtcataacgcactactacaacaaaattacttcgaatatcttggtaatttaattacattttttaacagctcgcttcgaatttgcaaggctattaatcgatttttctaagatttaatataaatgaagcatttgatgctgtatgatgcataaatacatgattatcatttgtgaaaaaatgtaattaaaattactcttagcaaataccatgtctatacaaaactaaggatgtatgaacatgaaataaaatgaatcaaactaaaagaaaattgtttattatattgaaataattcatagtgaaactgcaaacatagggtgcctataaagtaatcaagggatgttaaattttttctatctctgcattttgaaattttattggctctgctgctatcactttcagcttatgattttccaccgccatccactttgctcttttaaaataatctcataaaggaaaagaaaaatacaattaaccacatattttaatcaaaatggctgcaacagtttaacatatcaaggtgctaatatacccacacacacacacttatatataggagctaatatagagtggtataggttaagacaaaagccatatataagtggagaacccaatatatctttgtctttgttgttttttccttctcgttcatagttaacttgcagatttcttagtatttctaatctttttcttatattaaccttttgtctccttctctctctctctctctctgaactatacaaaaacctacttttaatttctcttccaagaagtcaagaacccagaagaagac

SEQ ID NO: 712 - DNA, 987 bp, Unknown
  misc_feature (1)..( 987): cDNA_ID_2121994_gDNA_ID_1620310_Annot_ID_152941 3000 nt of promoter + ATG
gatcgtggttttcgagcttggctgtgaagatcttaccgatcctgggcagatttacatgtttcaaggccttctagctatgctgccgccaacgactcctaatggaaaaataatttgaagtgggagagaaaagaaaaccatttggatggttgaagaagaaggaaagctctccaataaagccccggcttcaagaacttttgtctcagcccggtattcggttgagtttcagtcggattagtatatccgttttaggcttaggaccgaaatagtgaaagccaaggagtcaaaacctttctgaagttgcgcttttggcgtagatgctattaggacacgttctacactcggatcttgagggactaatagcttggaattggattggatctcaggataggatttgatgtgctttgtgttagtaattgtttttgtgtcattgggtgaatttaggtggtttaagagatgatttcacttagagtcgtggtgtaatttatctcgttatggttgaaaaaatacagtgaatttcagttgggtaacgttgaatccatcttagtgtttcagggtgatactagactgattcattgtatttggttaaaatatgttgtggtctaatgatttgtacctttgaattggttaatggaaagttgttgttgagccaaaaaaaaataaaaaaaaatcaaccgactctgctaagaaaaggaaaatcagtcgattactaacggctacttatggaaacaaatggaaattaaccgactttaattttaagctaacagtaaaaaaaacactgacgttatatgttgaaaatttgaaataaccgactttggtttattatttgtatcatcactattcaaattacctttacggcccaactaaataatatagggctttgaagaagcccatctagaagttaatataaattaagtttttaagggcacaagaatgacgtcatattagtaaaccccaattacaactctgattctccttcccggcgatatg

SEQ ID NO: 713 - DNA, 3000 bp, Unknown
  misc_feature (1)..( 3000): cDNA_ID_2122063_gDNA_ID_1620310_Annot_ID_152963 3000 nt of promoter + ATG
cgcagcttaagtggggaagggggaagtgggactggaagcctttcacggttgcaaggtttgggacgtgctgcccggagacacttatctgcgatccttgatgaattttggggacatttatatgattttcatgggcaattggttgctgaagccagggcaaagaaactagatcagctgtttggcactgatcaaaagtcagcctcttctatgaaagcagattcgtttggaaaagacattagcagtggatattgcatgtcaccaactgcgaagggaatggattcacagatgacttcaagtttatatgattcactgaagcagcagaggacaccgggaagtatcgattcgttgtatggattacaaagaggttcgtcaccgtcaccgttggtcaaccgtatgcagatgttgggtgcatatggtaacaccactaataataataatgcttacgaattgagtgagagaagatactctagcctgcgtgctccatcatcttcagagggttgggaacaccaacaaccagctacagttcacggataccagatgaagtcatatgtagacaatttggcaaaagaaaggcttgaagccttacaatcccgtggagagatcccgacatcgagatctatggcgcttggtacattgagctatacacagcaacttgctttagccttgaaacagaagtcccagaatggtctaacccctggaccagctcctgggtttgagaattttgctgggtctagaagcatatcgcgacaatctgaaagatcttattacggtgttccatcttctggcaatactgatactgttggcgcagcagtagccaatgagaaaaaatatagtagcatgccagatatctcaggattgtctatgtccgcaaggaacatgcatttaccaaacaacaagagtggatactgggatccgtcaagtggaggaggagggtatggtgcgtcttatggtcggttaagcaatgaatcatcgttatattctaatttggggtcacgggtgggagtaccctcgacttatgatgacatttctcaatcaagaggaggctacagagatgcctacagtttgccacagagtgcaacaacagggaccggatcgctttggtccagacagccctttgagcagtttggtgtagcggagaggaatggtgctgttggtgaggagctcaggaatagatcgaatccgatcaatatagacaacaacgcttcttctaatgttgatgcagaggctaagcttcttcagtcgttcaggcactgtattctaaagcttattaaacttgaaggatccgagtggttgtttggacaaagcgatggagttgatgaagaactgattgaccgggtagctgcacgagagaagtttatctatgaagctgaagctcgagaaataaaccaggtgggtcacatgggggagccactaatttcatcggttcctaactgtggagatggttgcgtttggagagctgatttgattgtgagctttggagtttggtgcattcaccgtgtccttgacttgtctctcatggagagtcggcctgagctttggggaaagtacacttacgttctcaaccgcctacaggtaacaaaaaccgcagtagttcattgaaaatcacagttttgcagtttgaaaatattgacatgtatggatttaaacagggagtgattgatccggcgttctcaaagctgcggacaccaatgacaccgtgcttttgccttcagattccagcgagccaccagagagcgagtccgacttcagctaacggaatgttacctccggctgcaaaaccggctaaaggcaaatgcacaaccgcagtcacacttcttgatctaatcaaagacgttgaaatggcaatctcttgtagaaaaggccgaaccggtacagctgcaggtgatgtggctttcccaaaggggaaagagaatttggcttcggttttgaagcggtataaacgtcggttatcgaataaaccagtaggtatgaatcaggatggacccggttcaagaaaaaacgtgactgcgtacggatcattgggttgaagaagaagaacattgtgagaaatctcatgatcaaagtgacgtcgagagggaagccgaagaatcaaaactctcgcttttgattgctcctctgcttcgttaattgtgtattaagaaaagaagaaaaaaaatggatttttgttgcttcagaatttttcgctctttttttcttaatttggttgtaatgttatgtttatatacatatatcatcatcataggaccatagctacaaaccgaatccggtttgtgtaattctatgcggaatcataaagaaatcgtcggtttgaaatgttaaatctcctaaaccggatctctgcacgtagctgacacatcgacgctagattactgacacgtgtccttatcaatatttcttctcgaaacgtcttactgtttcataaagtccttcaaatttctggggaactaagaaaatccagcagagtaactaatccaatgggttatgtaatctacatatcgttcccggcgattcttctccttctgatcgtcgctatcgccttttatctcatcggacgaaaaatcggccggagagaagggattcaatcaacgtcgcagttacactacggaccgccgttggctaattttccggcacctgcaccaccgcataaagctatggagaagccaccggagccggtttagtgtatgtatgatgacgtaataatacttacgtattacgtaaacgttctatatatgtagtttgtgtgttaaataagatgtaattgggccgatgctgaaaccaattttaaaacaactctttattgggcctggggtttaaggaaacacttcgtgccgtttaaattccgtactcacctaatgcaacctagaaactacgcagcgttttgacggaagaagaaatattcgcttcttcttttacaacttttgtcccacaacgcagaaaagtcctctctttctctctctcgaataataatttttcatttgctgcgtccttttggtgcttgaagcg

SEQ ID NO: 714 - DNA, 3000 bp, Unknown
  misc_feature (1)..( 3000): cDNA_ID_2122067_gDNA_ID_1620310_Annot_ID_152964 3000 nt of promoter + ATG
cgccttttatctcatcggacgaaaaatcggccggagagaagggattcaatcaacgtcgcagttacactacggaccgccgttggctaattttccggcacctgcaccaccgcataaagctatggagaagccaccggagccggtttagtgtatgtatgatgacgtaataatacttacgtattacgtaaacgttctatatatgtagtttgtgtgttaaataagatgtaattgggccgatgctgaaaccaattttaaaacaactctttattgggcctggggtttaaggaaacacttcgtgccgtttaaattccgtactcacctaatgcaacctagaaactacgcagcgttttgacggaagaagaaatattcgcttcttcttttacaacttttgtcccacaacgcagaaaagtcctctctttctctctctcgaataataatttttcatttgctgcgtccttttggtgcttgaagcgatgaccatggcagcaaatctagcgcgacggctgatcggaaaccgatcgactcagatccttggagccgtgaactctagctcaggtgcggctagttctgtcgctagggctttctgctcctccaccactccgatcaccgcaactctcttccctggcgatgggatcggtcccgagatcgccgaatctgtcaaaaaggtccctcatcctaatctcttttctgcgcagaatttcgagttctggaagtcatagttacgagataattgtttgattgaattttgtacgataatttgtgggaattcggcaattttgttgatagtttttgcgttttgtactgatccaggtgtttacaacagctggtgtaccaattgagtgggaagaacactatgttgggactgagatagatccgagaacacagagtttcttgacatgggaaagtctcgaatctgtgcgtagaaacaaagttggtttgaaaggtccaatggctactccaattgggaaaggtcaccgttctttgaacctgactcttaggaaagagcttaatctatatgccaatgttagaccttgttacagtcttcctggttacaaaactcgttacgatgatgttgatctcattaccatcagagaaaacacggaaggagaatacagtggccttgaacatcaggtttagtttgttttaagtctattgatcgaatatttcaggttagttcttctaataaatgattctaatgatggttttgttttctcctgacgcatataataggttgttagaggtgtggtggaaagtcttaaaatcattacccgtcaggcgagtttgagagttgcagagtatgcttttctctatgccaagactcatggaagagagagagtttctgctatccacaaagccaacattatgcagaaaactgacggtctctttctcaaggtctgcccgttttataactccaagcatttcttatacggagggatcaaagcaatgattgttatttctgctagtttttttttttttacattttgttctgagaccatttttattttgcttccgtttttcagtgttgtcgtgaggttgctgagaagtatcctgagatcacttacgaggaggtcgttattgacaactgctgtatgatggtaagctatgacaccgaatctactattttttcgttaattaagttagtggtcgggactcgggatcaccttgtagatttagaagtttggtttcttagcaacttgtatttgagttctgcttttccactgtttttacatgtggaatatgcgactgataatcttgagatacctgcagcttgtgaaaaacccagcactttttgatgtcttggtgatgccaaacctgtacggtgacattattagcgatctgtgtgccggattggttggaggactaggattgactccaaggtaaaaacacttgttccttcatcttgtgtaatagtgatctttagtatgattatgagctacatcatcttaaggccttattatctttgacgcagttgtaatattggagaagatggtgtagcccttgctgaagcagttcacggttctgcacctgatatcgctggaaaggttggtccttcaaacaatatatcattccaatttcatcatttacgggctaaagagtatcatttatgcatccaatgttgaaagattaatatgtgtgatttttaaatttgttgttgtctttctgttttgggtgatgtagaacttggcgaacccaaccgcgttgcttctgagtggagtgatgatgttgcgtcacctgaagttcaacgaacaagcagaacaaatccacagtgcaatcatcaacaccatagcagagggcaaatacagaaccgcggatcttggaggtagttcgaccaccacggaattcacaaaggcaatctgtgatcatctctgaacatcgtaaaatccaattctttatcgaatcttcttttgggagccttttttatagcctcgaattcttcttgttttcttgttttacgattagaataaaagaaaaagcaaaaaaacggctcttcatgagttttgaagttattgtttctgccttaaaatttctctgccgtaaggcaagaagattcataacactggaaaaagtgatgttctttctgaatcgatcagaagaattttgttttgttgcttgaattgtttacatactcttataacttcaatcagtttatcaatttcatacatacatccaaacctttttttttcttttcactcgtagaataaaatgagtaaattactatgattatgaatgaaatgacaaaatcatcaaatgaagaaaactcatacatttgtaaaccatttcaatacaaattagtcggtccacaaagaaaagagtactaatttagtttaaaaattatacttaaaaaaaatctaaaaagagaataataatgtgtcgttggtgcaccaacttcccctcgagctaagattataaaggcaagacgcttcactcagcagcagtaactaaacttgcctccaaaaaccaatcccagatctgaatctcaacctaaacctcagattcatcatc

SEQ ID NO: 715 - DNA, 3000 bp, Unknown
  misc_feature (1)..( 3000): cDNA_ID_3058470_gDNA_ID_1620310_Annot_ID_152961 3000 nt of promoter + ATG
aatatggataatgttgagtatgttaaatatatagtgacaagttacataaaaaaagcctaaagaaatcaaattggaaaaaatagtaaggtacaatgtatggttatcgaaagcccaagctgtacttccattgatgtaggagatgattaggaacacgtggattatatttgaccaaaaatagtagaaattctatttatatttgttttcttcttttggttttgggtttgattttgtgatttggatagttcggttaaggatggtttgatcaatcaatataaccatactaaaatatgattcagttaactaactatagtaactgtttcttcgttagtaaaatgatacatttattggaatctattgacaaatcttaatgacttattataactggtgataacaaaatctagctattattttgtatccaactacatattttgtataaaatggaaattcgtatatgatatttgtttagtttaaaagtagagtgtatttgttttttcaatgatgatttaatgaaatcaagctcttagttgagatcaaaagacaaataaaacaaaatgtttttttttgttttgtttcttttctatttgagggaaggccatgaattcttatttttgacaaatagttgttctatgcaattaatattgatgtctaatacatatacagcagaataaataaaaacttgctatataaagacgtattatttatagcattctgtggagtataatgtcgaatcctgttctcatttccgattttacatatttatggtactaacgccttcatttatttttccattttcgttagtcaacaacttcagcttttgataacgcctaattgtatcatcaactttagttagttttctcaaataacgtcattttcaaataaagtttttgatttctcttttattatatttatgcaaaaggaaaattataatttcagtattttgcagaacgctgaaatgtataatagaacctattcatgtatttttgtaaaattttaaagattgttttaatactaaaataagtaaatcattaaaaaaattcctagacattggtctctaatataagataaatagatctaaattatgtttggattttaattctaataaaaaggtagccaaaagttatatatacaatatttaaacaattttatttgtttaagatttgaattttatagtatgcgagaatcgcgtaaacttttctcgaatgtaacaaaaaatttcaaatcttctcgacacatgtaatcttttgcgagttagaagatttgattccttattttttgttcgtattcttaaagttagtcacgtttatattatttttcgctttgtaaccgtccctttaaatttttaataaaaattaaaaaaattgctagaaaacaacatttttgtattactcaaatcaaaagtacaaaaataaatttagctagcgtttcacaaaatcaagtaaaataatctccatttgaaactccataatcaagctgtttgatgtattattattacatgtaatgaggagaaagaggggtcgagaaatttaaagtaataataattctcttcttcgtccatggaataaactacgattagtttaaaaagattaataaagatggattaaagaaactatatgttaaacctggaaaatttatttaaaaagacgtttttttagctataagaaaaaaaagaataatacctttatttttacatgttatttacaagtaataattttttttttctctctctctctttgaaggtggcacgagcacccataaccttcagacctatagatacaaatatgtatgtatacgttttttatatataaatattttatataattgatttttcgatcttcttttatctctctctttcgatggaactgagctctttctctctttcctcttcttttctctctctatctctatctctcgtagcttgataagagtttctctcttttgaagatccgtttctctctctctcactgagactattgttgttaggtcaacttgcgatcatggcgatttcgaaggtgacttctttcaaaaaccctaatcctctgtttttttttttattttgctggggggctttgtacggactttcatgggtttttgtagcttttccctcggcttttgcgcaaatgagactttctgggttttttttccagctttttataatttcatcaggtggatcgaattcgtagtttcagcttagatctctctccctcttcattatctggactttccagacttggagttcttcgggattgttttcggtttctgggttttgttttaattgcgagatttaagcttttttcttttttactactgtacttggtttgtggttgaccttttttttccttgaagatctgaatgcgtagatcatacgggatctttgcatttttgttgcttttcgtcagcgttacgattcttttagcttcagtttagttgaaatttgtattttttttgagcttatcttctttttgttgctgcttcatactaagatcaattattgatttgtaatactactgtatctgaagattttcaccataaaaaaaaaattcaggtctgaagctgatttcgaatggtttggagatatccgtagtggttaagcatatggaagtctatgttctgctcttggttgctctgttagggcttcctccatttggaccaacttagctgaatgttgtatgatctctctccttgaagcagcaaataagaagaaggtctggtccttaacttaacatctggttactagaggaaacttcagctattattaggtaaagaaagactgtacagagttgtataacaagtaagcgttagagtggctttgtttgcctcggtgatagaagaaccgactgattcgttgttgtgtgttagctttggagggaatcagatttcgcgagggaaggtgttttagatcaaatctgtgaattttactcaactgaggcttttagtgaaccacgactgtagagttgaccttgaatcctactctgagtaattatattatcagatagatttagg

SEQ ID NO: 716 - DNA, 3000 bp, Unknown
  misc_feature (1)..( 3000): cDNA_ID_3081744_gDNA_ID_1620310_Annot_ID_152946 3000 nt of promoter + ATG
agaaaaaaacaaatcaatcgtcaatgaacccatgcttgttctacttctaacaaaactttcgttatgattttggctaactatgtacatgtttttattttattttttgaacaaagatgtacatgttttactaggtgaagtttattactagactatcatttcatcgcttctgaatttatttattagtgaaaatagaggttagatttagtgccaatatattgttcgatatcacattttgacttctctcgggtgtacactaaattacgtttaattcttcgtattacttttcttggctttaattttgtttacgagtaatttgtacttccaagttttgtaaaatctttatataaaaagtagtggaaaaataaatacaaattacaaaaaggcttttttgagttcctaaaactttttgggagtcaaagatggtgctctctttaaacaacgggaactttttgcatcgacctatatgctttgttcttgggacacagaacattttcctttgccaaatacaatttcttgggtggataaaattttccttttatattaaaataggagttgaaactatgtccaattaaattaatatgtagatccgaaacatagctagtacatatcaacgtagattttttataaaataagtaataaataaagagctactgtttcttagtctcaaaataccttataaaaagatattgttttgttttataaagaataaaatgaaatttgttaagaagatatatatatatatatatatctcaattagtctatatatagggagtatatatatatatagttattgattactgcttctaaaatatgcaacaattatattggtacgtatataaattgtttttttttaaaaaataaataaattcaatttgtagaaaaaaaaaacttattacaaataacataaaacaataaaatgccgaaactaagaaaccctttaaagttatgaccgtaatagttaaatgttgtatctacaatcctttgaaactatatctatgtgaatgaagattttagttgaataaagaataaatccaaaaatatcatcaaattatgcatcaacattaagggtgtcaaaatggatcaaaattcatggatcaagtcaactcaactcaatccgtaaactctaatgagttcaaaattttgactcaaatgagttgatgagtcaaatgagttgatgagtcaattggtttgatgagtaaaatgagttgatgagtcaattggtttgatgagtaaaatgagttgatgagtcaattggtttgatgagtaaaatgagttgggttgtaatggttaatggtttcaatggtttacccaattaacccatcaagttttgtaaaattgaattaaaccaactaaaatctctaaaccaatgccaatttaagtttaaccaacacaactaaaccgatttaataaaattaatatttttctaaatttcttaaatatacaagcgatgaaattgagaaaaaagtaaactcgtaattttccaccaaaaaacataaacccgtgattttcctgccaaaaatttaaacccgtgatttttcccccaaaaacgtaacccgagatttttctgccaaaaatataaacccgtgatttttctgtcaaaaacttaaacccgtgattttcccgccaaaaacgtaaacccgagatttttccgccaaaaacgtaaatccataatttttccgccaaaaacgtaaactcataattttcccgccaaaaaacataaacccgtaattttcccgccaaaaacgtaaacccatgatttttccgccaaaaacgtaaacccgtgattttcccgccaaaaacgtaaatccgtgattttcccgccaaaaacgtaaacctaagattttcccgccaaaaacgtaaactcgtaattttcccgccaaaaacgtaaatcttttaaacaccgtgattttcccgccaaaaatgtaaatccgtgattttcccgccaaaaacgtaaacccgagattttcccgccaaaaatgtaaacccgtaattttccgccaaaaacgtaaacccgtgattttcccgccaaaaacgtaaatccgtaaaaagtggaatccgtaaatatcctaagtttgatgataatgaattaataatgataattatttattattgttttataatagtaattaattaaattattatttaaatgggttaatccatttaacaactcaacccatcaaattaaatgagttatgggttgacctaacccatttaacaaaatgagttgggtcaacccataactcatttaaccctaaactcatttgattatgagttgagttgagttgggttacccattttaacacccctaattaacatacactaattgatgatatatatttttcaaataacaatatcatctaaaatataatttagattacatcccttaaatatttataccttctcccaacttataaacacaccatagatgtacacatgcacgtgtgtctatctaaactgcaagaaaggaagagactggccttttcgaagaaaataattatttacaaaaaatcactttcccttttagaaaataatttactagtcgactacaaaaaaaagggtagatctctatatgtacatctcccagatctctcaacattatttatacaattttttcttttattcctgcaagagtttttttttgtttataacaacaaatcctctttcaatataatctttatatatacgtatactttcgtgccttgaaattttcttcctcatcttctttggtcttttcttgtcatttggcataaccaaagagtcaagcacattcaaacattctcaagccctaaaacccaaaaaaaacttatatgctcttgttcttgttcttcttctcccctcagcatattaaaccctaattaactatctcttttgtttgtatactgttataaacctcctgatcatcttcttgttttcttgcaagattttataaaaaaaaaacaaaacccagctgttcttgttcttgttctttagctccgatccgttttaaattaaaacacagat

SEQ ID NO: 717 - DNA, 3000 bp, Unknown
  misc_feature (1)..( 3000): cDNA_ID_2122045_gDNA_ID_1620310_Annot_ID_152958 3000 nt of promoter + ATG
cgaccaccatcatgaacagcttgagacaccaaacccattaaacctatgcttcctccaccataaacaagatcaatcttcctcatcacctgttcatcaaattttgaaaaccgaatttggtaattatcctgtcttcggtttgtgtcaaagaaaacaaataaaaattgacatataaactctttattaattagagactgtattaataaatacaaggtttcttaagaatcctcatgcatgatgttattgcaaaaacagaacgttttatcattgttaaagaagacctaagaatttttataaagaacttgcaagttgtatatatgcataccagttccttggccaaatcaatggctgcatcttgataactagctttgttcccattgctactcccacaaaagacgcaaatgctcttaaaccttgaactttgtttcttcgtcatctctctttttccctcttcattctccattgtttcggctaacttgtcaaagtcgcaacttttttttctctacgtttgtttgtttctagttcttatggaaaaacaaatgaataattttttttacacaagacaagtctattattagttaactctctctctctctctctttttttgtgtgttttaattaactctcttcttctctaaccctttgttatgttttatagtgtggattgtctttctcaagtctgctaggcacgtgagaaacgtggtcacacgagtgttccactctctggctagctctttctatcaacagtattctaactcatcggttaagtagcacaatcgcatgcaagtggtgctcacacgctctttttcctcatatttcatatatattatttacaatcttccaaattttgtgggggtctagtaatcggtgaattatttttactcattctctatttttttctttctatttttttattttgatatatttttttctcatatacttcatatttgcaatcttccaaactttgttggggtctatgaatcgctgaattgtctatttgatgaatcggtcatccaaacaccaattgcatattgttataaaactatttatactaaatttccgcatttccgctagctaatattttcgaatttcaaatatttaaattttggtacttaaaagttagtttctttaataactgaaaatccttttaggtcaaagtttagagactagtcctcacaatctatcccctagagatataaaaagttgcatatttgtctatatccgcaataatttaagaagttattattatatgcatggccacggaaaggaaagttgatattatactgtgaaaatcttgtctttcttgaatctacattgtttctgttcatgatgataataggagttcctgttctggataggccagcataaaatgatttcatatatgttcgacgctaaagaataagatacgtatgatttgattggattttatttctcgtgattgtttaaagctatgaattttttgttttttttctttggtttgggtgccaatcaatgatatgattagggtagcaaatgtattggtgtatatatgttgggtgtcgacaaaaaatgctttagtgttgattttctccttgcaataaaaactcaaattttaatgatacaacgtggagatatattatgtttcagattatacgacaaagcgaaattatggttaatttgtagcattagcacaatagtatatcatatttcagcataatagcggatggtaatttataacgtggcagaattaaagcgtgagaaaatttgtcactatgtcattggtggacctgactatattacttatgtcctaagacacgttaatacgacgcgtttcgctttggccaaagcaatgtgttgtctcccctaattcatatctaaattagctattgaaaccaagatgaaacatagaatagtatcacccaataacaaacaatcaaaagttccaaaaacttgtggtatttttttttttttttttttttgacatttctctttctagtagattctaaaccactcattcacaacaaatgcgatgatcttacaaagtaaaatattataaaaattataatatgattatacgcgacaaaacattgtaaatgatacaatatgggcttttcgttatgggcttttggactcaaagtgtttgatcctatgatccaacgtttatgattttgactaatcaacagcgtaaattttaaataatttgaccaaacttttcgtacctgtaaattaaaatacatttgttgagaatttaatttagaaaattatacatatgatctcgttggccgaaaacaaaaacaaaatggtcaaaaagagcagtcattttccgttacgccaaaacatcactatataattggaaccaaataatctcaaaaagaaaataaatttacagactaaacgaatggctaagcaacatgttactgcaaagcaagttttcagaaataaaaaataaaatagaaatattaactgatactaattgagttctcgaaatacataattcgatcggttatatgaaagaaaaaaaatatgaaaatagattgattcattcgaacttgggggtctttggtataaaaagaaatattataagaatagtttcatctttgatttatagggcttttgtgatgataacataactatacaccgaaattattatttttcattgttaacgaaaagtcaaaaacataaatagaaagctgagatatcaacttcgaaggtactccataatattaacaaacgttacgctgattcgccaacgtctttcagaaagttgcttacaagccttcttcttcgattctatatttctctaagcttttcttaataatgttattttatgtgtgttttcacattattattttcatatccagagtgattcaccaaccttttcttttcatgatggctctatataagcatttgtaaccagcgactatttcttcacaacattttgtataaccaaaagcagtagaagattaagtacaaataaaatctcatcattgcatcaaaccggaaaattgaaccggagatgaagatg

SEQ ID NO: 718 - DNA, 3000 bp, Unknown
  misc_feature (1)..( 3000): cDNA_ID_2122018_gDNA_ID_1620310_Annot_ID_152949 3000 nt of promoter + ATG
cggatttgacaagacgattggcattagtactcacaaggactgctccggttccaccaggcttcagaacccgctccatctcaagcacaagaagagcaggggaagcaacatgatcaacatccccacagagcacgaaatcaaaagacttgtcaccactaagctcaagctcgttgacatgcttcctactgaaaaaggaaaacaatggatgcttaggaaccccttgaacaactgagaaacccatctctttgaaccctgaaacagcagaatccgatccctgaccaatgcagagaatcttagcatcataatgcaatagctttaaccccatgagctcatcaacgagatcagcaattaccacttgtggatacttctctgtctcaattttaccccagaatggttgaacgagcttatggaagaacaatttcggtcctggaataacaaatcggccgagatcgaccaaatccactgctccatgatcaccaaagacgtgatttttagcggttaactccaacaaagggacaacagatagagcagaggcgatgatgagagcacgaaacagagcatgcctattcgtagatccacggaagatattaagcttcaagatctttatacccattgatttcttcaaatacttcagctccgatggaatcttaaaatatgattaatgtctagtacgatttgctaaacagatcttaagaacaaagaagaatcgcaaagagaaaatcgaagaatctagcgagtacaaaacctggaggaggtatggtttccacccacgaggagaactatagatatttgtgatccaaaccagacccttcttggaaccctaatcgacttcacctccgtccccattctcaccgttcgatccaccatgcagaaaaaaaagaaacaaaatctcgtcttacatgcttgtagaaatctaaaagctaaacacagtttcttgattgtgtttgagaaatgcttatagattcgaagggtttgggactatggtttcgtgattctcttcctctgtcttgttttttttttggggaagaagagtgagtgaggaagcgcttttaacagatttaatggtgaagctaaccacaatgttaaaattctaccgccacaatattgccacgtgacaagaatttatgctaatgttaaatgtttgaccgtttgtgattatacacatactacgtggatttcgttttcatggtcttctatgattattgagtagtagtaccaaactaccaataatcgtttttttaaacagaataagtgagaattgtttatatcgctaatttgttattcaatatttttgacaaaaacgagtggctcccacttattgtctgtgccttcgaaataattatttgatgttgaatttggctgttgtccctacacagtgtccatatccgtgtgggtggtgaacacatacgtgttgatcccaagtagtttctgttttaattttcttaaaaagtttttaggaaactaatttttttgaatggttgtaaaaaagaaataatattgtacgctaatcatattaatcatccaacctagcatagataaactctcttttttttttttttttaagttagcaaaaaaaaactctgaaaatttgtaaaatgtaaacctattatgttttggatcgaacacgagtcgagtggtggccacacagttttggctaagttgggccgagttgggccttccacaattatttttttgcttttgatatcgtcaccgtcccattttctgtcaagcatgatttcatttcatctttcatgtgcttcagccttcagagtatagcactaaaaatgctatcagatttgtaagattacatgctctttcgacacgtcgttgatatagtttcgtgaaaaaaaattcacattgttaaccatcttatagtcattcatatcataaacataatctatacatttagtcggtttgatgtacacttgtacatgtgtttgttgagacatcgatcctacttaggtgtgatgcgtgttacattttgccttatccattatttctttgtttgtgtcagcgtaactaccatattttgcgttatgagtcgttcttatctcgacagaattttaaattgttgtccaaaggtttatcactctcaatgttatttacttctttctctcgaaatgttatactttttctcctttttcccaattaataaataaattacaaaagtattttttttgttgttttatctttcaaaagcagtataagataaactcagcattgcacatctaaataagtaaagacaatctgtatttttcttccaacaaaattttcatacataatatttttttcctaatctctttttctgttataaatatgttcagattttgtttttaaaaaattcattgtttcttttttttgtttaatcagattttgttccaaatatgatcagaaatacacataacctatttgtgaaatgttctaaaacattcagcagaagttcagataatatccataaaccatttttgaatcattttttaaaatgttatgaatatctgtaatctgtacatacatttgagtgggctgccatacttgattaccttcttactattgctttacacatttgatgcattcaaatttttgaatagaaacatgattttctttttcttctttcacaagaatgttgaagacaatttttatttgacatgtaagctggaaattttgattcaaaattatatgcaccactggttaaagatatataccaaaattagaaaaaaaaaagaggttattacttaagtaagtaatagagacaaaacaataaaaataaaaaccgccgaatccaatttacttctttagttgagagaaacggggcaggcactgagtaagcacacaaaattgaagcaacctatatgagtgttcttgatcaaaagcttctttctcagattatcatttctcctaaaaattagtccttttaagcaaattaatcccaaagattgatactttgttttcctgagattcttcttttacttcactgtttctgggttttgtaatttgatggtgatg

SEQ ID NO: 719 - DNA, 3000 bp, Unknown
  misc_feature (1)..( 3000): cDNA_ID_3058520_gDNA_ID_1620311_Annot_ID_152978 3000 nt of promoter + ATG
aagcttcaacaaaaatacattcccaggtcacatacatgattattatacaagagactcgcccaagtcattgttattggcttcataaacttaacactatttaaaaattgaaaacaatttcatctttgactcaaaaattcatatccccatacaataaccagatgtcacgattatagaagggaagagtgacataactatctaccttcgggaatgtcatgatgacgaggtggtgatgggatgagagttgtaggtatttcagcgccttctcttggattggagttcatctgtgtttcatcatctccttcgatgtcaaatctgagatgccattaaaaagcagaatagaatagaacaaatcatcaccagctttttgctgaaaggtggatgaaagaaaatacagaaatagtgaaacgctacaacttctaccttcaacagttattcgagaaggtttaaaatctgggaattaaagactgaagatagatagtgggattgaaagctcacctttcaaaacgatcatatgtttcattgttggtctggaatgaaccatgatactcaaagagtgtgatattctcggcatcagctgagaatgttacagaaattgacaagcggataaatgtaagttattaacatgtcgtatactcacaaaggttttgtctcaagatactcaccttgatggaactgctgtccaagatcttctggctcggggttattgttaacatgggattcatctaaccgctgcaaagagataaaaccacgcaatgaattagatcaactgaagatgcacacgagtaatcattggtatacaaggagatgaacactactatgatcaattcacattaacagttgcatcttttgtgcattgtccatttccacagcccataggttacacgtcaaaatcttaagcgatgttcaaatgattttggtttgagttcatatgcttcaagttccaaaaagattttcctttgaaatattcacctgtagactaaaatgaggctactcataaaccacatgcttgagttagaccaagtcttaggtgccctttatgcgccaacttatttactccacttttatgggcaatgaagaatgatggctactgatttttctatatcttatacactgttttaggttggagagttcaagccacaattctacgaattgatgaatattgagacgtagaaagaaaataaatacccaattcaatctagaattcacagggaattgagttgattaccatggaaataaaagtctgctgaaaatccatgtaattgccaaatttaggaacattacgagtctgttcaaaatctccaaaatcagcttcttcgttctcaggcaatgtaacagcctctttcctgcaaacaaaaaaatccaacacgccaatcatttctattattcttcacgacaatgttcttatgtttacgatttgatccttcagaatccttcaatggcatgagaagctccttcaaggaagaagatgtgacattacctggcatgggtttttcctttaggtagtaaagtgggatccggaacagattttgtgcgccaagctccattaatttcaacctgagaaaaataaacacatgtgaaaatccagaaatcgaggtacgtgaatatgattttgacggggaaacaaaaaatagaagaggatcggagaagatttgattaccagaaagcgattaacatcatctgaaatattgacggaaaataaaacccagaaaaagagcagagtctcatcagaaaaagaggagagtgtaaacttaaatcccaaaattcaaaaatgatttgaatcagaaaattaccgaataggagcttcactttcctctcataaacaatcacaacaccacctatcgaataaacaaaacattgaagaacccagaatgtgaagaactgaggaaaaaaaaaatccgatgagcaaaagcatacccataagaatcccggagagtctaagagccatcggaaccgacggattcaaaatctcttcgctgtaagagtaaagtaaccaacaaaaatggaaaaatcaacgttcgttttcatggcaggaacaccaaaaaaatcgaagcagagtaaaacccaaaaaaagggcgaacactatctcatctcctctcaccagatttgaatgatatcgagcttatctagtttcttccggttgatcttcgcgtgcaatgtagcggccatccttaagaagaagaaaaatcaaaaacagagtttagagattttactctatgcattcactaataatccatatacagatcaatcaatggaaatcgcagtgacgatttgaagcagtgacaagtgcttgatcgcgacaaggaagttcccagccgatttcaaaaacagatacagaaacagaggttgcaaaatcatcgtgataatcggaaaacgtttcactgatagaatttgactcaccatatctgacccaacggagcttttcgagctagaagctggtgagaataaaacatgattcagctcaagcaaaaaaaatccaaactcaggaagagaaaaaaagagaagcgagtctttgcgtggagaagaagctgaatctgagtaaatagtttttttaatgcgtttctttatgtgtaaatttgtctgtatatagatttatgaagccgccatgagagcttaagaagggaaaactcgcagtgatcgtagcgggagaggagagagtaagcatgtcaggagaaaggctaaaattaagtgacagtgacgaaagtgtcactagtagccctctcttattttgacacgtgcacagattataagtaaccacacgtgacgctaaaataaatttcgaattccgttaccgtcgctggtccccacactgttactatcaaactctccagtctcaacatttcctttctactatctgccaatttaggatgtcaaacgacacgtagttgattctccgaaatataaaaacgctttggtgtttaattacgtcccttctctctctccagtctccattgaagttcgcatcggcgagctcggataatcaaaaacacagaagctatcatg

SEQ ID NO: 720 - DNA, 3000 bp, Unknown
  misc_feature (1)..( 3000): cDNA_ID_3058498_gDNA_ID_1620311_Annot_ID_152990 3000 nt of promoter + ATG
gagaccgttaccatattttaatttatatttttattcactcgtacatataaggttatttgtaataggtcagttactcagttatccctttttcttcataacatctattaatattgattaatgacgagtagagtacttaaataggtcagttattctgttattgttgcacatcaaacatatagaactgttttttttcttgactgtagaattgtttcatagaaagtttatacaaaactacttgcaggttataagtgaaagtttctagaaatcggatcatatgataatattgtataaacacatgaatcttagaaagagtaaacgaaatcccttaaaagggaatacgatcaagtcaacaataacaggttccgtcgacataccagagcttatgcatgttttttatttttttgaatcgtactcataaaattagtcaacgctagctttggataaaatgaatcgagacgcaaagaaaactaaacaattttttttgttttgcttcaattgaatatcgataccacgtgggataataatcaactggtaatcaatacatataagatggcgtcattaatgacgtaaagctttcaaaacttctcaagaatacttttacccaaagacagatttcggagatctaataaaatataatcgagaaaactaattcttttgtttaggtcaaatgttatctgccaataatacatattgaatgattcaacaggatctaaaagccaatgtgataatgttttctagtctttcctgaaatattctttttggagtttgccttctataagttaaaaccttttttttttatataattcttgcgaataaacaatttaaaatgtttattatttgcttttccaagctgtttttctttaaaagattcgtaagtcttttccgaacatgattttttaaatcgattgtctgtgtatatggaacttagatcaaataattctgacagtagtacaccacatatttctgcactctactgtaattccaatcattctagccgcctcgctcgtaaaagcctccacactcatcatgcgggccttactattggtagacaaactaaatcaactagttccaaaacgtttctattatttatggagctcttgttctcctttttttttttcttggtttttactgacttttatatactaaatcgcttatatctatgtaatttttctcatgggaactctgaaataccttaaactttcttcgcttacaagtagttatcatgaaagtaaaattgagcctctccatgtttagcaaaagtgataacattaggagtacgaaattaaatctttttacatttatgtaatccgtacattttgccacatatatgtcacatcgaacaagtttttcaatacattagatcattctctagaaataatgttaattctctcattccaaatcccaataaagataattaaaaagaaaatcaattctgcataatctatatatagtgtgtttttttttctgttgaagataatctgtctatatatagttaaatgttgattgattaccatacatcatagtgttatccaatcataaataaggacgaaacaggccgtataagtataaactatggagcattggtttataaataatggacgaaggagaagggacataaagatgaataatcgcgtaaagagaagaagagtttgattgagtctgaaaggatagttagagagattagtttgcgcctaacaaggacgaaacgaatgaaaattacgtatgcttattgaaaatagttctgttttttagctgttcgaataagtacgctaaattaaattgcatagaaaaagtttttaaagaaaaaaaccaaaatgaatagtttggtaagttatagataaaatcacatttagcacgtgttataaatagagggagacaattatgtaaggttgggggctcactttgatggatgaaccgccgtgttactagagatgtcggcaaatgttgtcttcgcatgtctcatcatgtgccttgtattcgaataacgttgcgttcacactttgatatttcttttacaatatatacttcttatatctttatattttcaacttgcaattcgttagttaaataaaacagaagctagtagtctactactaccaccagtagagcgacaatctttgatcacataacttaatcccatatttatatcctccagaaatctattattatctgatcatttcttcgcattcattgaatcttattcaagtagatattgacaaatgacatgttgttgttgttgttgttgttgttgtagacatgacattccttaccgacaactgatgagtgatgagatatcatttttagagtttatcaattgtagcttcaacatgagaaatttacaaattattattattattattattatttattttttgttgaattatgagactggaatttaataagatcaaacaccaaaatacaggctctttctaaacaagtcaattaatatttacgtagaagactattgatttcggatatgaataaaccaaacatcatttttttctttcttttctaaccaacatgtcaattaatgtttcgaagatgataagaacatatatagtatacatcatgaattttcaacgtttacattacttttattttatgattgaaaaaaaaactttgaaaatgaaaattattggaacaaacttaaatatttattttgaatatttgatcaattatctatctttatgaattattgatcaagaaacaaaatttaaagaacatcggggacttgaaaaagtaatggaaatttcacaaaaccgaaaagcaaacggttaattcggttttacaaagaccaaacagaaaattcaataattcggtttggttcggtttaattacacctaacaaaaaagttggtacattcgtttttatttttccgccattcttgtcgatcttcttcagtcgtaaaaccgccgcgtctctgctgacccttctcttctcatttcatcgacgggagaaaatccgataccatctgagatttccaacagtgaaattaagatg

SEQ ID NO: 721 - DNA, 3000 bp, Unknown
  misc_feature (1)..( 3000): cDNA_ID_3058491_gDNA_ID_1620311_Annot_ID_152995 3000 nt of promoter + ATG
ttgtctaccaatagtaaggcccgcatgatgagtgtggaggcttttacgagcgaggcggctagaatgattggaattacagtagagtgcagaaatatgtggtgtactactgtcagaattatttgatctaagttccatatacacagacaatcgatttaaaaaatcatgttcggaaaagacttacgaatcttttaaagaaaaacagcttggaaaagcaaataataaacattttaaattgtttattcgcaagaattatataaaaaaaaaaggttttaacttatagaaggcaaactccaaaaagaatatttcaggaaagactagaaaacattatcacattggcttttagatcctgttgaatcattcaatatgtattattggcagataacatttgacctaaacaaaagaattagttttctcgattatattttattagatctccgaaatctgtctttgggtaaaagtattcttgagaagttttgaaagctttacgtcattaatgacgccatcttatatgtattgattaccagttgattattatcccacgtggtatcgatattcaattgaagcaaaacaaaaaaaattgtttagttttctttgcgtctcgattcattttatccaaagctagcgttgactaattttatgagtacgattcaaaaaaataaaaaacatgcataagctctggtatgtcgacggaacctgttattgttgacttgatcgtattcccttttaagggatttcgtttactctttctaagattcatgtgtttatacaatattatcatatgatccgatttctagaaactttcacttataacctgcaagtagttttgtataaactttctatgaaacaattctacagtcaagaaaaaaaacagttctatatgtttgatgtgcaacaataacagaataactgacctatttaagtactctactcgtcattaatcaatattaatagatgttatgaagaaaaagggataactgagtaactgacctattacaaataaccttatatgtacgagtgaataaaaatataaattaaaatatggtaacggtctcattatattgcacaccgtaactgtctgcataagtttttaagtttaaaagaaaaccattatagaaagaagaaaaaaaaagccttacaagggttatatagatgaaacgagaaatacacactggtttgctttgaaatgtttcaccagatataatgaattggaagactcgagcaggatataaaaagtttcatcaaattctaatgaaaagaaaactcacttgatctctgttaaaataattttaccattcacattttagttttactaaaattattaaagtatattttagaaaactcacttgatctctgttaaagtatattttgaaaaccaattattgtggacagtaaaaactcatttgtgaagtgaaatccatgaagtctaagtcgaataatatttagaaacaagagttaaaatctttatgtatttcattttctaatttggttgaacataagctaaactctatatatatattgtattgtttttcttaaaatcaatcatacatacagaaatagttttctcaaatcatttgctaatttatctgtttctatttttcttagcatcaccaaatagatatgtcaatttcccatctctttatatataacaaaatatgatttatttctataaaataacaatcatctcatacacattaatctcgttgtgtgtcatctattgtgcaaaactgtttaattagtatcttaaaatattaatatatttactcttagtctttgtcgacacttagtcattgaaatagttaaaactattacaaccaaagattgcctcaaactcaaagtaatgcatagtttcacatgtcgatacaaattttgttttgtccttttatcccaagaaaataaaaattaaatcaatacttattcacacgtttcattaaataacaaagacgttgctttcatcgtctctagccgatttctagattctcctccaccaccattttacccttcttttaaattccttccttcaatcaaaattagaattatttctcaaacctcttctttatatactaaaacgtctcacatgaacaagaagaataaatagaaacaaagaagatgaacaagaacaagattgatgttaagatcgagacgaagaaaggatcgatggatgagtggcctgagccaatcgtccgagtccagtccttagccgagagcaacctctcctctctccccgaccgttacatcaaaccagcgtctctacgccccaccacgaccgaagacgctcctaccgcgaccaacatcccaatcatagaccttgaaggactcttctcggaagaagggttgtctgatgacgtcatcatggctcggatatcggaggcttgccgtgggtgggggttcttccaggtggtgaaccacggggtcaaaccggagctgatggacgcggctagggagaattggagagagtttttccatatgccggttaatgccaaagagacttactcaaactcaccaagaacctacgaaggctatggaagtagactaggtgttgagaaaggagcaagtcttgattggagtgattattactttctccatcttcttcctcatcatttgaaagacttcaacaagtggccttcttttcctcccaccataaggttcctcttctttaatcattttctcttctttttaagaatttttttagtgaattttcatgagtactgagtagaaaataataaatacggtatttttctattctttaaaatgtacggacatgtggtacaatcttgggaaattatcctctttttattagttttgatatactattaagttcttggggaatgtgagaaggctgattttttgcttttcacgaggagaattatgtgagttttaacgttgggataaagtccaatatagggaaatggataaattattgattatatttatatttattcaaaaaatagagaagtgatcgatgaatacggcgaagagctagtgaagctaagtgggagaatt

SEQ ID NO: 722 - DNA, 3000 bp, Unknown
  misc_feature (1)..( 3000): cDNA_ID_2122129_gDNA_ID_1620311_Annot_ID_152988 3000 nt of promoter + ATG
ggctcactggcaatgttgctcattactctctatccacggttgccttctggaccaaatgacaaccgttgtcacctccaggcaagtttaaatctcttatttattctttgcatcgctcttttttgtctaatatgtcaattctatagaagcaagagttgcttttctatagaaaatgctacccaacaccaatcactttgtcgattgtgatatcaaagacatgctaagcttggaagttggtttcaaacttttgttgtgctatttatgcttttgcaagaatacatctgacaaggtgaattttccttttttttaggcattcaggcatttatatgtccttgcaacagaggctcgctggctgcagaccattgatgttgattctggtctgcctgtctatgcccctctagaagtcacagtaaaagagacaaaactttattcagaaacaaaattttgcgagataacaccgtgcattctgccagagcgtgctattgtaagaaaagttcaacatcttgccttgcatattttttatgaacaaactacagaaggtttcttgatttgcatgtcacactgctttctacaagattatgaaaaaaaaatagttttctggtagaagcacatttgtggcaactgcaagttgaaacatcagaaaactaggccatataccagcttgtctcaatgctggtttaagttttttcatgaaatacttgctcagccattctacctgtttgtttcgtccacgtcacctaaaaatgtatttgtatcctgcagctaaagagaatttgtgtatgtggtccccgatactggccccaacaaattgagctagtccccgaaggtggttgatgcatttgcttatatattccttatttgtccttggtcatttcgtctacctggttttaagataatttatttttatccaatgaaatatagagaaaaattggtggagctttggggacaagagtgatcccttcagttctggtgttatatatgtcaaaaggaaagtaggagcttgttcgtatgttgatgatccagttgggtgtcagtcactgctttcgcgagcaatgcataaggttgtatacgccatcatatactcttgactcagatagattaatattcagtcatagaaaactggttctgatacacgtttgtatgctttctgtgatacaggtttttggtttaaggactctgggagaatctaatttgattgctaatagtcatagagaactggattctgatagtgttgatcacttggtcagcactttctcatcagatccaagcctaatagcgtttgcacagttgtgctgtgacaaatcttggaataacaggtaagtactgttttatccggttgattcacatttatttgtgcttttagttccataagtcataacagagttcggtagtttgcttggcaaactcagaagggcgaattctaacatattcattgatccagatctgattctgaattcaaggagttctgtctgcaagtgttgtttgactgtataagcaaggatagaccagctcttttgcaggtgattgctacttacagccacctaaccctactattcaatgtttaacggaacaattcttgatgcagtttatttggcaatgtgtattctaatattgagtatacgttacataattgttgtaggtttatttatctttgtacacaaccattggttcgatggctgatctgcttgtcaaaagcgatagtaacatgtgtgattcactttccatctcaagcctcaaggtactgttcctgcaaagatggaactgaaacaaagaacattgattcacattttgacttttgtaatcagctttgatttcctaattttggatctaatcttatggtctcaggttgctcttgcctacaatgaggcagtatcaactggaagattggcctcctcaggtggctttgtacagtcaatcttcttagcatcgctgagaaagcgatgtgaagaggttttgaattgctcaacggagctgaagattaatttgaggaattatttgacctcagaagcatggccttatgataagaactcaaagttgcagaaagatataattattctctcatggtatctaaaatggttcaacgtaccatctccatcgatcatcaaagcagcagtggaaaagatcaaatccaagtccaaaaactcaacttcggcaatacctttgttgcgattgttgttaccaaatacgcatattagtgtgattggtgaaattgatagggtctttttcccctcgaattaaacaattgtattgtgaaaacatgattttgtattctcttcgtttgggctaataagctgataaattttgtgagcaaagctatcatggtcaatttcaaactcaaatgtgcatgacaaaagcataatataaaataagctaaattttaaaagatatttagttgatgttttttaaagaatatttatgagatcaatttttttaaaaaagtattagaatagacatggagttaaatggaagtgttaagatcatacactgtaatagtgagatggtttaaatatggtttgacacttgtaaattcaattataaaattttataatttgtcctccatatttgcaattgcattacgacataacctgtttcaaattcttcttagtcgcaacatggacaaccttttaccgagcattgagatgtgtgactggaatgccaaggtgttcagaatcatcttccattgtgctgaccgcatctccttcactcatctcgagatttaccggagtggacaagtctacaagtttgtgcacgggactcctcactatcttgtggttaacgtgacgtgagagggtgttcagattcgaattcaggagaaatagagtggatatttagtttttctatgttttattttaaaattgtagtagatgtgtatgctttgacattagatgtttatatctatttttgacaaacgagatgtaaaagaaacgaaaatatatatccagacacaagattttgggaggttattttgtttattagattgttataatttagtcgttaaaatcc

SEQ ID NO: 723 - DNA, 3000 bp, Unknown
  misc_feature (1)..( 3000): cDNA_ID_3058508_gDNA_ID_1620311_Annot_ID_152983 3000 nt of promoter + ATG
tcttttccagagtatgatttgatgtcgacgatcaatgaagccagcaaattctcgtagccgttctcgttcttcgccatttttacttcgccgaattgaagaaagcaaaaagggacaaggctagtgggagatagagagagagagggattatatgaatttgaaaaaagagtgcaccttttgattttgaaacgttctgatacagcaagaggctccacgatccctgcgtaaagctaaccggctaatcggtcaaccggttaaccagataatcagataaccagctaatcactcagccggttagccagataatcagataaccggttcagtaaggtattgacaggaattgtaaaacgctttttggaggagccgtcaaattgatttcgccgatttgctcatctctgactctcagttgctttgctccttctcatggagaatccggcggagaaacccgacccgaatccatcaaaacccaaaatcgaatctgaagatgaaagagaagaactaggagatattaacggcgacgaagaagaagaggaagagtatgaggaagaagacgatgggaaacctcgaacgcgagaggatgcaatcgcggataggatcaaagctgagtctctgttccgtcgtatgcgagcaactccggtcgctgtgcgtgttcacgacgtgatcgtcaagggaaacgagaagactaaggatcatgtcatcgaggctgaggtggatgttgtgaggcaagccactacgttgcaggagcttctcaaagcctctaaggttgccaatttcaatctacaagcgcttgatatcttcgattcagtcaaaattacgcttgattctggtcctcctgagcttcctggtaccaccaatgttgttatcgatgttgttgagagcaaaagccctatcaccggtcaaatcggaaccttcactaaagcagaggtatcactttcgttttcttatttcagtggattaggatacttaggtcttggcaggaagaattagatacatccattgattgatgcatagagttggatttgttgctttatgaggataattctggatttggatttcatatatagacttttgtatgtcatgtgttttagtgatttccagattaagtgttcttgtgagaatttgaaatgttgaatgttgttcataagtctaatgttcttgtaggctcggtcatcaagccttgaaggctctttgaagtacaagaacatatttgggtatggagatatctgggacgggtctcttgcttatggctgtgatcactctgcagaggtcggcttggggatgtatttgccaaggttcagagggcgtcctactccatttacgtcgcgggtttacctttctacccaagattggcttaagttttcgtcttataaagaacgagctcttggtctttccctcgggcttatcgctagcaagtatcatgagctggcctataatattgcatggcgtaacctgatagacccatcgcaaatggcatcaagatcaataaggagacagctgggtcataatttggtttctgctctgaagtacactttcaaatttgaccagagaaactcatctttgaggccaacacgaggttactctttcatctcgacttctcaaataggtggtcttgcacctgatagtcgaactctccgctttttgcgccaggtttgggattcttcattcttatgtcagaatttacataaacctatatattacagtgtggaaagttgtagcacaaatatattactcagaaaacttccatggcacctagttcctcgtttatgcttttgcaccatttatccataacttccgaagtacatctgacactctttacttattgtagcagtgaatgaaaagattggttagcccttttataacatatgtggttcttttatgtttgccatacatcatgttgagggtttcttgtccttttgcaggaaatcgaccttcgatatgctgttccactcgggttttatcgtgctgctctgaactttggtatagctgggggaatcacatttccatggggaagcggatacaagagcagagcttcttgtgtacctgagaggttcttcttaggtggaaacatatcgcctgtgtgttctttgggaggaccatctgcattatggggattcaagactaggggattgggtcctaacgaaccaaggagggaagtacaggacgatgagagtggtgacacatatgaacgggattttgtgggaggagatgttgcggttactgcatttgcagacctttcttttgatttcccattgaaatggttcagagacagaggaatccacggacatgtgtttgcatgtgccgggaatatggcggaattatcagagaacaagtataggaacttcacagctccaaagttgttggagacattcagaagctcagttggtgcaggaatcgtggtaccaactagtctatttcgcatggaggttagttagttctcttgtttctcttttcttatcaaggatcataaaaaaattgcaatccttttaacagatattgattgttcttcttttgttatgtgatctcttatgccagctcaactactgccacatactgaagaaacaagaacacgatcgagcaaaatctggatttttcatgacattttcaacatcatcttaatgctacttttgatgatatcttaattttggctttgcactcacagtgtcatggcggagtcttttgttttgtttccaggagctttcattgtttaggttgttgtttggaattgaaaactgtgcaaattttagagagagagattacctgatgtgcggattgttcttgggaaggagatagatcaagaaataaaaattaactaaagttgatttgttttgaattaaattttaaattagtaataaactttttgttttccttccttttcaatgaagataaagatgacacggtagaataaatttttgtttcctttttcatgaatatgttttggatcgagtactgtcatctctataaatataagtccaattacaagtagattgttgggtggacaaagtc

SEQ ID NO: 724 - DNA, 3000 bp, Unknown
  misc_feature (1)..( 3000): cDNA_ID_3058502_gDNA_ID_1620311_Annot_ID_152985 3000 nt of promoter + ATG
atcatatctttggttatttcacagatggtggtgatataacaagtttctatgtatttctcttacaggattcgagggggttgtcacaaaaacagatctttctagagccgagttcatcagaacctagattatatgttctcgttcgtaaaatggtcgaagatgatttggttggggaagtcatagcagaggagaataatgcgagttctaagaaacggaagagagaaaatcattctaaagggaccagagatagacgcaggtgtaaaccattgtccagacgaaaacagagaagcaatgtcaaacgaagaagataatatcaaggaaaatcaagaactcaaagcaaaatgataagatgataattggtccggattcttgaaaattgctttcactgtgactctagtttgtgtttggtcatcgttgatgcccttaatgaaccttggatagtattttgccaatttaaaggttaaagaactcagagactattgatttaagatactcggatgcaactgcatacttgtggatgtattatatatatcttatgataagtggttatgataaaaatttagacatgaaaaagcccaagaagaagcataaacatgtaactgttaagcatcagaagctgtagtttggatacacaagccatcattatacgtggacactaacacaaatgtagatcatacttgtcagctactaaagagttaaggaagatttgctccagtacaccaatgtacactaacacgctagaaagtagaagaaaacaaacaaagacatcctaaagagttctctaacttccatcctacagattaaaacaagtaacaggatcctccaatttcaatgagcttcagattcaagtaactcctctttgcttcaccatggtatttcctccaccaatctaattctacaattgcttacctgtacaataaaggcagatcaaacttcagtgaactcattaccatatgaagaatgttcgactactatgaacattgatcttttttctcaatttcaaacctggaagtctactcctcctaatccagttcaacattccacgaagctggagaagctaaagaagtaagagaatgctatctagacttttccttgccagaccactggaagcacagaagctcaactgaattgtatattgacaaaattggtattcttcaaaagcagagaggcacatgactttcacatatcaacaataagtcaattactaaccagcctcatccatgcttacaacaactaacagcataggtataacattgttgttgaaatctaaggtccttccacggatacattatgcggtttaaagagaaagagtaacaaccatgtaaagtctaagccaccactagtaacttgaaaacctaatgtgagttcttcttacctgaagcacttgcgcgtttccggtgctttgatttctcaatctctaactgcatctccatcaacatgttcattcgttttaactctacctcctttgtcacttccattctctgcttctccaactcaatcatcatctgttgcttcttcccttcaattctctcgtaaacttctccaaacttgagaatcgccgtagctagttccctacacgttgatccttcactcagatctacctcttccacacgaggatgcttcctagcaacgaattcccaatcaccaacctcatcatcatcctcatcatcatcttcaagagagcttccagtagagttcgatccagttggattcagatgattcttaaaaggcgctgatttgacaactccgccagccgatttcttcacaacgggaccgattagaacatcgaggcggttatagaaacgccaagtcgacggcgagagtttagctttctctgttttgtacttcttcttcaaagtatcgacccggttcttacactgtaagtcggtcttcttacggctgttatcaccgtgtctagagttaacggcgtcggcgacgtctttccagtcattctgccggagatttccgtggttcagcttgacgtaacgattgccccaggcttctaccagcgtcgccgtcgcttcctcactccaccagtcttctcttcccaacggcggtcggtgggacacacttgattttgactgcggcgtcgtcgtctccattcgtcgggagtagtgttgctaatgtgcgcaccgggaggagagtgacggcgtaggataagatcggaatagaaacaaacaaaacataaaaagaagttttttttttttggtgggaggaaaccggaatgggagagaagaggataagtgtggcctgacattgatgaccggcggtgacgtcactgaccgtattggagcgttttggtcccaacggcgattatccgttaagaccgaaccaatctctttggtctcgttagtacttatgattaaactgttaaaaaaaacctcataatttttcatttatcccaaaacaaacctcaaactaaaaagattacataaataaacctctaaaagtgacagattgggtcaatagcaaatagttggaaatattttagttttatttcattttaagccttcaagttttacttctttccaatgtttaaattttgtctttcataagctcagacttcgtcccagatttcattgcatctagcacagaaagtgtttgattaaattcctctgagaacatctctctttcactaagcgaaatcttccgactttcgatacttttttgaacctcactttcttcattccgttcagtttagagcctcgacaatcatcggaactcgtttgaaacctctctatccggtttctaatgtaagtgacaattcttcctactcacttcttcttcttcttcttcttcttcttcttcaatgttatcttcctctgtctcgcttacttttcataaaacgatttcgacccgcaggtttaaagagaaatgagaatctcaaataaaattttgaaaatagaaaagactagggtttaagcgctaagacaacttggaaagagcgggagagtgtaaattaaacttcaccaatctccattgcctgttggcttcggagaaaaa

SEQ ID NO: 725 - DNA, 588 bp, Unknown
  misc_feature (1)..( 588): cDNA_ID_3058589_gDNA_ID_1620312_Annot_ID_153006 3000 nt of promoter + ATG
gatcttccttctcctaactaaacatagaaacatcttcaaaccctatctctgaataagtcttatttaagtgaatacacatctttttggtatgttttgtttacttttttgagattttgagttattttctaaacatttctacatttgaaatattactttattattaaaacatagaaaacgtctaaccggtcggaccaggatgaaccatgattcatgacccgaactcacacccggttttgataaaagttttaaaagagactactagacgacaaaaacaaaaacaaagactagtaaataaattaaaaaatgacccgaacacacagccggttcaaagtccggttattaaatcattgattaaaaaattaaaaaacaaagactactagatgacaaaaacaaagaccagtaaaaaacgttttaaatatttttgctgtaaagtgtaaactacataaattgtctttacgcaacacacctccactcgcgcagcccaaccaaaaaaaaaggtgccctgattgtttactcacccaaagtttctctctttctctcttctccttctgctgttttccgcctcacaccattactctcccagaaatg

SEQ ID NO: 726 - DNA, 3000 bp, Unknown
  misc_feature (1)..( 3000): cDNA_ID_2122292_gDNA_ID_1620312_Annot_ID_153012 3000 nt of promoter + ATG
accgagcatgaccgagcttcctctcatcacaatttctccgacagtttctccatttctctcaacgctcaaacccgattcaggatccaccacgtcgatttcagtaaacccgacggttctcactccttgccgtgccttcaatctcgctcgatcgcttgccggtaaatgattccattttggcttccacgcgcacgagacgattacaccggcggtttccgttaatccgtaaccgtgactgataacgaaaccaattgattcggctcggaggaggacggtagctggaggcggagaaccggcggttaagatgttgacgggatggttaagaggctgagattcctgagtcgcggataacatgttgagcaccaccggagctccacacatgtgtgtgacgccgtgatcacggatcagacggtagattaacggcgcgtcaaatttacgcaaacagacgttagttcctccgacggcggcgattccccatggattggtccaaccgttagagtgaaatatcggtagagtccataagtaaaccggatttttcggtacggcccaatcaattagtgaatcaactgacattacgaaaattcctctgtggcagtgtaccactcctttaggagctgaagtcgtaccggaagtgtaattaagcacaaccggatcccattcgctttcgggtcggatccatttaaaacccggatcacctctttcgataagatcatcgtaagtgtaactgaattttgaaagatcagccacgtcagcaactcctccttcctcttctttatcggcgatgacgacgagaatcggcggatcagtcgtcatcatcgagaccgcttcaacggcgagatcaacggagaagacgtcgacgaaaagaagcttagattcacagtgacggagaagaacagagacggtgcgtgcgtcgaggcgtgtgttgatgttgttgaggattgcgccggacatgggaacagcaaactggagctcgtacatagccggagtattgggagagagaacagagactacgtcagacctgccgattccgattgaagacagagaagacgccacgcggagacaacggaggtttgtttcacgccacgtgtaaacggtgttgctgccataaacgatggaggtacagtcaccgtaaacggtggcggctctctctaaaaaacctatcggcgtcaacggcggcgagtttgcggcgcatggcttcatttcctccatctcttcctcctagtggtaatcaaagactctactgtactgtactgttcttactgtttattatataatgacattttatttccaagtgaacaatccacgtgatgaaaaatttgtaaaacaatattttgggtttagaaattgagaacaaatctaaaccattagctggaaattaattatcttcagcttccaccacattataatcatagacatttgttacctaccctacacaaccactagcgtactaagtcttaaaccaatgttcgaaactactaaatataattagatgttgatttataatgtattgttattcgacaccacaactttctttgtttgctgatcgtcactcaaagtcacattaattgtaatcttactattacgccaatatagattgttaaacaaacaaacaaaaaagtttatagagaataaccttaaaatatcgcttaatctcgttgcaatattgtttggtggatctaaatgtcgtatgtggtaatttcaatgttaaaaacaaatataattggcatattatcttttatgttggtatggtatttttctacacttttataacatgaaatgatttttctttagataatattgttaaactttgtaaaagaaataatggttgtaatattgaaaatgatgttaatatttatgtactattctcttgttaaacattcattttaattaggctattcttaattaagtatagtatgtgatgttgttattaacatttttacgataccaagatatattaatttgtcattttttccgatataaatttgatcatttgtatagaatattttaaatctatatattgaacttaaattttaatggaaatatttcttggtttagtacgtacagtatatattatttagagaatttttctgatatccatcttttagtgactaactaatttacttcaaaggttttgaatgaattttaaaataatttacttagatatatatatatatatatatatatatatataatgactaaattaatctactttaaaccatcgttaactaacagttttggtcgaactattttgacgaaaaaaaactgaagtaaaaaagttccaaaattggttacaaacggataaatggaaaccataatttcaaccaaactctacagaataagaaaaaacaattatgaagtcagagataagaaaattgagagatattaaaaacaatttacattttatttttttgttaaatttcattttctttaaccaatataaatgtttcaaaactttagctccgaatagtaactgcgttttgcgctatgggagaaatgcggtgcggttcaaatagtaatgaaaatacatagatacatatgtatatgtagaaattttgatagggttacagcactgttgtgatacggttttgagtgcggttttagttacctttcacagccttaattggttcagggatcaaccgatcgtccgcgttcgcgtcgtgggtcatgtgatggtttagccatttcgaattccaaagcactcacatgttttatcccttttatttattacgggatatgctttgctacattttcctcacgacacattaatacattattaatgagattggactagtggcgggtgcaaaattatatgggaaggggaaagatttttttgttctttttttttcagccacattaaaattatgaacatacacaaccacttgagtactagctaattccaaaccaatgttcaaaaaaaacccaaaaaaaaaccattatagacaaacttaataaatagcgttggagagagagaataaacatgaacatctaaaaagggaaaggaga

SEQ ID NO: 727 - DNA, 3000 bp, Unknown
  misc_feature (1)..( 3000): cDNA_ID_3058583_gDNA_ID_1620312_Annot_ID_153013 3000 nt of promoter + ATG
aaacgcctgaccgctgcgtgtcttttctaaaagaagtgcagtgtcattatcattcctttggcctttaatgatcgattatgtcatgttgagcgtggtttacgtggggccttaaattagtgatggtagagagaaaacgataagtgaccataacacgtgcgaattgtggtaaatctaaaagtatgcatttaaaaaattcgtgaacggcaggattcgaacctgcgcgggcaaagcccacatgatttctagtcatgcccgataaccactccggcacgtccactacttgttgtctcaatcatctgcaaacggtatgtataatataattcacatcatcgtcatctcttaaaactgaagaataaactatacagtaattcggtaaagatggtaatgttttatttatccttatagaattttgaaaccttaaaaagttaaaatcttatatatcattcaatgcgttttcaaagtggtattgtatgccttgtcatacataaatatgaccaaagactatagcgctacgtagtcaaacaagtttgtttatttacatctaacatgccaattggcttgagatctgtaatatttgtcaaccttatctccattgtcatcaccaaggtgtcctagataatcacgaaactcttttttcttttctcttatagataagtgtttttcaatttataaggagcagacattagaaaacaatacatttgaccactcaagatggagcaaatgaagccatgcgccgcaaactcgccgccgttgacgccgataggtttcttagagagagccgccaccgtttacggtgactgtacctccatcgtttatggcagcaacaccgtttacacgtggcgtgaaacaaacctccgttgtctccgcgtggcgtcttctctgtcttcaatcggaatcggcaggtctgacgtagtctctgttctctctcccaatactccggctatgtacgagctccagtttgctgttcccatgtccggcgcaatcctcaacaacatcaacactcgcctcgacgcacgcaccgtctctgttcttctccgtcactgtggatctaagcttctcttcgtcgacgtcttctccgttgatcttgccgttgaagcgatctcgatgatgacgactgatccgccgattcttgtcttcatcgccgataaagaagaagaaggaggagatgctgacgtggcggatcgtaccaaattcagttacacttacgatgatctgatccatagaggtgatctggattttaaatggatccgacccgaaagcgaatgggatccggttgtgcttaattacacttccggtacgacttcggctcctaaaggagtcgtacactgccacagaggaattttcgtaatgtcaattgattctttaatcgattggaccgtaccgaaaaatccggtttacttatggactctaccgatatttcacgctaacggctggagctatccatggggaatcgccgccgtcggaggaactaacgtctgtttgcgtaaattcgacgcgccgttaatctaccgtttgatccgtgatcacggcgtcacacacatgtgtggagctccggtagtgctcaacatgttgtcggcgactaacgaatttcagccgttaaatcgtcctgtcaacatcttaaccgccggtgctccgcctccagcagccgtactcctccgagcagaatcaattggattcgtgataagtcacggatacgggttaacggaaaccgccggattaaacgtgtcatgcgcgtggaagccacagtggaatcgtttaccggcgagcgatcgagcgaggttgaaagcacggcaaggagtgagaaccgtcggatttactgaaatcgacgtggtggatcctgaatcaggtaggagcgttgagagaaacggagaaaccgtcggagaaatagtgatgagaggaagctcgatcatgctcggttacttaaaagatccggtcggaacagagaaagctttaaagaacgggtggttttacaccggagatgttggtgtgattcattccgatggttatctagagattaaagatagatcgaaagatataattataacgggaggtgaaaatgtgagtagtgttgaggttgaaacggttttgtatacgaatccggcggtgaatgaagtggcggtggtggcgagacctgatgtgttttggggagagacgccgtgtgcgtttgttagtttgaaaagtgggttgactcaaagaccgacggaggtggaaatgatagagtattgtaggaagaagatgccgaaatatatggttcctaaaacggtgtcctttgtggatgagctgcctaaaacttcgacggggaaggttatgaagtttgtacttagagagattgcgaagaagatgggtacgacgaggttgagtcggatgtaaaattagaacttgcgaatttgatagaacaaaggcttaaagtgtacttttgatgtctaataaacaaattaaagtgtatgaaaatgactttcgtcatgagttacgtttttttcgttgccatgttgagttccgctcaagaactcggccagaaaaagctgaatgaccgtttccgtggttgaagcctagtttatatggtgcaccccaacaatcagccttagccataactaacaagtatgagaatgtcttaagtccattgtagaccgtttcagtatagggttaaaaatttatggttagtgatcctcggccaggagaccaaacaaaacaaaacagaactaaacaaacatcaaactaactaaaaagagtaacatagtccaacgcgttaacaccgtgtcttaaaagacacgtatctcacaactcacaagttgcgtgtccataattatctcatttatatgctgttttgtaattaattaatttgatgactgttttgcagtttccatatatagttggaagccatgttatcttaccaagattaatttgtaatataaaatacctccacgaaaaaagaaaacccaactcattaagcaaactcggatctccttctcttctctctctcgctaagaactatagaagatg

SEQ ID NO: 728 - DNA, 3000 bp, Unknown
  misc_feature (1)..( 3000): cDNA_ID_2122305_gDNA_ID_1620312_Annot_ID_153017 3000 nt of promoter + ATG
gtagagaaatatttggagagcgagatcgatgttctgctgttgggtgatcatggagactaatcgcttcgggaatagcctctgcggccacggtttgatcggtggcttctccgtgcagtattgctgaagagaagcggcggaggcggaggcggagaagagacgacgagaagctacgaatggagggaagcgcgtggggttcacgcgggaaaggaacattgttattgaattttgagctgcggcgactttacgaaggcgacggaagatgaatttaaatttgccggtgtctttattaaccggatacgtgccggtttgagtattcccggtcttctaaatccattatctttcacagccatagttaaccaaaaataaaaagtagtttggttagtaattttggtttagtttactttgtatttaaaagttgtagtgatacgtatacgtagttacgtacatgaaaagttgattttgtctactgcaaaccggttttgtaaacaaacaaaaaaaaggtctggactaatttgcccacccgctgctgcaactattcacatctttttaaacagtggtttgttatgtgtggctcaatgcaattatacaaatcaagcacaagattctgctaagttggaaccttttagattctaaatcacaatacattggcacgtgttgtaatagatagttattttaatactttttgtcgaacaatttgcaaaaatataatttggtcgctatatgatcgctaggttagaggttaccatcactgaacagtgctttggtcgtaaggttaccccatccgcattcgtattattctggataaggttttattttgggctcatttccctttcgtggaaaacaaagaaaaaaaaacaataatgatgattcacttttactcctcttctctccacagctcgaagttcttggacggattcagatatcatagcctatctgtgattagatctgaagcacgtagtttcaacgtgaccaccacgaggaaggaggtcgttgtggcggctgctcctcttctctctttgccggaaaacagggttatccctctctccaacctcgacctgcttatccctcctgtcgacatcaacgtttgcttcttctacaagaaaccactttatggcattattggtgatgccctcaaaacggctatggcggaggctcttgtctcctactacgttctttccggggaggtctccatcaatcccaccaacggagagaacgagattctctgcagtaacggtggtgtggagtttgtggaagccgctgctgacgtggaactccgagagcttaacttgtatgaaccttatcaaagtattgccaagtttgttcccatgaaaaagcatggagtctttgctattcaggtaatagtgtgtagtgacgaaagctggctccactgatatgtctcaatctgattaatatatatatattggaataagttttgggattctagttctgtataaaatacaaaattgaagtgtctatctattcgttgcatttcacaccttcaaagattacctatatagccatatacttttacttattcagctctatataaatcaacaacataactctgttttttttttcgctcgttgttattgttttgaattgtctgaataggtaactgaactgaaatgtgggagcgtagtagtgggatgcacatttgatcaccgtatagcagatgcttattccatgaacatgttcctcgtctcgtgggccgagatatctcgatccgatataccgatttcgtatgtacctttgctcaaaagatccctcttaaagccacgacgacccttgatcatcgactcttcaatagacaaactgtacatgcctataacgtccttgaccgttccacaagaaatcactaatcaagataatatcctaacaagccgtatctattacatcaaagcagatgtcttagaaaagtttcaaactctggctactaatggtaagaggaccaaactcgagtctttcagtgcgtttctatggaaactcttggctaaacacgctgcaacagagtcggtactcccgactaaaacctcgaaacttggcatcgttgttgatggaaggaagaaacttatggagcaagagaactgcaattactttgggaacgtcctctcagttccatttggagagcggagaatcgatgacttgatccacaagccattgtcttgggtgacagacgaggttcacaagttactggagagtacaatgaccaaagaccatttcttgaacttgatcgattgggttgagactagccgtccgataccagttatatcaaggatctacagtacaggatccaacgatggacccgctttcgttgtttcgtctggaaagagttttccagtggcccggattgatttcgggtggggctcgcctgtttttggatcgtaccatctcccacccgggagcagagctggttacgtaatgacaatgccgagtccggtggaaaacggtggctccggagattggacggtttacttgcatcttacgaaaggacagttgaggtttattgaacaagaggcttctcatgtgtttaatcctgttgacaacgactatctcaagatttaaagcattatcaaactttggttatattattatgcaaataaaggcttatataaatttggcttttatagttgtaaatttcagtttaagatcaatattttgatttaagtttaaaccaaaagaaaatgagtgtgcagattgctaatggtaatcgactaatcgtcaattcttggccttacattgtgggggtatgatcgtcattttacactccgataattctgaacctcgcgtccatcgaacccgaaaatacgtaaacatccccaaatgtcttctttcttcgttatccatttgagggtattattgacctcacggtaagaaaatctacaatatttcacggataacgaaaacaacactcgaattaaaatttggaaatcaaaagtctcccaggttcctttgaaagatcacactactgttttttggactcgagcttcttcttcaacaatg

SEQ ID NO: 729 - DNA, 3000 bp, Unknown
  misc_feature (1)..( 3000): cDNA_ID_2122311_gDNA_ID_1620312_Annot_ID_153019 3000 nt of promoter + ATG
tgtttctaagctacacctcaccacacaggaaccaatccttctaccggaatctaaaacaccaccaccaccagaacagaatccaattttcgtcgcgacgcccgaattcgggatccggcagtgctgcttcacgggggaaaatcctccggcgccggtagatgtaatcggagaataacggaaagacgtcggagatggagcaagtcggagagagagaggcattgttgaagaagaagctcgagtccaaaaaacagtagtgtgatctttcaaaggaacctgggagacttttgatttccaaattttaattcgagtgttgttttcgttatccgtgaaatattgtagattttcttaccgtgaggtcaataataccctcaaatggataacgaagaaagaagacatttggggatgtttacgtattttcgggttcgatggacgcgaggttcagaattatcggagtgtaaaatgacgatcatacccccacaatgtaaggccaagaattgacgattagtcgattaccattagcaatctgcacactcattttcttttggtttaaacttaaatcaaaatattgatcttaaactgaaatttacaactataaaagccaaatttatataagcctttatttgcataataatataaccaaagtttgataatgctttaaatcttgagatagtcgttgtcaacaggattaaacacatgagaagcctcttgttcaataaacctcaactgtcctttcgtaagatgcaagtaaaccgtccaatctccggagccaccgttttccaccggactcggcattgtcattacgtaaccagctctgctcccgggtgggagatggtacgatccaaaaacaggcgagccccacccgaaatcaatccgggccactggaaaactctttccagacgaaacaacgaaagcgggtccatcgttggatcctgtactgtagatccttgatataactggtatcggacggctagtctcaacccaatcgatcaagttcaagaaatggtctttggtcattgtactctccagtaacttgtgaacctcgtctgtcacccaagacaatggcttgtggatcaagtcatcgattctccgctctccaaatggaactgagaggacgttcccaaagtaattgcagttctcttgctccataagtttcttccttccatcaacaacgatgccaagtttcgaggttttagtcgggagtaccgactctgttgcagcgtgtttagccaagagtttccatagaaacgcactgaaagactcgagtttggtcctcttaccattagtagccagagtttgaaacttttctaagacatctgctttgatgtaatagatacggcttgttaggatattatcttgattagtgatttcttgtggaacggtcaaggacgttataggcatgtacagtttgtctattgaagagtcgatgatcaagggtcgtcgtggctttaagagggatcttttgagcaaaggtacatacgaaatcggtatatcggatcgagatatctcggcccacgagacgaggaacatgttcatggaataagcatctgctatacggtgatcaaatgtgcatcccactactacgctcccacatttcagttcagttacctattcagacaattcaaaacaataacaacgagcgaaaaaaaaaacagagttatgttgttgatttatatagagctgaataagtaaaagtatatggctatataggtaatctttgaaggtgtgaaatgcaacgaatagatagacacttcaattttgtattttatacagaactagaatcccaaaacttattccaatatatatatattaatcagattgagacatatcagtggagccagctttcgtcactacacactattacctgaatagcaaagactccatgctttttcatgggaacaaacttggcaatactttgataaggttcatacaagttaagctctcggagttccacgtcagcagcggcttccacaaactccacaccaccgttactgcagagaatctcgttctctccgttggtgggattgatggagacctccccggaaagaacgtagtaggagacaagagcctccgccatagccgttttgagggcatcaccaataatgccataaagtggtttcttgtagaagaagcaaacgttgatgtcgacaggagggataagcaggtcgaggttggagagagggataaccctgttttccggcaaagagagaagaggagcagccgccacaacgacctccttcctcgtggtggtcacgttgaaactacgtgcttcagatctaatcacagataggctatgatatctgaatccgtccaagaacttcgagctgtggagagaagaggagtaaaagtgaatcatcattattgtttttttttctttgttttccacgaaagggaaatgagcccaaaataaaaccttatccagaataatacgaatgcggatggggtaaccttacgaccaaagcactgttcagtgatggtaacctctaacctagcgatcatatagcgaccaaattatatttttgcaaattgttcgacaaaaagtattaaaataactatctattacaacacgtgccaatgtattgtgatttagaatctaaaaggttccaacttagcagaatcttgtgcttgatttgtataattgcattgagccacacataacaaaccactgtttaaaaagatgtgaatagttgcagcagcgggtgggcaaattagtccagaccttttttttgtttgtttacaaaaccggtttgcagtagacaaaatcaacttttcatgtacgtaactacgtatacgtatcactacaacttttaaatacaaagtaaactaaaccaaaattactaaccaaactactttttatttttggttaactatggctgtgaaagataatggatttagaagaccgggaatactcaaaccggcacgtatccggttaataaagacaccggcaaatttaaattcatcttccgtcgccttcgtaaagtcgccgcagctcaaaattcaataaca

SEQ ID NO: 730 - DNA, 3000 bp, Unknown
  misc_feature (1)..( 3000): cDNA_ID_3058560_gDNA_ID_1620312_Annot_ID_153031 3000 nt of promoter + ATG
agtttaattgagaaacaagagagttatcgttatcaatataattgaccagaccgtgccgtggcatatgattctattccaattgtttcctgtaaatagtgagtgtagtgtttgtgtatgacgtaaacatttctttcaatatttgactatattaattaatggtaatgtcgcagaataaagaatgaggttgcagctttagcaccataactagaagatcgtctcgaccaatatatgtttttggctgtcgtaactcgtcgccacaacacatgagactaaccaaataatatattttcaataatttattcgaaatatttgcttaatcgtttttttcttaatcttaatatttatatttattaaccactttcataaaatgggagcagaactatgctagtgcatgtaatataagtaaagtgcatggaatagtttgtatatatgccgaaatgggtatttgtgccctacgacctggcgatagcaaccaatttcataaccgacaaagagagatttcttataagaaaatgaatttcacttacttatacctagtgatgatttgaatgtttcaatatattcatggtttaagaaataacatgtcatgggttttagaatatgttaatatatagatagatagagaagtctacaaataacttacttacttttatcttaaaccatgttttacgttgttttttatgtttcgttcgataaaaaatcatatggccatgtctttcttctttgttaaaatatcaaagaaccatattatactacgagctagcgaaaaatctatcatcgtgaggattgaggaagccattcaagaactacaaaagtttacagaaaaatttgtacctcgtgctcttgtcctttcttgctagacaacaaatttattatttgccttctggactctaatataatcacaacaacacatattgctaggtgcaatatcatcatattagcactttttaattctatggtatatttttgttttgtaaccatatatattgtccattcacaaagtcttttctattacacatattcatgatgagaaaattgatttgatctaattactagagaatcatgcagaggcataaaatgatctggaaagcatttatttatcatttgatttgataataacattttatggaaacacctatctttaccaaagatttggaacaaatagaaaaacataagcaaacaaatatatatagtcggactaaaacaaaaacaaaaagggggatttgactgatggaacaaaagttaaaatcggtggattagaaatctgtgaaaacgtggaggatgcttattcactggtgaaattgagggatcatatataaatatgaataataatgctagtagaataagttctatttatcacttgatgattacaaatctataatatgctttcaaatttctctcctgatgtgttgatatatattacagtctttttaatatcaaaaaggtttttgtcttctctcattcattcattcatcgttaatacttttgtttttgtgtgacatattttcattattcttcttgaattatgtcagaaatagctagctagcacgattggaaagtttattcaaaatccatcttatttgttttgtacttttgacgtcatgaatattatgttgatgttttttcccaaaccacaaaaacaaaacaatcaaagtttttcagaccagaaaacactatatgttggggtttatactgttcttcctaaattagagttcgaattcaagagtagtgatcatataactttcgttttcctttcaatctttcataaacgaatccaagtaccaagttaaatgcatggttacgtattatatactatatataaatgtaatcatgttaatgttacaaatcaaatcagaagaaacaaagttatacataaaggagaggatgttttgattttggtcgaaaagaagttcaacgtcaatcattgaaagaatgaagtaaatagcagccaatagaaagggaaaccaaactacaaacatatcaatattacataattttttaaatataattaattatccatatccacacactaatctttcattcaaattccatattaaaaaaaaacacagaagaattattcttaaaggcaaatttgttctttagacttatgaaaagaggaaactcctccaagtgcaggtggaataaatcctctgtttgaaacgacttcactactgtattatttcttaatttattttgtggctcacaataatctgttccttcattgcttcgtcactcaatatatgctacagcacctacttgttgtactcttctgcttcacatctcgtgtttttattctggaaacattcgtttttccagagaagagaagacgcaagaacaagttttcaaccatggagaatggagaatgatttacttttagcataaagtcctcaaacgtattagccgcatcaacaacactctttgatgtgaacacaagtcttaagttacatgcaaagtgttacttattcattaattctagtatagttcttatactttagaacttgaagggtacaccataataatagctaaagagatcaagatcggtgattatagttatcaaatttccaagaatatgtgaacacttcatagattatgtaatgaactaatgattacaaaaaaaaaaaaagtacaaaggcaaagctagaaacgacttttgaatcaggaaaatctctctgcaggtttgtttggtccggcgggaaaatttgatatataaaccgaaccggataacatgaaccacccggtttttaaattttgctggttcttgaccacgacgaagtcacttgcttaacaggctggttctgcttcgtggtctggttctttaaagctggtccaaataataataaaataattaaaagatgaaattcctttcttgccccttttgttcttctcctttctccgtctctctctctctctctctctctctctctctctctctctctctctctctctcttcgacttcttcgtcttcgtttcttcatttcgaagctctctctgtgtgtgatg

SEQ ID NO: 731 - DNA, 3000 bp, Unknown
  misc_feature (1)..( 3000): cDNA_ID_3058553_gDNA_ID_1620312_Annot_ID_153035 3000 nt of promoter + ATG
caaaaatcaagcttcgttgctctctagtttcaatgttcctttaattaactaaacagaaaaaggtttagttcccaatataggaattcatggatcagctaatagtttaatactactacttctgtactactgttaattaatgacaatcctttgggtaagcctaggggttttaaaaaaaaaaaaacatttttcaaaagtataaatgtagctcgttgagggactcattcagaaaacgaaaatatgagtacattgctaggtttggaatataggagttaatgaactcaattccttgtaccattaactaaagataaaagaaattaagtgtatcctaggagttttagaaacctaactcaaaattaggaatggacctcattcaaaaacgttagaagtatagctagggttgttatactgtttttgattgaaaatgctttttaaatagatcataatagtatcttgtttaactcacatgcagcaaaacgtctaaaaactgcaagcatactgtacttctttactttccaataattaaaatttatatctaataagaaaaatatatattactgtataatcaacgaataaaatctcacttatttaaatttcctgatatataaacatagtcttacaatttatcatatttttatttcaaggcattaatgatttgtcgagatgttgtattgatatggtcatgtgaggagtgaatagtttattttttttcttagaagacaatttaaagaaaattagaaaagagttattaaattgagaaggaatatttgggagaatgaaaagggaattagaagcaaatatttaggttctttagggttcacttgtttttgtttattaagggaaacaaacaaaatccactttctggctgagtattttcttaggtctaatatatatttaacttcacgtataatctaaaagcatgcatgttacgttacaataattgatcgaattctttatatgacacttggtttatatacgtacgagggcaccttgtattgtacacacgtatgcatatatgtatgtatttgaagagaaagatactttctaagacaataatttccgtacctttggaaggcaaaacacagagtttatatattccaaattaaaagtgggataaaaaaatataataattctttgacaaaaacatacgaatagttaaatactattcaattttgtatatttttcattatttttcagtatgacatatttctgtttcacagtagataaagtcaactccataattttttttgtagaattataaacgaacaatgtgaatgtaaaaatgtcgagtacaaagaaaacagaaacactagaatgcatacattattacattcgacacaaacaagtcaaaaatatatataaatctgcctaattttatttcttttcaagtacgtattttaaagcgacatgtatatgacttcgatttggctctaattgatagacaacacaaaacggtcaaacaagtagccggttgatattgtagtcacatctctaggaactaaatgtctatacgagctattcataaactcaagaacgtactgatatttaatgtatatttatctctttaggtatagttgaacaatctacggtcagaaacttgaatttgtttgattccaaaatcgtataaggaattattataataagatgtgaatagagagtgaagtgagaagcgaagagagtgggggagaaaataaaaaaggagtcagagaggacacagtctctttctctctctcaagtctcaacatatgtatcccgtcgtctccggggtaccaaaatcaaagcactctctctttttttattttatttttttttggttataatgaaactttttatttattttagaataggtcttgtgtttgtttttttcttcttgttatttatttatttaatttaattttggcttttgctttgactatagattagataggacagaagagagcgaccctttattctctctcctcttgtactcttctccaacatttttaattattattcttcatgataatctgtgaacattattattttaaagatcaattgagtttttgatttattactcaaattgttaaggttttaatggatgataatcgtattaatttttattgttaaaagttgtatgcttttcatctatgaaattggtcgattattaaatacactttacatttgaaaatttcatctactaaattgatagaaaacaagatttattttgctattattcttcaactttatctatggaaatcaaaatttcagtagtttaaacgaataaactaaaacatgaaatcaattaatctagccgtaaaataatttatattatattgatagatgggtttacttgttgaaaggtgaaaaagacaaattgaaataccatcccaaaataaaataaaaagcttccaatatttggaatatagcgaatgacaatattaccctttctcaactatcgttttccaagatatactctcgaggaacaacatctcacacatacacatacacatacatgtacatgaacgaacacacatatatctctctctcttacctgtttttaattttcctggatttagttttattccttttttctcttctgcctttgcttcacaacacacatacctctctctatctctctcttccttctttttctctctctctgcgtcttactttgagcatgtttgtttcttcaagaagatcatcactcaacttctctctcttcttctaagcttctctttaacttcatctctctcactttctcctttctttctgagatatagagagagaaagagaacaaaaaaaatatcaaatctttcagacacccttttgacttctttgcctaaagaatctctctgctttctcttctccttagagaaaatcattttaaattcctaagcaaaaccctcaggagaaaaaaaaaacaaaagaatagtcatcatcatcatcaccatcatcatccttatcatcatcaacaacttcagtggcagcaatagcaagagaaaggtttctttaattatgtctatg

SEQ ID NO: 732 - DNA, 3000 bp, Unknown
  misc_feature (1)..( 3000): cDNA_ID_3058532_gDNA_ID_1620312_Annot_ID_153034 3000 nt of promoter + ATG
aattaaattaaaattttgataaatgtagggtgatatttgggatgttggtctctctacctgtgctcgtcgcctactacgcagctctggagtttattcattgattaaactaataaattcgattatatcatcaatattaccctttgttcatctttcacaagtttttttttttgttatctcttttacactttcctcctaaaggagattttgaagtatattcgagatatgaaaaccattaactgaatgaattaacctagtttatgcttaattttatactttcttaagctctctttattttcgtagtatgcataatttagtattttgttcacatatacgtatcaagaaaagataaaaactctataaatgaaaatacatcatgttcggatctaaaattgttttaatacgtacactaaatattataagccctttttttgttaacaaaaaaaaaaaaagaataaatgaaacgaaattcaggttagagatcaaataaaatcttgttattatttgattcatgatcatacatactaaccaaatcaggatttatgaaataaattattctttctcctcaaccgaatcaatatgaagataaaaggggtaatttagtcttttcgaattcgtttttcttaccgaatctctttagttttttttctttcttttgtgtggaggagagaagagaacgcaacactttcttcccaatctctctctgctttctctctctagacgtgatctctaattctctaatgtcttcctgcattgccatttcctctaacccctccacaatcggaggaagacgattcctgggagcaagagaaacgatgggacttcccatcggaaaatctcttagagtgagagaattatggtgtgttcttaatgcttaataatcaccgacacagccattgttcttcatcatctccatggattttgattccatttctcgggaaagcacttttctttccccattgcttaaccaaagtaccatcctttattccctctctgatgttctgattcaatcttaaaaacctcagcttgaatttttgttgtggggttttggttgggtttgtgaattttagatgcaatgtggcaaatgaacttgggatcagatgatacaatgggtgttgatgggtcttatccggaacgtcacggagagccagattgtgcttattatataaggactggactttgtaggtttggttcaacttgccgattcaatcatcctcacgaccggaaactggtactgactctgtttctgtgtttgttctttcctctgtatcttgttgactcaaagtttgtagctttgagggtctgtgtgtgtgtgtgattacaagctgatgaatagtctcgtatccaatttctaggttatagcaactgcaaggattaaaggagaataccctgaaagaattggtcagcctgaatgtgaggtagctctgtttcgaattactatcatagtaatgtcttctagttatcacattgtctcaaagcttctatttttgttgttgtgtctgtgcagttttatctgaagacagggacctgcaaattcggagtgacttgcaagtttcatcatcctaggaacaaagctggtattgatggaagtgtatcagttaatgtcttaagctatcctctacgtccggtatgtatacatttcaactttctaatctcaccactgctttgtaaaattttgcctctctcatgagttctgtttgcagaacgaagatgattgctcttactttttgagaattggacaatgtaaatttgggggaacttgtaaattcaatcaccctcagactcaatcaaccaacttgatggtttctgttcgtggctctccggtttactctgctcttcaatctctaactggtcaaccgtcttattcttggtcgagaacatcttttgttgcaaaccctcctcgtttgcaagatccttctggtttcgcttcaggatctcaaggaggtctcttctcatccgggtttcattcgggaaattctgttccgctcgggttctatgcattacctagagagaatgtattcccggaaagaccaggccaacctgaatgccaattctacatgaagacaggagattgcaaatttggaacagtctgcaaatttcatcatcctagagacaggcaaacccctcctcctgattgtgtcttaagctcggttggccttcctttacgcccggtaagctaataaaagacttcagattctttcctttatagtctcattatgtggtttggtaaattcttgttgctggtttgaaacagggagaaccactgtgcgtgttctattctcggtatgggatctgcaagtttggtccaagctgtaaatttgatcacccgatgcgagtcttcacttacaacaacaatactgcatctccttctccttcatcatctctgcatcaagagactgcaatcaccacagagctcaggaatctcctagtctcttcttctgtggaagcaaaacccacatcactccctgaaacaacctctgctaaagacaccattgttgatgcacagcactgaaaaccctgtgttttgtctatcttgaaacaatatgtaacatttgttttgctttatcttgtaagcatttatgtacagagatgatatctgatctaatctgattcgccttttgttgtaattttctattggcaacagtttgtgcattaaaaaaaaaaacagtttggtcttaaacgggccttcaaaaaacgtctaacaagcccaataataaaaccataatgaaaagaagaagaaaaaagaattaaccactcgcatgtgtaacgcgttgaatacacacgctcgttgtatctatctatctactcctccggttaacgggggtttaaagccacgtcggtgctacacatgtccctgatttctcctttaacataaaactaaacagctgttttgtccgcaatcattatctattactaataaaaaatctcaacttttgttccttactcttattacttcctaaatccgatcgaaacaactgttgggttagtttctaatttccaaga

SEQ ID NO: 733 - DNA, 3000 bp, Unknown
  misc_feature (1)..( 3000): cDNA_ID_2122339_gDNA_ID_1620312_Annot_ID_153027 3000 nt of promoter + ATG
gtgaaacacggttctgcaaacagatgcacattccgaccacacgagatcagtgctgcagccgcgtgagcacacggcaatccgtaaatctgccaacgacggcatgagcaatcccgtgtccgtatatccacaatgttggttctctctgtcgacacaatctcaaactcgacctcgttcgctcgtaaaacttggtaacaccgtgcgtctgcaaccgcttctgttatacgtctctctgcagatggcacgagtattgagttccatcccatgctcaactcacggcggttatcgaaccaagacgatatttgatgccggatatgttccatcatctgtatgattgggagttcatggcattcgagagcccaattgtataatacctctgttatccctaaaccgaaatgtccataccgcacaccttggaaatatgctacagcccagagatgcggcaggtagagttcgaaccactgaacaacatcttgcgatatctcaatcatttcgttagacttcgtttcgaattccgctggtgtcagcgcgtaaacagcactccagaagatattaacaagcttcgtgttcttgaatgtatcccggaagttttcgctaacataacggagacaaaacccatggaaagcagttgggaaatgagtttcaacggcttccacaactgcgctctgtctctcagagagtatcgtgagcttcggcatgctatcggtattcatcccaagaagcttcctcagctccgaaagaaaccacgaccagttttcatcgctttcattatcgacaatagcgatagccaagggaaacaaaccatcatccgcatcaacagctgcagcgcagaggattgcacccaagtacttccctttaaggtgtgctctatccaattcaagaagaggccgacaagaactgaaaaacccggagatacatgctcgatacgcaataaacaaccgttggaaacaattctcaggtcccaaagcagaaacagaagcaaaactcccaggattgactaatttaatctgctcacaatacgcaggaagaaaccggtacccttcctcataagtcccatgaagcgcagccatactccgctctttcccacgccaagcctgcatataagaaaccgcaaccccatgctcgtcacgtatatcctgcaatatctcctttggtttatactgcggattatctctaatgcgtgcctctactgatctagcaacccaaccaacggatgcttgctgatgatggagatcacggacaccttcacaagtatgctcactattaagcgtcctaaccgtaaatgtctgaacacctggacatttagcagcatggatacgccaaggacaaccttctttagagcatttggctatgaatcgactacgatctgatttcacaatccgaagatcaaaatgcagagctatagccaaatctttcaaagttcttctgcaagtttccacatcgggaaactctttaccaactgctaaaacatgttctgtagctaaaatatcgtcggaatctaaagtaattagagctccatcagccattaggcattgcatctggaaaagggtttcttcgtctctgtgatttcaatgcaaaatacttatcagcatctcacaagaacacacacttggtacatactaggagagacataaagaggcaaaatctcagatcgcaacacaaaaaaaaataactaatttccatgcttggatcacaagctcaattaacaaacaaaaaagacaaactttaaggaaattaaaagagacccatttccaaaatcaataacatttcccaaagatttcagacaacaattcaaagggaaattaacagacagcaacaaaacctttccagaaattggaaaactacggggatcttcgcgacagcgaccgaatcaggttcgtatcggactcggtggcctaactcggcgttaagcgactgtaatttgaagccgctagggttatcagcgtcggggagagaaattgcagacggcgacacaaaaagaaatgaaaggaggaagagagagagagagatgggaaagtggaaaagcttaactaaagatgatgacacgtgtcaaatatgaaatggttaattttattttgttgtatagtaagggataatacattaatgttttggaaacttaggataagaatacattaatgtttcaaaggattcagctctcttgattcggtattatatctaaaaaaagtcatatgtatgttttattagaggaaaaacaaatgttttgttataatttttgttttcaattaagaaataaatatgtatgtattgtggtaataaaattgtcatccggtatgaagaacacttgttgataaatgattaaatggcctcaaagatgttaagtgtccaaccaatccctgatcagagattttgggtcatgtaattaaaagtaattcacccttactgttctagtgtgatggatatttttgatagagcaatttacacttattcatgtttgttatcgctatttctgattatctttcacatgtatccaaagcggataaatcattacaactataaacaaaaattttaaaaatataaacaaaattttttaaaatataagaacaacaaaaatgtaaagtcatttggacgataataaatatataacaaactaaaactagatttaaaattagatctaagaaaatgggtaataagaatggctctccatgctttagggatattgaacaaagtagcaaaacaacaaaaaatagaattcgtaaaaaacgaagcaaaaaaaatccacaaaaaaagatcaccggagaagtttcattgatcttcatgtattctgattggcttcaatttgatctcttttctttctctctccttttgcttccttcctctgttttgttttcctttaaccatctcccaaaatactcttccctttaacgtgggtccttcaatctttttgaaggaccccgccattgtcaatcacctttcaaagggatctttattctttttggttttaggctatttagattattgaattgattttgaatgataatcatg

SEQ ID NO: 734 - DNA, 3000 bp, Unknown
  misc_feature (1)..( 3000): cDNA_ID_2122307_gDNA_ID_1620312_Annot_ID_153018 3000 nt of promoter + ATG
tatgtgattgacttgcctctgaagtctgaaccatttggaatatctctggcccgcttcatttctactagtcttaaggaatgattgctgcagggaaacatcactttatatacactagcgcttgtctctacataacattgttgttaatgtttgattcttttccacattcctctcttcctattaggatattttcttaggtccacagtcccgttagagatacaatgtattgttattagtagcatatcttgtgagttcaaaacataaaccaatcatacattgagctacacttccatgatctaacttggttttgcctatattctctaaattaaagttaacactaacagtatcaaactctctttccacaactatctcaccagaaatcatgattttcactctttaattagcatctatgttacaatcaacattcatatcataagttatcaatttggagatctcttcattctttgcaagcctccatcttcctccatcaatgtcagctgcttgattatctatatagcttgaagcggaacatggatgccgaatcttaagcggcctggagtggctgcttctcttcccttatacgttcatctgccacaagagcctttggtcctatttatattattcataatatgtaaaacaatgcatctaaaggtctcgaacgcataaaaccaaactcaagagtaagatatacatacctccaggacatagataaagccttttgagtattgatcatagtcctggttcttcaagagacagaaatttcatgcaacaattctttaagaggcaagacccctttatctagttcaccagcaaatttcttcaagaaaagttcccaagactctttatcaactttcccattcataacagccatggaaacaatcttcatcgcatcctcttctttccctaacttctgcaacccctcaaacaatatcaggaacgttgttttgttaggaaagcaaccaatctccagcatctcttcaagtaccctgactccttctttaacattcccattcttggacaacccttcaatcaaaacgttatacgtgaaagcattcggcttacatttcctctcatacatatcgtcccataatctacccgcctctgtcaactctcccttctcgcacattccagcaatcaacgtgttatacgtcaagagactagggatcgagcctttctcaaactcatcaaacaatttcctcgcttcagtaactctcccttctttacaaagccaatggatgagagtgctcagaagggcattatcaggcatacaattgttcttcaacatttttctccacagaccacatgcttcatctaccttatggtcttcacacaacgcatcaataactttacaacaaagagaagaatctggcataaaacttctctcaagcatttcatcgaacatgttacgtgcttccccagatttcttctccttacataaagctctgatcataacaccataagttacttcattaggctcaatctcattcttttccatatcatccatcaccgtagctgcctcagagaatctccctaacttacagtaaccatccatgagaacagtgtaagtcgtcgcatccggataccacccacgatccaacatctcttccaaaaccctcttagccgattccatatcacctctagcaacatacccacctagaatcgtagtgtaagtcaccaaatttggcactaatcccatcgaaggaatttcgtcgagcactttatatgcactttcaatatcatttttcttgcagagagctttgactagtagattacaagtgaagatgttcggcgtaattccaaaagactccttactgttcttaaacatggcatgaaccaaatcaaatctctgattctggattaaaacgtttaagagtgtgtttaacgatctaacggagcgtttaacaccgaaatcagggattcgaagaaagatcctcattgaagattcgtaacgacctgcgagaccgtagtttcgaagcaagtcgatgaagagattctcgccgcatttgatcggagggtatgagttccgaagatccgccatgagagactccacgggatcgaaagcacgagcacgggatagtttgaagagaattgagtggtaagtatcgtaattatgagtgaaaccgggatgagatttaccggcgtagagaaatatttggagagcgagatcgatgttctgctgttgggtgatcatggagactaatcgcttcgggaatagcctctgcggccacggtttgatcggtggcttctccgtgcagtattgctgaagagaagcggcggaggcggaggcggagaagagacgacgagaagctacgaatggagggaagcgcgtggggttcacgcgggaaaggaacattgttattgaattttgagctgcggcgactttacgaaggcgacggaagatgaatttaaatttgccggtgtctttattaaccggatacgtgccggtttgagtattcccggtcttctaaatccattatctttcacagccatagttaaccaaaaataaaaagtagtttggttagtaattttggtttagtttactttgtatttaaaagttgtagtgatacgtatacgtagttacgtacatgaaaagttgattttgtctactgcaaaccggttttgtaaacaaacaaaaaaaaggtctggactaatttgcccacccgctgctgcaactattcacatctttttaaacagtggtttgttatgtgtggctcaatgcaattatacaaatcaagcacaagattctgctaagttggaaccttttagattctaaatcacaatacattggcacgtgttgtaatagatagttattttaatactttttgtcgaacaatttgcaaaaatataatttggtcgctatatgatcgctaggttagaggttaccatcactgaacagtgctttggtcgtaaggttaccccatccgcattcgtattattctggataaggttttattttgggctcatttccctttcgtggaaaacaaagaaaaaaaaacaataatg

SEQ ID NO: 735 - DNA, 3000 bp, Unknown
  misc_feature (1)..( 3000): cDNA_ID_2122300_gDNA_ID_1620312_Annot_ID_153015 3000 nt of promoter + ATG
ggcttacatgtacgatgcttgtgctttgttttcaatggatgttccaacttccagctagattgttaacaagtcatatcttcatttagttgttcaccaaatccagtctcgcctaattttaaaaatttaatacatttggcgtatgtatattaggctaatgtatttggatctattcatgtatttttttataaaaattggagacaccgacagcattttcatctttagatgcagtcggatttttttcttgctgaaaaaatgtgtttcctctaaagagtttagagaaattgtaatttcctaaacaggattttaaccctaacattttttatatttatttaaaagtaataattcatttaaattcttcaaggtaaaaaatacgatagtccacaaggattgggagtaatcgcgaatacagaacaacagatcagagtatgacacgtggcgaaatctgaaagagagttataatcaaagagaaacgcgttccgaatccgacatcttctctctctctttctgaagtgaactgttgttgttgtgctctttggtttcatcgagagagaacctaaacccgatctgaaccaataacaataagaagacgaatggcgtcttcgtcgttctcagtcacatctccagctgctgctgcttccgtctatgcagtcactcaaacctcctcgcacttcccaatccaaaaccgctctcgcagagtttctttccgtctctctgctaagcccaagcttcgctttctctccaaggtacacgattccttcctcgattaagataagatcatttatcctgcaatgtagtttttagcttttcgaaatatggataatttcaatttactcaagttttgtttggctaatcttcgtcgattagtttttatctgcattttacgatttgattctctctgtatatatatttggcgtcaattagaattcagagaatactgtttttccggagaagaatgataaaatccgatttccagatttatgggtacaatcgtgatttggggttttttctttttaaatatggttgaaatcagtggaaatgtttaggaattttctagagtagtccaaagttgtaattcactaccgtagtagttgatctccaaggtcgagattatgggataactgtttctctgcatttgatgacattgcagcctagtcgcagtagctaccctgtggtgaaagcacaatctaacaaggtaagctccttttttagtgatctctttgagaaagtgtttatccagaaacttgttcatttctggactctccttctgcctttaaaggttagtactggtgcatcatcaaatgctgccaaagttgatgggccatcatcagctgaaggaaaggagaaaaactcattgaaggagtcgtctgcttcttctcctgaattagctacagaagagtctatttctgagttccttacccaagtaacaactcttgtcaagtgagtaaagttgctctgttctattacttaaatcattttaaccgtgattaatactttacctccatcatgtaggcttgtggattcaagagacattgttgagttgcagttgaaacaactcgactgtgaactagtcattcgaaaaaaagaagccttacctcaacctcaagctcctgcatcttatgttatgatgcagcaaccaaatcaaccatcttatgcccagcaaatggctcctcctgctgcacctgctgctgccgcaccagccccttctacgccagcctctctgcctccaccatccccacctactccagccaaatcgtcacttcctactgttaaaagccccatggctggcacattctaccgtagtcctgcacctggtgaaccaccctttattaaggttagattattttctgaaactaagacatgcgcttttcggttgatgttaatgcatgtgctttataaatagcgatttttgcaaattcatggctgctgcatttcactgtctgaattcgtaccatataactttcttggtctttcaggttggagacaaagtgcagaaggggcaagttctatgcattgttgaagccatgaagttaatgaatgaaatagaggtgagtttctgaatcatctgaaaatggggtaccatctgaaccttttatctaccttaactacttcgaatcatctcttactaaatacatacactaaaaaaatatgttgtttctctgttcaatcccacttagtcatctacttcatatgatttgtcaattatatatggatgaatacttgtgcttaacgtgtgccattgatttaactctgaaacttgaacttcttctcctcagtctgaccataccggaaccgtagtcgatattgtcgcagaagacggcaagcctgtcagcctcgacactgtaagttttctaattgtcgcagattacactgtcagaattttgtgtgctttactagaactagtttttacgatttcatcatttcaattgaaaggttatatataatttagaaagatatctctactgatattcgatgtttttgcgattttacagcctctgtttgtggttcaaccgtagaatcggcaccatgagaaatggagaaaagaagctctactaaattcattctctgtgctttggtaatacaaaatttgctgagacttctaaaaacgtttccccttcgctgtcactgttaaagtctgttaggtttgttagtttggtgaggaagaattgagttttctttagtttctctattcgttaaaaaaaaaaagatgagacatttttttccataagctctgtttttatttctttcctatatacacgaactcttcttgttctgttctatttgcaaattatccaatttcagaatacaagcccaacgtcaatatgggctgaataagggcccattttgtatgatagttaatgaagaatttaataaatatctgagaaagaaacggattgtttgttaacagaggcaactacaaccgcctttcttcttcttcctcatagcaatcgaaaacgctttcgcactttctcttgctttgacaatttctgtttttattcaatg

SEQ ID NO: 736 - DNA, 3000 bp, Unknown
  misc_feature (1)..( 3000): cDNA_ID_3058585_gDNA_ID_1620312_Annot_ID_153007 3000 nt of promoter + ATG
tgagtcacagtacagagtcttttttatctttctatgattagtcaagtcgcattaaaatctcaaggatatagatgaatatagatgaaaagaggttttcttccttgttattaatggagtcacagcaaatgttttttacttcttacgattgatcagttcacattaaaatctcaaggatatagattagatgaagctatgttttaaaaaaactgtttttttatgaagtttccatgtactgcagatcatgtggttggtggatatctttagagcaaaaatcgtggatacctcagagcaatctctaacgattgaggtcagaccttttcttcagtttatatgtgctcagatcatatggtcaaaatggttccactaagtctcattttttattgtgtaggtaactggagaccctggaaaaatggttgcactaacgacaaacttagagaagtttggaataaaagaaattgcgagaacagggaaggtaatttttcactttcaaccactttttgctccaatccttcttaactgtcaacaacgtctggctctaaatgtcttcaaattacatcttctgtcttgaaaaagcttgtttgaacggttggactcacatgtatcattacttgtagccacttggagcctcttttttttttttttttttttttggtctattatgtcacacatacagacccgagttcctttggtgaatctcaggacactctaaatggcagagcacatgaaattcccagtttagctttaaatacatgttcacatcttacatgaaaactgattaaattacttaatctctaatgcggattttatcttcttttccatgtagttaatttctgcgtttcactgactataatgagtaattttaagaatcagcttttttaatcctaactgttgttgtatactactactctagattgctctgagacgggaaaagatgggagaaaccgctccgttttggagattttcagcggcatcatatccacatcttgtaaaggaatcatctcatgagactgttgcagagaaaacaaaactagcattgactggaaatggcaatgcatcatccggggtatagaaatattagctaatttattttctccctgtgtatatctaagcactagtagattgaacgagattaactgatactttattttagggtgacgtttatccagtggaaccctataacgatttcaaaccggtccttgacgctcattggggaatggtctacgatgaagatgtaagacacgtttctcggatactgcattcgttttataattttctttttgatccagtaaatccttcgaaattagaggtcaaagtgaactaaaactgtttacctttttgcagtcgagcggacttcggtcccacacattatctttacttgtggccaacgttcccggagttctcaatctaataactggagctatctctagaagaggttataacatccaggttattatgcacacacttttgcttttagcttcaccgatgtgatgcatactactcatttctctcaagagtatgtgaaagttgttgcttttattgctctagagtctagctgttggtcctgctgagaaagagggcttatctcggattacaacagttattcccggaactgatgaaaatatagataaattggttaggcagctccagaagttgattgatcttcaggaggtgagctaatgattcgaaaccgtagtgtactttggttttaattttaattttatatgtctaataacgtttccctttcattggcttttctagatccaaaatataacgcacatgccatttgcggagcgagaactgatgctcatcaaagtagctgctgatacttctgcaaggagagatgttttagatattgctcaagttttccgtgctaaagccattgatgtctctgatcatactatcacccttgaggtgctgatatcatatctccctgaactttacaacaaaaagctctcgtagctttctgatatttcaagcttgagatgagatctagtagctgatgaaatccgtcgatttgcaggttacaggggatctcagaaaaatgtctgcattacaaacgcagttagaggcctatggaatctgcgaggttaaaaaaaagtttcttgatttatctctaatctcttcacagacacggtcactgttgtgtctggcgattcttatggtttgtgttttatgaaaattgaaggtggctcggacaggaagagtggcattggtaagagaatctggagtggattcgacttatcttcgtggatactctcttcctttgtagttctagaggttagtaatctcttttataatcacagatgcatcatgcattgttgtcgttttacatcatcatcatctgtgttatatatcaaaggaaattcttgtgcagaggacttgccgcaagcttcagtgtcgttcctggaaactagtcaaaaggactgcacgttgtttcagcatctgtgattgattgcttcctcacgagtcatggcgcttcgagttgttgttataggaggagctattttatgaactaaaaataaataattatctttgttccgttaaattagttttgcatactaatcaaatgtagaacactgttactagtttgtcacttatttagtatcaaagacgtgtattagtatatactccaatcgatcttaacttaacaattaagctctaaccggaccggacttggttagatcttaacttaacaattaagctttaaccggaccggacttggttagaatccttccttgcgaaccaaattagggcaaacttgtaatattgaggaaacgtttaattcttttcgtgtttcttcttcgcagcaattgcagaaacttaaaaaaaaaaactcaaaaattagatcttaattcgaggattctacttctgaatctgaggaaaagctatcccagatccgatcagatctgttttgttgattctcttcttcttcagtcagtggaagctatgatggattgctaaaagagaatacaatacgcacgaagccacgcttgagaaacc

SEQ ID NO: 737 - DNA, 3000 bp, Unknown
  misc_feature (1)..( 3000): cDNA_ID_2122286_gDNA_ID_1620312_Annot_ID_153010 3000 nt of promoter + ATG
accgtcctcctccgagccgaatcaattggtttcgttatcagtcacggttacggattaacggaaaccgccggtgtaatcgtctcgtgcgcgtggaagccaaaatggaatcatttaccggcaagcgatcgagcgagattgaaggcacggcaaggagtgagaaccgtcgggtttactgaaatcgacgtggtggatcctgaatcgggtttgagcgttgagagaaatggagaaactgtcggagaaattgtgatgagaggaagctcggtcatgctcggttacttaaaagatccggtcggaacagagaaagctttaaagaacgggtggttttacaccggagatgttggtgtgattcattccgatggttatctagagattaaagatagatcgaaagatataattataacgggaggtgagaatgtgagtagtgttgaggttgaaacggtgttgtacacgattccggcggtgaatgaagtggcggtggtggctagacctgatgagttttggggagagacaccgtgtgcgtttgtgagtttgaaaaatgggtttagtgggaaacctacggaggaggaattgatggagtattgtagaaagaagatgcccaagtatatggttcctaaaacggtgtcgtttatggatgagttgcctaagagttcgacgggaaaggttacgaagtttgtgcttagggacattgcaaagaagatgggtgataagacaatttcttaaacgtctttctttcaccgttccacaaaattacgaatcacattgattctaattttatggaatgcatatgttgtaccaatggacaatggcttaatctatatttgtaatccatctattgtatacgggatgtgtttcctttatatgtaacaaaatggtttggggtttatttgttttcacgctgtttggaaattggaatattcttaaaaatatatattgcctatgagcttatgtaagatgtttaagaatcttttttagtgtgtttcattttattagattctttaatgttttaatgagaaaacagaaaacctaaaccctaattgtcaagctttcgctttcctacataaaacatatgttactatatttctgtgagagtaaatattacttcttccaatccttaacctcatctctgtataaaaatgtcttcattctggaggaagtgacaacaagtgtcttaatttcccttatggagaaatgagtttagtgggtacgtatgatcttttagacaaatattgtgaagattttgcaatttattgcaaaactggtttggttatttttttagcgatcgttaccaagtttacaagtagtggactagtggtcaagccagtccgatgtctgcagactgcagctggtggttgctaaccaggttatctcttctatagttagatatgcacttcctggttttggtaatatggctttgacggaatatggtaactactgtattagtcacttgttttacgacattggtgatagaaatgatatatacttgctaggtttctgtggaagagcttgttgtagttgtagccttgtaggagccaagcaatgcataatggagaacaagaagtgttagagcatcattatcaatgggttttcaaaaagtttagaaaaattcttaaaatattatataagataaaatatgaataaaaaatagaaaagagttcttagaaaagttaaattggctcttaaataagagatttttgatacattctcttaacttattaagagcctcctaatatttaattattattttatatataaaaatgttaagaattttattaagaacccatgaataaggatggtcttagcacattttttctttctctcttttttcctattaaacccaaacaattacaaggtccatgacgccaacaaaagcacgcaggcccataattataaatcttacaaggcataaactgcctaatacggcacacatgcccaaaaacaagaaaaaccgatctgcattatgtatgtttttttcggcgagtatgtgcattatgtatgtttgatgactaattagtttgagtaaagaaagattttgcttttctgcttctgtgttttcttcgacacttcgatatgtagttcccgtttctggaagttggtggtctggtgttggttggtgggtatagtaagtattgtatgaatcgtttgcattccgacattggtatgagatccgatgttaattaggttcctgtggaaaggctcgttttccttattgaactcatggaaaagaacaagtctagttaattgacgttattgatgtttgtttgatcactagttgttgagtaagagagattttgcttttctgctttgttttgtattgtgaaaactgtgttttaactatttatcaaatggaaatacaattttggtaacattaattgtccaagaaatgaactcttcaagactctttagattatgaaagaacaatataacagaatccaaccaaagtcatcagctggattaaataaaccagcagttctttggtttatgctgcttcagaggtgttgtttcgttttaagagtgacgccgcttcagtgagccggaatcgatgaaactgcttccacgaatatgccgtcgtagaagacgaagacactttcttggctctttctgagctatcagtaactaacttacctagttgttgttgtgaagtagaggatctgcggctgcttttgttgaattgtccaactctatattttatgttatgctgtatggatattgatcacaagtaacatattcgacaaaggaactttcgtagactcacataactgtttctcctgccttgtaggggaagaaagttcgtgcaggggggatataagttgacaaagatagatgggaagactctgaaatcaaattttctcttattttaataccactactccttttactaaagccaataaagaagaaacattcagctacagacgtaaaaaaacaatatggctgctgactttaaattttggttataaaatcacaaccataacaaagctaggaagagagatagtcatcaaaatg

SEQ ID NO: 738 - DNA, 3000 bp, Unknown
  misc_feature (1)..( 3000): cDNA_ID_3058629_gDNA_ID_1620313_Annot_ID_153058 3000 nt of promoter + ATG
ttaagcttctccgagcatccaccctcatgtggacccactacagttatggccgccggtaaacaaccgaggggcggaagtgtagtcactccgatccttcttgctcctaacgaatataaattctacagaatccccaaaacaaaacaaaaacagaacaaaattacactttaactatctcaacaatattaccattcccgccaccataatttgatcaacattttgactgtcttattccgattacaccatctaagtttatgatattgctcaaatcattctatcggatttctcatttaagcattatttaaacaaacaaacgaaaaatggagaaaaaataacctgaataaaactggagtaggagaggataaggagatcagagaactcatcaggtgattggtctctgtagaggagagggttgatatagtagttttgtatgaagtcgctgctccctgcgctgacgatatagatgccattggagattatggcactggcgtttgaattgttgtttgaggttgcgatttcttggattcgactaatgtagtctttgtaatgttctagctgttgcggcaacgatattgcactcttcataaccaacaatgaaaataagtaagaagacgtttttatctactaaagtttaattttgctgttagaggacgaaataagagctatggtactaacgtagagcttggctgtgccatcgtaataaccagaggctgcagaggcgaaattagctccaatcaaaaggttcttgccttttgcctttttgcttagataagcttgtgggtatgatttgaacccaagattctcagctacacaaccaacacacaaaaactaattcatcatttagttattatatagcatgtacatatatatgcatagagatttctcaacctaatgcatgtacattgttttcttcatttcagtaacaaattgctccccgtgcatgctaatacaacccgagtacccgacaatcggtggtttaatttttctactctaagttgaagaaatcatcatcaagtcatggctcttaatgttttactctttgagtacacatatacatatatgctgttcaaaagtttatttagtttaaatggatgtgtgtatggtgtatatgtatataaccatgcatgcatgtatatcttcatgttatgtgtcactagctatatatatatcactgaaataaacaacgaagaaaacagaaaagtaccggtgaagtcagtagctaactttccattgcagaagcgtccggtgggtgtatgggttgtgaaatctcttccataaggagggaaattagctttgacgattgtgtagatatcattgttgtttcccacatcaaccaccgaatcaccaaatatgaaaattgctggaaccagtggctgtgccttcatcaccaccattctctcaaaaaccattaaagatccaaacaccacataaagatttaaccaaattcccgagaaacccataactttgttgctcaaaaagatgaaggttctaatgatgatgatgattatggtgatgtatatatttgtttctgcttttgatgcttgtgtgagtagcatgagtgtgtatgtagtttttgcatgcaagggtgtttatatagaattagaatagacaaacattttggggattgtaataaatgtgatagattaggtggactcaaatgtttttatataatgatacgtttatgtatctatcattatatgtctctctgataacgcacaacacattgatttgtctctgttggcctgaaaaatgtaaaaacactttgcaaatagcaaagagggacattgaaagaaagtagttgcgagacttgggcattgatttgtctttaacatttatagttctgttacgttgtgtgtgccatttgacacttgtctttctaactcattcatacgtcaatacgatttatatatgcacacgtaaatatatcttttgaaaaatagccaatgtaacgtcgtagttttggtacaccggtatggtggatttctcttttactttggtttttgagtccgtatattattagtcacatagggcggcaaaacgtttttgagtcagtaaattattgagtcaaatagggcaaattattagtcggtaaattattacttctctttttttttttgtcaatcaattacttctcttttactttggttattactaaggatttggttggaaagtaaaaaagaattcagaaaatagagagggaaaacgtgtttgagtcacatagggcataaaaagtaggtcttcaagtctctgatgatccacgaagctttcctagtcgatgatttagctgattgtaacttcaaaaaagaaagttttcttaaaaggaacaggatgaaatcggctatcaggtgggattagtccggtatatatattattagagtacacataaagcccaagctattatctttaaagaagtccatccaaactcatgtaattaggttatctagctagtaatctctcatatatatagtcatgtattgtgaactatgggtgtaacctagagagttgctcaaaaaacaaaattgtgttgaaattggataattatccataaaactattatccaacttaagctccaagctatcataaaactttgtcaccaagtcttgtatagttaattcattaacttccatatatatatatatatatatatatatctcttatgttctcaattgtagtgtaagaccatctccaatggtacttcatttttcaagaagaagaagtttgctcattcacttttattctctcgttttcatcttctttattaaattctttgtttttattaaaaatcgaagaaggggtctctcgagtctcctccaatgggagaaaaaacaatctctaaccactaatgaaggtatttaacgaattcattaacttattaataggcaattaaattttttttgattaaaaatctttcaaaccaaacgaagtggataaaaaaacgcttgaaggctagctagtgtgtcttcttcttctccctgaaactctccctcctcatactctctgatg

SEQ ID NO: 739 - DNA, 3000 bp, Unknown
  misc_feature (1)..( 3000): cDNA_ID_2122253_gDNA_ID_1620313_Annot_ID_153077 3000 nt of promoter + ATG
ctaaaatgccattttctcccggcgtgtaggggagtgagaacggcgattctaaagaaattcggaggaagaaggcggttttatctaaaccggcaccggtttgctggataccgatcagaaatcgtgagatcagtgttttgtctctgtcctttagggtgggcaccatggagtcctagactagtggaatccgccgtgttaggttgtgttcccgttgttatcgccgatgggattcaattaccgttctcggagacggtacaatggccggaaatctcactaacggtggcggagaaagacgtgaggaatctacgaaaggttttggaacacgtggcggctactaatttgtctgcaatacaaagaaacttacatgaaccggtgtttaagcgggccctcttgtacaatgtgccgatgaaagaaggagacgccacgtggcatattctcgagtcgttgtggaggaagctcgatgatcggtcgtacagaaggtcaagggttttaagccaacgagaagtcgacatgtaggattctgtgtctgaatggatgctaggctggaatttttcggactgtttcggaattggttaaccgggaatgtctcgagtggggtccacaacgtgaggggattaactcgggcacgtgagatgtttactgagctggcaattattgagtggaatattaacgtgccccagggaagtgaaagtgtaaagtattgctgacgtgtaattcttttgatgagtaggcatataaattcttttgaatatagttgatcgaaatgcaaagttatatcaaatgtcaacttcagtttaacatttaaaagtaacaactctatcaaattaattttcttatatgaatttactaactacaactacgcagctaaataatatttggtgtcaattagcaatataacaactaacaagtttagtataagaaattttgggtctagattgattttttttcaaatgacataaattatctaagtaaggtgtaatatccatacaagttactttagtataatgccgtttaatatccgaattgtagttttatgaaaaaataaaagaaataaacatttatcttcatccagagaacaattttaaatgaaaaatccaacataaaatttatttagttagaatacaaataaattaatttacaatcgtttagttcattctcggaattctgacatcggatgtaagtaaaatgaccaaaactcaacagtaatatgaccacatcaagaccacatcaaaactcaacactagacacttacgaaaccatccatggtcttgtctttgcaagaccacattatttccattggtttttttttccttctctaacaacatataagctagaaacaacattattcgttattgtgttctttctcataacaagtgtttttcattatattgttgtaccaacttttatcgaattaagtttcctatataaaattacttattaactactaccacatagctatatagtatttggtgtcaattagcaagaagtttgatacatgaattttgtgtaaagacagaatgacaaaaattgtttaactaagttgcaatatccatataattagctttagtatcatgcaactttatttcacagttgtagttttattccaaaaataaaagaaataaaccacaattatttgggtttaaattaaactcaaaagctcttgtttatcttcacacaactaatttttttataaaagaaataaatccagtataaatctacaatttgttttaaagaatacaaataggtaaatttacaatttgtttctaaattcttctataagttctgacatttgatctagctaactaaaatgatcaaaactcaacacattaaaaaaacgctctgatcggatctaaaaatttagttgaccatctttaaatatattttatggataaaataagtaagaattaggaagatataattgggaaagtaatgaataaagataaaataaaaaggatggtgtttgtatagggaaagatgaaagacagagcaatgtgagcaagagacagctagtgtgtcagaagaagatgcatatatcaataaatgtattgtctattaaattcttatttacacatattttttgaggcccacattactttcttatcttatgtcttgtagacatcacaaaacaataaaccaatcaatattattgtaatactataagttacacaattatctatgttttaaacctttaattccttctactatcgaatacacttaggttgatctatattcttttaattacaattagcggaaatacaaaatcattgcgacaacgagcacagtttggaatgattatcatataacttgttagagtgaaattgtactagtccaaaataccaacttcattctatatttcatacacaatatgttatttttttatgaaaagaaatgaaacgtaacaatctcgcttgacttgactgtatgagcattattttctttacaagttatttgatacatgtaatgtaaccccacagttagagaaagtaacaaatatgtgtcgtacagttgttttgttctaaaatcgcaacaaaaacaatgaccattaacataattttggttcgaacgaaagtgacacagtagctcatctataatgggtatggtcattgcctcattggtcaagtatcatccctggcactaaagattggttaattggggtctgctggatccatattggacctattatctaatatgaacgaaaattatataaaagggcctccaaaaatttactttactaaaaggcccaatattatgttggcccgactttgaccatacttctaggctcttttttttttgtttggacatcatttcagttcggtctgaccgtttacgggtttttttttcttccaaaccaacaattccttaagtaaaaaaaaaaacataagataaagtatcattcttattttaatagttttggtccgccagaggcataagcatacaaatattcttttctcctaaagttttaagaacagagcaaggttaaaaaaaaaaacacaagtcgcaaca

SEQ ID NO: 740 - DNA, 3000 bp, Unknown
  misc_feature (1)..( 3000): cDNA_ID_2122249_gDNA_ID_1620313_Annot_ID_153076 3000 nt of promoter + ATG
tagagatgtggttcgtgattaactgattgttattagtgtcgttattgtgtcaccgttgttattaaaattagataaaacgagtgtatatgtataatgtatatttcaaaatgtttgatttgtaattttctatacatcaacacgaaagatccgaagtttggagtgttcaattgcccaaaaacaaatccatctagcctcgtccaaaaccagatggcagatacagaaccggaaaagaaaaggttccatggctacgctacgcaatgcaaatgatttgaatctgatgctaaggctatgtcgctgtataaagatttctagtttccttctgattcaaaatcatgacagtttcaaaaataaaataaaaaatcaagaatcgtatcataagttgtgaatcaaacgattgtgcaaatatataattagcttgaagtagtttttgcatgtaactaccaatcgtcagtgatcgatgctgcaccattgtcaaataaactacacatttttcaattaccaccaagtataagttaggctggcgaagtaacaaaattgaatctattattagaataaaatactaaatatcattccaattgaagtaacaaatatattacgccaaccttatccaataattccaattaatatattttgaacaaagtaatgaaaggaaaaaaaaaacgcatcaaccatagttggcaaaaatagtcgctcaacgttaaaatggataaatttatagtatactgtaattttcattcaattcaattgtcaatactatacatgcacgtaaatccatttttgtctctatgtatataaatatacatgtagctttttatgttcagatgggtaaatgtgtgaattgggttggttacaatattaaatgttgcatttactgtagtctatctaggtgacttaaaaatgcgaccaatcagtagctgaattcttattaaacaataaatacacccaaattttaacagatgccgttactaattaaccattttgtgattggtacaaccactctgatattctttatccatgttgttgtgacggtagatttcgtttcttagaacattcaaaattttgtgggggatatagtatgaaattatgtacggtgactttgaaaccgtgactgattaagtgattaagttttggaggatatgaggctaaatatttgtttgaaacgtatttataaactaagttttacaaagtttattattagattaataacaaaaacctaaacaaaagatattcgcctcaagagtcaagaacattcattttctctttaacctttcatctattatttgctccaaatcacagcagagaccataacaaaaagctgttgtattttagtatttatatgcttcttttacaacatacaaaaaaaaactttatttcgtcttcgttgtcttaccaagtgggcattacttatacctaaagatagaagatgtccagcttctatcatcttaggcaatgtccgtgctcataaccacttttctaagtcttacttataaccacttgtctacttgaattgattggtgtgatgattaattggccattgatagaagtataattaggacaaagtaaatatggttttaatgatatctaaccccttaaataatcatatactccttccctttcactatttaaatgtttaataacgttgcatgcatattaataagtcaaaatattattcttaaaaacgacaagattatgacaatactaaggagatactactatacttggagaacaaaataaatgtatacaaattgttagccaaccaaagaataagtatacgaagctcatgcatgtatgacacaacgacacattctgataacaaccaaacacttccgaatttaacaactaatgaataacattacaaaaacaatggattttaaagtctttttcgtgtgtgtatgtaaatgtgttgcactctttctccccacacacagagtcacagacccagtggccactggccagtgcccttgtaagctttttagataccttttgcatttttttccaagccccactctaaatatatttataatatataatattatagtggatttgttcgattacaattacatgttattattttccaaatttaaatccgaattttagatactaggttgaaaaaacggtattttaatactcgtttgggatgaagtacgatgtatttttggctgctcattttctaactgaaaaaaaaaattatcttatttttatgtagggactattaacaaaaaggctaaaaagagtttagaagaagaaataggctaatcttttgataagaaaaatatacagtttctgattcaaggtttagaatttatatttgttggattagcttttaggcttctgagtttagttttaagggtttggaatatataggactgataagcgtatggtgcaaattgcattgtatatcccatcgaattattaattaacttagtttcattaatttgtcaagtttcatttctttcattatgagaactttgtaatcagaagtgagttataaaaagtgtatttaaagtcacatctaacttgtcattattaaactacaaatgataaacgtaatccaaaaaagcaacaattagcttatcaagacacatttacataaaaagcacatgcccctcacgggatcaaaacatcccaacttaccaaaatccgcaaagtaatgatcacggagccaacaagggcattatagtcattccacgttatctgctacggttacgagaaacttgaccagcgatgaacccgagaccattgccgagctctattctgctccattgcccatcaccatgtgacgaccttctctctctaaattctctctgtactctgaaaaaaactctttttttttttgtgtgggtttcttaatgatttgttatgaccctgttggattcaaaccaaacccacacgagagaatgatgagaagtagatcaccggttttgtaattctttcaacgactctttctctacatttctcccaaatctctgtctcttgagtttgatttagctaaatcaagca

SEQ ID NO: 741 - DNA, 3000 bp, Unknown
  misc_feature (1)..( 3000): cDNA_ID_2122205_gDNA_ID_1620313_Annot_ID_153063 3000 nt of promoter + ATG
ttggttgagtgatctatgacatctatataaaaccaagtatttagtgagattgggctagagttttggaccttgaattgtggtccattacaatatagtttacgaaataaatccaaaaaaaataaatttttttttgtcaagagctgtatgtttattgatggataggtggagccaatataaaattagagcatctctaatatttttttctattcttgattttaaaataaaaaaatcctataatagagctggattttattctattgtctttgtctatttttatctaattttttaactaaactatataaaaaaatatgtattttagaggtaaaaataaaagtaagttgaaatagattttattttaaaatagagtatataaacacaaaatagaggtatgttggaaatgctcttatagttgtaaataacaggaatggaaaatgttggaactgaaaagtattatttttttctgaaattatgtcatttgtacaacattgactgttaaatttaacattacgaaatattttaattcattacaaaaaatgcacataattatataattttaatacagtgacatgatatataaatgagacatgatatataagtggtaagaaatattgaatatttttgaaagaatcatatttactataaaaaatactgtacaaatataacaggataaaaatataaatatgtggttggaaaaatatatagtcttattagtcatttttattccacgaagaaatagtagatacgagtgtcaaatattgtttcgagagagatttcaattccgatgaaaagacaatatgtgttccggcacataaaatcttaattaactaaataaaaattatattaagatataaatttacatgaaaaaaataataaagaacagaaatataatatgtttttttccttagattcaatactcataaaaactctccgaaaagcatagtggtaacaagcatttgaaatgtaaaatatccttcctaacagtaattgtgagtatcaaatgtcctccttcttaatgctttgcgcagaaaatgtgatttgataatataagagtttaatacttcctgaaaaattctactcatttagtccaatgaaaagcgaccacaacgtatagtaacatctttattaatatgggaaaccaaaaattattagattatagctcatttgtctgtacttttttcgttgttattatatatttttaatttagactaagataagataatatatatttgtgtggaaagcaagtaagttgatgatatctaatcatgtacgagtgtctaatttttaaaaaagttacataaaaacaagacatgacaagagaaaacattatttgaaaaatgggacaaatgttgatgacaagccaaaaataaagtaaaaatagtataaacttatggttaattagtcttttgtaaatttatgggcctcgaaacaatataaaagacattccgtggaaagtgacaccacaccttcataacttagccacaaaggaaaaaaaaagggcattgctttatttatctcgagatatgtttttataaccatatttgaatgaattgatattatgaaaccgcctcattgatccaaactaattttgtattacattacatgtgaattgattccattggaaatgaacgaatgtccttcgtctatatattggaaatgatacatttgacccgtacgtaaaccaatcgagtcttcaagttacctaaattcatcaacttgtttgaaaatatccattgtttttttgcttttgaaatatccaatgttgttcaaaagtataacttgcatttccaatggattcttagtttcaacatatacaaaacacgtacgtataaataaatacacaattctgtataaacaaatacacacttgcttttgttctgtgcatacaagtatgaagtgcgtcaaaagtacgcattatgtggtttaggtaaccagaaatgttgtccatgaaaaaaaaagaaattagaaaaaagaaagcctaaggagatgatgccaagaaagaaccttccattgactggtctccattttctttcttttttaagaatccaaatccttattcacctacgcaattatactttttgtatttgataagtaactacgtgtttgctaagcaacctttccacgcctgttcaaaatgtcgaatttattacttaaattcgggtagaaatttatcagatttgtcttaaaaagtagtaaagaaaaagttgttgatcattctactctatgaagcagaaattacatatagaaaataaagatagcaatatttctctttcttttttactttttatacatcatgattgatctcttttttttttctattcaacatggatgataaaacatcatctataatataaaataaagattgactgattattgacttggcaacggtttaacattaaccaacttggaattccacttccatcttcaaaactattgaatatccaattttcttagatgtgccacatttactcacatattataatttttttccaaatttaaaagatacggttattttattctttttgttaaattatatataataacaataaatagtacataaccgtatatatcatttatataaacaattttttttgataaatataaaataagaaatcgattatttcaattcataatattaaaatataaatcgattaatagaaagaaataaaaatcggttgataaaaaagtaaatcaatcgaattaaaacacatgtgatattttggcgtaatctacacttgaacattttctgtttatccgctgttacttctctctctctctctatcccaaaagacgacacaagtacaaacacaaatctgcaaatcttcttcttcttctgtcttcatgaatttcaagtctaacaattcctagccgtttacaatttgacggcacaattcttcattccttgtcgtgcccggaagtaaaaagatgatctttttggtttctgatgagataaaacagagatcttgttaacacttataagcagacccaactcgggaagctatg

SEQ ID NO: 742 - DNA, 3000 bp, Unknown
  misc_feature (1)..( 3000): cDNA_ID_2122213_gDNA_ID_1620313_Annot_ID_153065 3000 nt of promoter + ATG
taaatccagtattattcgacaaaaactacatttatacaataagaaaaccaattagaatccgtcgagatgttcttaatcaagtaaagagcaaaatcaagggtcctgaatccataatccaaacatttcaaccaaacaattcgaacgaaatctgtagcgataactgtatgagaacatcttgcaagatttaaaatttataatcacgaaccaaacggataaacaataagaagatctcacttgggatatgaggaggtcgagtcgactcagtgaatcatttggggaatttgggatttgtaccgagccgcggaggtgtatgaaccgacaaatttggacgtgacgatctgggaaattgatattgggctgtagataacttaaatgggccgtactcgtataataacttattgggctaacttcgtaaatttgcataaaaaatgtttcgaagatttgtagcatcaataattaaatatattttattagtctttaatttttgggaatcttgcaaatgtaccgcttctcattcaaaatctaccacaactgaaaacaattttcaaaacctacaacatttcttgtcacatgtaaatttgtagatgaaattgcctttgataatgacagactgcggtgtcagatcaaagaataattgatagtaaactttcgtatttttgtcttcaaatattcttacgcttttaatagattgacggacccaaaaataatttttattggagtcataaaataaataattttaaaattttttatatcgtataatatatttcaaaataatattacaaaaacactaaacctttttgttaatttataatttatatttattaatttagtatcaaacacaaatattgctactttaaatcctccaaatatgttgtgattttcagaaaaataaatataaacttaaaaaatgaaaaaataattatgtctacaagaatcgaacatggtagaagagatgtcaccactttgagaattaccaaatatgatactggcactttaggattttaaaaggactaaatgttttttatatatttttaaggggggtcaagtgacccccttccttctttagtgggtccgccatggactcactcaaatttgaataaagcatttgtatttgtgtctaggctattatagattcatgtcacttgcattaccaaagattgatgtttgagttcatgcattaactactcaaattacaaaatcatatatatatatatatatatatatatatattgtttgtagattaattttctgtgttaacttttaaatttaaacattatatatattaatttatcatatcaatgagatataactatataaaacaatttaagtttctcctaaattttattctttatattttaaattatattttataattaaagaagttgatttattgttaatataataaaaattctatgctaattataataatttccaataacgtgtttgtaataacttacatttgaaaggttactcaacgaatgaaaacctttattttcgagtggttcttccttcgacatatcaatcatttattttcgagtgattcctagtggtttaatttatatggaaaatagggttggtatatggatcattattaaaaataaaaataaaaataaaaatatgggtcattattgttgaaggtgcagttatttgaacaactaaatagagtaatacatgctttattggtttggatctacaagatcgaaatgtttaacgttagaagaagtttttggtttttaatagattcagatttgaataaagtcttgtaatcttctgtctagcctattataaatttatttcgcttgcattatcaacgaatgatgcgtaatctagagtctagagatggttgatgaatcaccaatggattattcgtttatattgttgatgaatatggtagattttgaatatgattaacagtgaagttggtaatgagttccactactaatcatatgattattttatatacatatttttgcttaatttttgcttatgttttactatttttttcaaattattttatttttatattttaaatttacaacgattatgatagagttttataaggaattaaattaccgttagattctattaaattcatataaataaaaacaggctaatttttttcagacagtgactagaagcatgagacatcaacttaaaatatatgaaaacaagacattttttattttattacaagaaacgtcgatcagtaatgtctttttgtcacaaaattaaaagtgttatccagtttactcacgttatttatttaataaattaaagatagtaaaaaatttcaaaatatttattatgttcaaacttatatgaagtttcaaatattataaatatttgaactttaaaaattttaaactttgtaaaatgtgtaatatagttttaatatataaattctataaaaagttgataatattaataatttctgagatctataacaattaaaaatatatatattatgtgaaccattttaaaaaaactttaaattgagttgaatcagatgtcttttaaatagaaatataagttaaaagaagaataacaaaatgatgtttaatattgttggacggggatatatagtgtgacggatttggatagatattaatatgagacgatatattacaagtgaaatttcttggaacttacaatcaaaatacaattatacaatactaaatactaaacaaaataaacaatattaataaaacatatacaacttaaaatttaaattttttgattataaaaatcgatcactgtataccacgagttaaaacctagtttataaacaaatgttaaggtgctacaatttttatgtgcatactaatgacaataagaacaagaatgatcaaatagacgagatcttcgcaggtgatatttgttcctattgtaacaagttaattttaattaatgacactaagaataagctttggtgtgaggcctaaaatgatctgtcttcttgaaaataagcttttaaacataaaaatattatatagggtcatg

SEQ ID NO: 743 - DNA, 3000 bp, Unknown
  misc_feature (1)..( 3000): cDNA_ID_2122240_gDNA_ID_1620313_Annot_ID_153073 3000 nt of promoter + ATG
ctgcatgctaaatgttaaacatgcgatttttggaatgttaattaggtgtaaattatgatgccgtgtacgatgaaaataaaaggcatatatggagaaatgagattgaatatttctttaactgccacaacggtaatttcgttttcgcatgtttcttaaaatgtttctttaaaaggcatatcatgaggaattgaattattggccgacaaaatagtttcccttaatatggaatttaaggatcttaattaattggagaaaactaatacgcatacaaacttgttccattcatgatgacagtgaagaatgaaagcaaagcatgtcctatgcatttatggatagctcccatgtttgtggcttcgtattattatctcttatcctgaattatctttgttgtgaatattgccaacatattaataaggcattacaagatattggatattgggtcatcatattcaaaatcatactgtaagtgatatagagatctatgaagtcaataacaatgtctatttatttctaactcaagactagttatcaataattagattattccatatctaagaaaacattttttcttagcttgctatctataacgtaatagcaattcttcataatatctatataaagaaaacgatacaaaacataaattatagtagattttatcgcattatcgcgattcgcatatagattttccataatttccagttttccacaatctcatttcttatatcgcaaaaataacatttaatgcacaatattattaaatattgttggttagatcagcctcagtttattaattgaaaaaataataatgaaaaacaggttattccgcaacttagtcgttctaattaaacccatttaacacagactagaaatactattggctcacatatatttagttggtcatttttacgtactagtgatttatatattatagtgtacattatacactaatacactactgtatatgttataaaaagcacgagtaagtacaacgaatcacaaagctacattatcttcgtgcgtgaccattcacacagaaaacctaagcagacgaaagagagaagctcttaatattcaacacaataaaaagaaaagtagaaatacaaagatttgcttgacatgctcttagattaatgttggtgaaagagaccatgaaatgataactcttgtctccttacttttactattggaaatacctttttttccttcttttttttgggaataatattatactattcatctgtatattgttgaaggagagaatcatttacactctttttaatggccctattattaatattaggaatatcaccatcatgattatcacttaacacatgctgatgcccagcaaaccaaatatggatattcactttacttccacttgcagtaaaagtcaataatcattttcaacaaagtatttcaaaaaattgattataaatttctgcccaagaaataaagattgatttttcgccaccttatttacaagttttacaccaaaagtaaagacatggtacaaaactttgctcagtctaaattgatattagacgaatatttgaggaaactaaatatttatttgattactttcgtattttaagttgttactccagttacatacaaaatatagttttttgacgttgatactattacactagttacgaaaaaaaaaactatattacactagatatcatacttgatcaatgatcgattagcaaaacaaaagaacatgaatatttttacacaaaaaagattatatccgtaattttgaatataagatctaccccatggataatcgatactgacaaaaaaaggaaaaattaactattgatggtagattttatactgactataatattaaaaaccgacgatatatatctcttgctcccggttatattatgatctagcgatgttatctttcactaaaaataaataaaaaaatgagctgtttattttgtaattttcacgtaacatttgtgaacgagaatgtgagtagcgagaacatttcttcttttattccacgagtagtgatcgatttaataattgaaaaagggattccatatcaacttttctcaatattttggtgggaaaagtttggttacttgcctcttttgctgactgtggaatccacttcgcattgactctatgcttctttgatttctaaacaaaaaaaaaaagaaaaagaaaaatggtgttcgaagaagcattcgttcccgctcttttcggtgctactcgatttttcttgtataaagacaagaaacttaattgcacatcccaagaaaaccgaagaagaaaacaaaagacttttacaagagttgagactataatgtgagtgagtgagagaccaaagtcagtaaactacgatattggtccaaggtcttctcttccaccaaatacttacggcaaaagaaaaaagaaaaaggcaaaaactatagcaatatatattaaaaagatacgcccacttaaatttttttaatatcgtttaatgtacaagaactaaacttgaaacgaatgtataagaatgattgaaaaaagacatgaactatagttatatttttgaaacgttttagtacgtttagggacataatttgtctgctctgctgttcataaaattatattttgacattgtaagttaacattactttgaagttttgtgagatattttgttctttaaataatattctaaatagtttgcgcgttgtaaattataaagtggggttagttgaaataatgttgcaagatatgatacaatcatgtggcatcattttatatttcttttaatttcttagttattcgattaaattattgaaaactcgaaagagagctacctgaaaaagcttgatctgctttaagcagtccactacaaggttttactaatatataactccttccctccctaacccctcaagttaaaacacattctctttctctctctctctctctcacacacgaacagttatttagagaatcagaagatcctttttaacctcaatttagttgaattttatg

SEQ ID NO: 744 - DNA, 3000 bp, Unknown
  misc_feature (1)..( 3000): cDNA_ID_3058621_gDNA_ID_1620313_Annot_ID_153069 3000 nt of promoter + ATG
cttgtcgggaaaactccaaaaccattgcatctacggtttgatcattatcgatatcgttgttgttgttgttagatccgatttggagttgttggcaagtatataacatggatgaagcagccgtgatgatctcttgaaccaaacttccgatgttagccacggccaaagacgttgaccccgaggattggttaatgttattagtagataccatgtagaagctgaccagagattggatctgatggactttttcatgtaaggtagatagattgtatagaagagagagtgaaacgtcgtcgtcttccattgatttcgtcccggtcgtggtcacgggattaacatagatttgttttgaggaagtactggtctccccggagaagctagagattgatccttcaactttctttgcaatatgctcatctcgattcatcatatgtatatgcatgtatatgaagaatctagcttgagttttgttcttatattttctttggattttgttgaatctttaaattctttgtggtatatttgtttcatatatatgccagacggtccagactctagagagatgcaatgaagaagacaccctaccctctaccgtataaaatactcgcgagttgtgacatacattcacacaaaataacacacacaaacaaatacatgtcacacatatagtaatttattttttcgtttcactttatcaaacatcttaaaatcggaaagattatactaaattgagtaaaatttgaaaactaagctattgaacctaactatattttgaaccttgcagtttattagtgatttaaaatccaaaagatattttgatccaaacaaaatattgtaattaaaaaaaaaaacattctaattgatatattatgtcaagtaatgtttttttttcttaatttagaagttagaatttaagaattttatgttttctagagacgggacacacgttaggttacattcatctgttttagaaagaaaaaaaaaattagcgggggttgatgaacccttaatcaaccattgggccaaaggacttccacaactatatttgtttatgtttatgtttgattttatttaaaatcagatatttaattaaagatttacaaagatgttttaaattaaaaagacatctagacgtttataaatatacgatacatagaagttgtaaataatgtctttttgtcaataatgacaataatatgcaatatacagattttgatgaacccggatgctggcaagagaaaacgctagaaaagttcaatagactaagtttttgtcgtcatgaatgatgttttttcttctctctaaatgcatttgtcatgtatatgaattatttacattaggttgaaaatggaataatagaagtatgtgatgtggttaggattaacttggaagtcaactcgagatagcaaaagcgaccatccccacataaatcctcccccggatgaaaccttaactagactttgtcagctacatcttatgagttaaataaacgaagaaggtcaatcccgatgtaattaaagaatgattaacctaagtcaagtgttagtgttctttcatggccttttcttgtattgttctatatacaatacgttctgtaactgtcaagctcacatctatataatatcttatgtcaaatccaatcctttaaaaaaaaagttgcgactacattcagttctcttatctgcttacatgcacacatatttttttttcttttcatgcacacatatttgtacacgcgtgcatatacgattatatgattggatcttacatgaaatgtttataatgtggccatcggcatgagttgcaattatattaaataaatattgcttatgcgtgctcattttttaatttcggaagaagtagttttgttggtgactaatcaaaatttctatgcagtgatgatgatatgggtgatcaatgctgtttcttggggttagctttggtgagttacgttactttttgtcctttagaagaaaaaaatgccacgttagttaacgctttttaaaaaaaagaagttgctgctaccattacagtgacagtgtattccacatgcgattctagtagagttttttagttctttttgctgggaaccaacctgcaaaccacatttgtaaataagacgttattaaaccagacttcactaatataggccagtcgaactggctcaccacaacatgggaatgtaggatgacatgaatctctgaattacaaatgtcatgtatataattaccctcagttttaaaatgctacaccaaacaaattcaactcaactactttaatttagttttcaagtttccaatatgtgaccaaaaagtgaaagctaacaaaaacaagacctttgcgtagctgggagttcgaactccactttccctattattacgtactttgtcaaataaaaaaagaaaatataaagaaaaaaaatacacaaatttcttttggaaaaattatgcttgctacccaagctaactatttttgaatgagttttaaattgcaatttcaaattcctccaatctgatcaccgggacgtgagcaagaacacgggatcggagatgattactcgtcatcataatctgatgatccatcggaatcaccggagaaatagaggcggcacgtggtatcgccagaagttggattgtaatttctttcttcatgacctttggcaatttgtctgttgtagtttgctcaattacccgtaaattagcagaattaagttgtaacctgtaaaaactaacagtaatcagacaatcctttaaaatatatatatttatgtcgccggccaaaacctgtttcttgttggtaacgtttgcccattcattatttactattattagggttttaaaactcagatgatcacttgttctttagattctgttacctaaacagtaaaagaagaattaattcatataaaagatccaaatccttgtaatccttctccgataacacattgctcctggaatctttttttttttttaatttgtttcatttgagggttcatcatcatca

SEQ ID NO: 745 - DNA, 3000 bp, Unknown
  misc_feature (1)..( 3000): cDNA_ID_2990441_gDNA_ID_1620313_Annot_ID_153061 3000 nt of promoter + ATG
gtttaccttccaatacttctggaatgaaatcgactctttcagacagcatatttgcgattaaaactccagtagtaacacaagatgttgcaacctacagtgaagttcagtttatgttacattataatttgagatatattcaatggaaagcttcatataaacctaaaattacctcggctttgtcctgaagtttcataagatcacagactaattgaaaaagttctttgctagagcaaatctctttagaatagctatctgaagcagaaagggcttcaatagctcggagaataatttcaaggacggggtacctgaaaacatacacaagggttcattgtacatactacatagtaaagcataacacttgtttttttttgcaagaatagaaatgccattcactaacacttgatgatctttaagatgagtttctgttcttccatacctttctggaattctttctttagtcaacttgctcatttcaaatgaaagaagattgatcaagagactcgtcaaacccagattcattagtggaggaatcaatagctgctcaacctcaggttgaccttctatgatacctaacaatagccctacactctatggtaaaatagaaatgaattagcaaattaagaaaaaccatgataaactaaaacttacagaaaatggtggagggacatgaataggcataaagtagagaatttcagaaaattcattaactcagagttcattaaataaaattcaccacttcgatcaacctttcaacaatcaagtcgtccagtgcaagaatgactaagttacaagaacaaatttcagaagttaccttttcaataagatgaggattcaaggtattttccgcaatccacaaaatatggcgaagtatatcatcagactccaaacaatgggcccaggaagtacacccagcgccagagagtcctgtggtgagtatcctattggagatacatgtcggatagttagataacccaaccaactaatcaagcatgaatctacatttgaggtaacaaatttattgttttacctgcaaacttcacttaggcattgggtatcatcaagaaacaactgccccacaagtgtattgacgattccggctgtagactctatatgtttcaacagaccttcatggcaagcaaggttcctaataatcccgagacagatttcctagcaagccccaaaacgaaaaagaaatgtaaaaattaaagtcaattcaagaagacaacaataattagaaatgacttagacttatcatacatacactgagttacttactcgaatacggggagattttgaaaccataaggtttgcgtgaagcacttctaaaattaggttctgtacctgcaaagccaaagcattacaacttcaggtctcaactccactacatggattcaatagatagagcactgtagtacatttccaaaaccactatacggaaccaagctgctcttttatctacatggaaaccaattagttctttttcaacaactctgccccaaatttcctattggtctaaactcaactttaaaccaacgttactacttggcaattcaaaatccagagtaaagaatatataaaggcattacttcaaagtataaatccatttaccattagctcagcatgagttctactggcggcaagatcccacaaaacacaaccatgatcttcccatgccgatgacccgtcttgcattcccggcgctggacatgaactaaccgtctcccccacctcataagtggattcatcatgattatctccaatgtccatgctctctggatcaccattggaagtctcaacaaccccatttccagatatagctactacaccttgaaccacattatccgtattcatatgatcattatgtcgttcgtcacttcccgaatcaattggaaggagtttccttatcagtgaaataagatagctaggatcaactgtagtcgaaatgtcaaacaactgcacaacacagaaaataagaaacatcactctctacacaaataaaaatcacaactttaaatccaaaaactactcttaaatagccaactaaaaacccctaattgcacaaagtaccattgacgctcaatttcctacaatgaaactacctcaacaacaacgaagagtgagcaaattaagctcaaaatttacctcatcaggcggaggaggaggatgatgtgagggaaactcgttttcactttcttctcttcttccagtaaaattttcttcttcttcttcaagtattcctcgctgtttcgtcgcttcatcgtcttccattttaatctctctggttttttaatttctcctttgcccttatttctcttcttctctcgccagaaaattcgaaacaccgctttacttgttttacaaaatagtccttgtactaaatcatgtcttgttttcacacctacataatttacttctcttataaagtaccttaatcttttcaatagacgattacacccccattttgaatgaaccacaaaaatctgccaactgttaaataagtctcggtgacaggtggcagattattcacaggtgaaaagatcgtgggtaagaaaagcctcagccacaaaattaacggtcaactaccataaattgtttattcattaatccaaaacaaatctctatttaataattttttggaaaaaattaaattttttaagaaataacagaaatatttgtaagaaataaaaacttcgatagagataatttgatatatacagtaaaaattctataaattaatacacacggtaaattattattttgatattttttataaagttttcactttatttattttattgttttgtccaaaaatttattattaaaaacacattaatttgtaaaaatgccaaaaaatgattagatgtttcggaaatatttgagagtgacaagtcatacaaattggatgttgtttttacttttttagttttttggtaaaattatccttaaagctaaaaatctccataaccaaagcttcttcgttccaccagcaccaaaccaaca

SEQ ID NO: 746 - DNA, 2651 bp, Unknown
  misc_feature (1)..( 2651): cDNA_ID_3058753_gDNA_ID_1620316_Annot_ID_153172 3000 nt of promoter + ATG
gatccaaggaatgcttaaagattgttccttttgtttgttttacatacacatttgtattgttgtaagtttgtaactttgatttgctcaatctctgcaaatgaaatgtttgtagcagtattggtttctctgtataataaaaagatttaaaattgaacaagtgggtcacgaggtaatcacgtgccaagttcctgaaaactcttcttctctgtttctgacttattaggcttaagtctttgttcttccttctcgacgacggtgtcacttgcgatgaatctctccacgaggctcgctgaaaaacttcccggaatcttaccggcgccgtcttctcctctcctgcgtaaaggttggttctttttaatcttactgtctttttggaaattgcttgtttggtttggattcaattcaaagggaaatcttttctgggtttctcttcgtctgtttgatttgtctctgattgatgaaggatactttcgtgctcatatctctctacctcttatctttactaggttttaagtcgttaggttcaatctcgaattcacaagctaatgagggtttttgttaattatttctactcatgtgtgtattaggagtctccgagttaagatgcttttcaattgctaaccaaagtagaagattgagatggggattacaaaagaagatggtttggagtttggagagagctgagacctgtgtagtgagcaaatcatgtttagttcatcctgcaactgaagcctatgcacaagaagctattgaagctatcaaatccgaaaaagttattgctgtgcctaccgatacgctttatggcttcgcttgtgatgcttggtaatctaaaaatcttcactttatcagctgatataaccttttacattgcctggactaagttgtgatttatgtaacatgacagttctttagaagcggttagccggatttatgagatcaaagggcgtaaacttacaagccctttagctatctgcgttggtgatgtattagatatcaagagagtggctaccacaagtcacttacctcacggtttacttgattcgctcttgcccggtccagtcactcttgtacttcaacgaggtttgcatcttcttcttaatgtggttgcatttgatatgatctctttatgtgagagtgttcttgtagtgttttaaacaggtgaatcaagcattcttgaaaagtccttgaacccagggattggtactattggagtacgggttccagattgtgaattcattagagaagtatcgagaggttcgggcagtgtgttggctcttacaagtgctaatttaagcggtgatagaagcagcgtttgtgttaaagattttgagaatctttggcagcattgtgcttatgtctatgatggtggtttacttccatcgggccgcgcaggatctacaatagtcgatctgactaaagttggaaagtacaagatcattaggcccggaaggtatgtttagatcagtaaatgcgaattaatggatttagagtttgaatctttgtggagttgttgagctaaaatgacttataataatgttgcttgtgttgttaattcagcgcgaaacaagcaacagtggcaattcttgagaagtatttgctggaagaagaagaagaagaagaccataaagagaagagagctagttaaactctgaatcatctgatctgacttgcaaaaatttgaggttttgctttggttcttactaaatttttgatattgggttaagatatgtttgtttttagtgcaatacgagaagattgttagtgttgagggggtatgctaatgctacctcccattcccatggtacgcatgtgtaatttgaagaaacttggtggaccatttcgtaatttttacttaagtttcttattattgctccatttggaaattaaactttgttgtaatcttattaaaaaattatcaaatattagtggaaatttttcctatttttaagaacaatatttgttgtatccatattcttttcttataaaggtgtcaatttttcaatagaggaaaatctcattaatttttgtatataggggtcaaagttgaagaaaaggataaatagaggacctcaaaatttcattttccacgtatccgtgctctaattttattccacttctgctaaaacatttggactataaatgtctggttggtcttggctgtttgtttgcaacacttgtgctaaaacgttttatcctgagtttctttcaccatccagcttcatttgtgaaaaatcgtcaatccctctcaaactcttctcaccactaatttcttcctctggaacattctcttctctattattttgattcccttggcctcaacactggtttctcaattgcatgatcttggctcgtcttcaggtactgttgtttcataccttagagaatctcaaattggttcttgggtctggtttgattagtttctgtgttatttcaagggggaacgaagacaatttagctgggtaattctgggttttgcggaattttggttgatttttgcgtcagaatcagaatttgaagctaaaaagagttctgctttgattatccaattgccatgatctttcacagtaaccaaaatggatttatgaagaatatcaaattcagctaattttgctctgtgcctatgcagttactttgattcactgagaaaaatg

SEQ ID NO: 747 - DNA, 3000 bp, Unknown
  misc_feature (1)..( 3000): cDNA_ID_2125615_gDNA_ID_1620316_Annot_ID_153189 3000 nt of promoter + ATG
ttaaataaaaaccatatttatgcacaatgactttttttaataacattaacactgaaaatcctactaatcaaggcatgtaaaatgtcagatatttggtatatgattaaataacaaaaaaagttcaaatgaagatgagataatcaagaaatgcatacgagagacaatgtcacacactcacagaaagaaaaactaacaaacagatttgcccaaaaaaaagttctttatcaaagaaaacaatgaaataatttcgattaacgaaggatgattaatggcagcacgtttcttctgttgataaagaatactagttaggaagcaaaaagggtatgtaatgttttaagttcaaacaaaacggcggcgatttaagtcagagaactcaatggaagattcagcgcaaaccaatgagaaactttcagctttgacatgttatccaaatccttgttttttttttagtttaaatcataagaaaaaacaattaacgtttttcatttgacatttcactttctcatcgctgtctctgtataaaataatatctatatatgtatgtgttgcggatgattttttatttttattttcgttagaagaaaataaagaaatattatgtcacatgatacggtggatgcaaataaatgagaccgtttattaggggggcttttactatgggggattgacttttggtatgtgcaagtgtattctttttgcatttcgcaatcttcgtttggtttttgtatacaacaaagcattatcttattaattacatatttcatcagaactccatatagacgaattatcaattacaaaaaagggagttcagactaccattacgtatgatttaaacgaataaaatgatatcacgaaaattaacatgacaatagaataaaatgatatagctagtgtaatttttttaaaaacagacaaatatgttacagtattaatcaaaaaagaacaccgataattgaaccaatttatttatattgtgccatccatcattttgtaaaaaaatgaaaaataaataaaagaagatagaatttggctatttaatttacaaaaaaaagagaattctcaaaatctcattaattattaagatattttgttttggacatgggtttctccatgatatttttgtgttttctctaaaaacttgttattttttttttttaattttcctatgatggttgacaccctgtaatagaccacaatttcaatattctccacctaatgaatgggttctaattaatggctatgaaggtttttgctttatctttgtcccctcctttattttcctatcctcaactcatttctcttcgcgttttcttctctttttcaaccaaacttaatgcatttccttatcaatttcctctattgtataaaagagttactacacttccataaatttatacccatagtcccataccttcacacatacacatgcacattgtttaaatagtttatcaaccgcccatcgttgaaatagtttaacctaatttcaaagcaatgacttctatgcatgtaagaacttattacatcattcgttaactttcatagaataccaaactaatgcactaaagtacagagaagccttcttgtactcaaatatattttggtgcatttgtagaaagacttatttaaataacaatataaaataaaagctatactagaatctactatataacttccaaaatttgtttcaataattatttcaggcctaaacttaggatttggatttttgttttatacatgtaagtagttttgttttctccggagtagttgttatacaatttaggtaaaagttggtgaaccatcaatctatgactctgtctattaaattccatggaaagagtccttgcttgcgggacgaagggaatccaatacaatatgcatatttgatcatataataatccaatttcattcatgttgtcatatgtttaagatatgatcatgaacattaactgttttgccataacagcttaaactaattttgcaagcgaaggtcatgtagattgtagaatgcaatatatgaaatatacagtaataaatagcaattgcccaaattacttgacattattaaataggtaaatagtgtagttgctaaaaaaagcaaataaggcaaggtagctaatttttgtaaagtcaacaacatcattaatttagtagattgtatgcacaaggcatgcattgattaattccaactacttcaacggccatggcttaaatcttacaagtttcacggtaagtttccatccttttttgggtatatgagacctaatcaaacgctaagcatttactataatattaggcaactttctaattaaaggaaacaaatattagatgcatccatggaatgagattattgcgtagaaattaggaaatcctttcttaagatggcaaacaaaaaatataaaatgtacaaaataaaagtaaataattctctatgaattctcggttagataaattgtcaaaatatgatgtcataatttggaaactatagttattatgtcaagaccattaaatcatttattaccaaaacggtgtcgtatttatataattactgtaaagtaaagcggcgtatcaaatcaaaaccaaattgagaagtacttagtattaattaaggaaacaaaaataatgaagaaaaaaagtaaaagtcgtatgtgaccaattaaaaaaggaaactcaaaaaccaaagaaaatcaaaggtcaaatttaactttggtataaatcccaagttttcatgattaaacacatttaccaaattacccttcactcatcctaaaaaaaaaggtcaaaaacttcaccaccgtctctctctctccttctctcttcctctctctgcgcagagaaactttgcaatttgcaacacattcattaacccaatctcttctttagctcaaacatatctacacaagaagataagaagcttaagattctctccacaaaacaaaaatagttatcagattcacaaacaaagccatcaaatttcatcattgatttgttcaataagaaatg

SEQ ID NO: 748 - DNA, 3000 bp, Unknown
  misc_feature (1)..( 3000): cDNA_ID_2125627_gDNA_ID_1620316_Annot_ID_153192 3000 nt of promoter + ATG
agctaacatcatactttgaatcaattacaagaagaataagaaacaagacacctacaaaagatagtcatcatcgcatcaattccatgaatacaaagccgttccacaagctatgcaacagcattgaaggtaacaagttccttgaccttgcgaatatcaaacccaataccactccaaggaacaccaatggtaacatcctctgcacattgaaatgtgccaaagcaaatgcaatcgaactcacaagaatcgcacaccaaactggcatgtacctagttagagacggtaacaagaaccctctgaacactatctcttcccaaaccggtgcacaaattgatactacaactgcatacagtgccattgccacagggtctctagccattatagactgctcgacacttgagagtgagactggacttgaggttggtgggagtggcaagaggtttaggtttaattgggagagccggttaacgaaagggaacatgaaacagcctatgataacatctagttgccagtttcctttaagggtaaagcggaaccaatcacttgcaagtggacggaacatggagaggcaacggtggaggatagcaatcccggctaggccttctgttacatcggttatcagactgaacaaagcttggcctctaaatgttagggattctttgtggaaacctgatatatgagccatgaatgggatcatccatgaaccaatgaaccagaaagcggctacccacagaagcattacctgaaaaagtgtatgttaggggcatggcagattatcgcaggattaaccaaggaaataactgaaagctttggtatataactcatttctcattactgtttgttttgcatcttttgtatgaaccaaagcatctataatactattagcttgatgttatcttgtagtccctagttactaagtcaaggatattagcccacgtttaaatgtctatacattcaaaaactacgtcttacacagactcaatatccataatacactcttatcagataatcccgtaaaatttctatataggtttcaataatgttcttgtgtaaaagttatgaatatgatacggtaatacaaaagaggttaagtaacattaagatgtaggtacctgcacaatggtctcgacagtccatggtaccttccaacgagtcccaatggccttcaaaactgcatctgcagcctgaaaaccaacgaaacaaagtgctttttagacccaataataataggttgaacacaagatcgataagcctttgtgagagtttccttatttgcatttttgccatcacatttagtaaatagaaagcctcatcaatttgtatggcacatttccagatcaaaagaaacctcaaattcttatttttcactagtaaacaaaaaaaaacaaagagtggataatggatatatacataacagtttattgacaaatataagattctgctgcagtcctaacctctagagtctagaccctaatatcaaaaccggtttgtcagactaaaacagagacagaaggtagttcttcttcaactgtacaagtatccagtaacgtccatagatctttaccttttgaaaagttgccttccaatctgttttatctgtacatggagaatcttgatctggcttaactaattcctcaggcacaaaatgctccggattctcgggagcagaatcttcatttctaaaacacaaaatcttccatttctgcagaaaatagccccaaagtttaatacattggagacaaactaccgattcttccattaaccatttgacactgcatcaatacaaatattgaattcttacaataaagaagtcacaagattactaaaacctcaagaaaccacaaatttctaaaactactagtaatccaagcaaatccttatcaaaaagcactctctttcgtaaataaactgaatccacagtgctattcgaatccaagattcctcaatttcaacacaattcaaacaccaaagtctctttttcaattcaaagtttcatacttttgaatataaacagagaaaagaagaaagaagcgtacatgcttggcggacttagaaggtgaagaagcagttaaaggggaaatcttggtaagagcaggagagaaaacagttcgacaaggaaccctaaacttggaacgcgaactagagagagctgggcgatggcagaggagagacgaagaagagcaagaagaggtcaacatgggatgggaatctgaattccaatttcaaactcagatttcagctttagcaagctcaatgagagagatatgagaaatccctctgaagaatgaagaaccctaatgagagattcttctcagtttcatcagagaaatcgaaaaccctaattaatctgtggatttgggggttttcgtgactgattttgtgtctttcagtttttctcaccaaaaaaaagttgttgaattttcaacgacaataattaacaatccgtcttaaccggaccatcgaacaaaaccgatgtttaaaccaaaataaaccaatttattgatgaataaaccaatttgttcattatccttttatagtttatagctgaattgccttcagaacacattggtaaatttatttttatatttttcagaaaaacaaatcttttctatttgacatattgcaccaaaaatgtcaaaactatagaggtcacagtagaaacattatcaaaatacagagccttaactgtaaattacatagtatgattccttggtgaagaatctattaccatgacacgagttagagaaagtcaaacggtcaaattaaaatctgttttcgtctctttcctcctcatatatcgccatgccttcctctcatccatttcttgactctcaagatacacaacaatctctctctccccaaaaagaaaaagaaaaaaagaaaaaacaaacaaaccctaattctctctttctgtctccttcaattgtctaatgtctccttgatccatcctgatctcaagacaattctttgcaacgttgttttcttggaaaattttcagggatg

SEQ ID NO: 749 - DNA, 3000 bp, Unknown
  misc_feature (1)..( 3000): cDNA_ID_2125619_gDNA_ID_1620316_Annot_ID_153190 3000 nt of promoter + ATG
tggctatgcctatagtatatactaaacagatactgaattaaaatcaaaagtttcagtaacttttgcttgcagagagtttgtagatacctttcgtcttattgagcaaaatttgcaatcggattcagattgaggtagaagctgattaacaataagccggtggactggcacattttcttttcttaaagatgcatgtaaccttgaagactcgtttattgccataacctaaagggaaatataatagccaagtgaatatgtaaccaaatgtacccaggattccaagaagataatttccaagccaggtgttcttcttaatacaaattaatgatctttaggaacaagtaaaagaatggtgttaccgttgggatggttacaataacaaactcggtagtgtccacatcacggaaaacatttcgaactttctccatcctctctttcagttgatctaactcgttaggctgttaaagcaatgaatgttcaaaatttgaaagaaggtgaaggggaagtaatggttcaagggaaaacctatacttacaagttctttttgttgtatctcttttttgccaaagaccaacttaaaggctgaagctgctgcagtgattttcttcttgagctgaataatcaaacaatccagttagaaacaagtaccctaaacatatcaattgtgtaagcaagccacaaccaaaggctatatttcatcctcaaaccttagttattttgctaatggatgaatcatagaagtctgggagggaaagaagccgcagagtatgcccctgcaagaaattatttggaatcaatcagattaacaaacgcatcatactctaggagccgtacaaattagaaagaaacaaaataactaaccgtgggagcagtatcaaaaactatacgagtgaacctactgtattctggtgcctccataaattgaagaacctggaatgagatctcaacattagtaattaacatgaatagttttcacttttcaggggaattctgagagggataagtgccttggaaatagctgctatttcgtcaataccaggagaggcagcgttgagcatatcttcaagatttaagtcccctaactaccaaaaatgaacaacacaggtaagacataaatgaagttttccaatcataatggaggcttggaaaatcaacaagagagaaaaggaaaatgaacctcgccggcaaacattccgagccccatgctatccatcatatttttcacacttttatcgcccgtctgacgttttatctcgtccttcattatctcaggtgtgatctgtttcaacatgagaagaaaactcagcaacatatgtaaggtatcccggagtttgcagagacaagtagttttttaatcacctcaagagcaagaagtggagaatcaacaccttgaacgggctttaggactcctcctgacaagtcctggatttcaaaacaagagattagctgatgcctgaaaacataatccaagcgaaaacatagagaaccaaataaaaaattgatacctgggaaaaagaatcgctcaaggagtgagcagggtcagtagaaaccacaatggtaggatgaccgtggctagcaaacttaaccgcaagagaagcagcacagctcgttttcccaacacctcctttaccacccagaagataatacttccgctgattcacagataccatctcattaaaatgagaagctccttcagcaagagtagctaatgatctcactacacaaacaaacaagaaaccaaatatcaaatgacagaactttctatatgcagaatcacttgcttccgtggataaaatcacagttcaacaggctacagagcaaggtgaacatagcttactcttcattatgtgatccaaacagcaatttatttacatattcaactacatgtttctcatgataaaccacaactcatctattcaccaatcagtaaagttctcatctttcaactccacagagaatcttgaagtcatgtcatcactccaagaggacacaaagatcagatatttgcaattaataacgttcccaattaacgagagttcttacaatagtaagagtcaagtccaaaactcaaaccaaaaatggatctgaaaaccatagtcaactctgcggagaaaattctagctaaacaaaagagaagagacggtgatgaagaaatgtcataaagtttgaatttttttgcagagagagcaacaaggggctacctcgaaagagtgttccggagattctgtcaccgtgaatttgagcattgaaggaattgaaacccagagttcctgcgacccggtggagagagattgagctagtacttcgagaaacacgattgaggagaagtaaagccgccattgaagaattcagaatagaaaaaagggatgaacttttcccggataatcgaagaagtaagaatcactctgttttggacggagccggcgacggaagaagggctttgcgagggttttaggaaataaattatttttcataaattattttttttcttttttttttactattagtataaaataaaaatatgttaaaatttgagtaatcactttgtaaatgaaaattttaactttcaaatatgaaaattgttctttcaaatttgaagaaaaactgcttattcaattcattttggccaaaataaattaaaaaggtaaaataaagtttcacaaaaagcccttacaagttacaattcaacctaattgttcataaaatgattagtgagctaaactcataatttaatggattaaaaccatcaccaccaaaaacctaatctttacgtcgcaacaaaggtccataataatcataaaccggatattaaaaatatatgtaaaaaatgaaaaatgtttttataattaaaaaggtcccaaaattattacccaccactctctatctcaatgacggttaagagcatcagctttgaaaactgcttctcgtcttccctcaccaaacaaccctctcacgatcgctctcttcttcatcttgaagccaaagctaatatatctcaatatg

SEQ ID NO: 750 - DNA, 3000 bp, Unknown
  misc_feature (1)..( 3000): cDNA_ID_1391361_gDNA_ID_1620316_Annot_ID_153193 3000 nt of promoter + ATG
agaaggacccatcacagcagaaacacgtccaggtgatagttttccggtcacacatctcataagatgtttgttttttccttttaaagtaattgaaagatctttaaaagcaacttcaatcataggtctctttcttatatcaatatcattagccatagagataactccagagaaagtcaagttcttgttctgctcctgcattgctttttccttttcaatctggccataagcgtacctgaacatctggctctgtgtatgcaaggccttgccttttggagcatgttttttaatgtttttatcaccaatctcaagattaaacccttcaggatcttcagggttttgttcaatgtcatgtaacatctctgttagtttgttcttctcctttttctttccctttttagtgtctgagctgcttcctagcattggtggtaaagcagcatctgatccaggttttgcttggcttaaacctctcatcaaatcaggctgtttcatagatttcctcctcgaaaatgttcgagaaaacgattgttgcagctcggttgcatgcttctttgcaatatctttggcagatttccatttctctcgcgattgcgaatcacgcacactctgcactgctttttctctggattttgcctgccttctttctctcgttgcaagcacttgatcagagcagttgtataagattatgagcaagaaacctagcccggcctacacagtacaataaccaagggtcaaatgatcagaaataaccaacaaaatagatgaaactaaggagagatcaattatgactcacgaaaagcatgattccatatgctgtgatattctgatttgttgatcttggattacacgttgccaacttaaaacaatctgcaaaatattcatcagagaaaagacaccgtaagttctttgcttctccttctttatctctgatataacaagtagtgttgtttggacaaaatacatcacttactcagttctgcagtagaacctgtcctgcagtaatgtctggagaaaacaaaagattagtctacctgattagagaaagatgaatcttcaaagaaagtaatgaaaatcattcttagttagttaccctttagtacaaggaagcttgtcgatagtggaaggacaaaaggatccagctgaacagaaaacttcactactactaccaatatcagcccaaatatcagctccaccacaagtatgatttggctgaccagaaggaagctggtaatgatatctgcaaaaacaataatcctgcagcaatcttaccatatgttcaagacaaacttagaaaaatgagcaaaaacaagacttacgggtcgcataatcctgttgttctgttcagattagcttctggacaataagctcccaaaggacaagcttcacatcatagtgaggaaacaacattagaaatggatcaacaaccgaatctttcatcgtttctgaatgtttaaaggaggttaacttacggatcatgcaggtgataccacgagggcagaagaaacctgcgcaacaaggcgcacattgctgagttctaacaggaacattcttgtcgtctttaaggtcaactttcacatctttagcagtacgacaagcccatccaggctcacatccagacatccatgaagatagattgcagttcttgttcggtttcaagtaattagtagctctctttgcacctcctaataatccattgaagtatattctcacttctgcagccgtacatatcctctgcatcatgtcacctattctcaaaccaaaaacatcagcaaaattaaaatattatttcggcttctgtcaatgaaacagaggatgtataaatataccttttgtggttttaccacatgcgtttaagaaatctggctttgtagagaaattaaaggcttcgttataatcttcttttctgaaacaaagacaataacataaacatcttcaatgctataggataaaggttaatgccattttgaaactaacacattggtaatgcagaatccgagctctcttttgatgtcatcctcaaaaacttcggtgagattcgatattttgtcgaaaacgaattggttatagagacgattagccgcgggattatccaagcttctatcttcttgacaaatcactctttcttgctgaagaatcaacacgataaacacgaagaacaatggaacaaaattccctggaaaatatgaatttctccttcccatccctgaaaattttccaagaaaacaacgttgcaaagaattgtcttgagatcaggatggatcaaggagacattagacaattgaaggagacagaaagagagaattagggtttgtttgttttttctttttttctttttctttttggggagagagagattgttgtgtatcttgagagtcaagaaatggatgagaggaaggcatggcgatatatgaggaggaaagagacgaaaacagattttaatttgaccgtttgactttctctaactcgtgtcatggtaatagattcttcaccaaggaatcatactatgtaatttacagttaaggctctgtattttgataatgtttctactgtgacctctatagttttgacatttttggtgcaatatgtcaaatagaaaagatttgtttttctgaaaaatataaaaataaatttaccaatgtgttctgaaggcaattcagctataaactataaaaggataatgaacaaattggtttattcatcaataaattggtttattttggtttaaacatcggttttgttcgatggtccggttaagacggattgttaattattgtcgttgaaaattcaacaacttttttttggtgagaaaaactgaaagacacaaaatcagtcacgaaaacccccaaatccacagattaattagggttttcgatttctctgatgaaactgagaagaatctctcattagggttcttcattcttcagagggatttctcatatctctctcattgagcttgctaaagctgaaatctgagtttgaaattggaattcagattcccatccc

SEQ ID NO: 751 - DNA, 3000 bp, Unknown
  misc_feature (1)..( 3000): cDNA_ID_2125611_gDNA_ID_1620316_Annot_ID_153187 3000 nt of promoter + ATG
tcattggcgtatatattactcatctatatataatttaaactcctgtcaaataaacgtcgttggttttaaatacttatgaatcttcttagctcaattagtatatgcatatgtatgaagttgatcttgtttcaagaacatgtgaaaatcataggttaaaatcaaaatatgcgacatacatcaaacctctcagcaaaaggtaaacttttttcttttgttgacagcacataaattatataattttataatagctaagttgataacctgtacatcgattttgaatcagacatatatatgcatacgcgcatacacattagaaagtggtgtacttgacactacgaagttgacaaatactaaaagctaagtttggtgaagttctaataagtaaattacactatacatatgtgttcatatgtcggtccacatatattaggtacaatggaacaacgaagctgcttggtcttgaaaaacgagttggtttatggcaagtcaaattacaactccttcggaaaaatatattaccacaacattttctatttttggagagaccggtcatcataaatcaaatttcgttagaaattcacttatatgtctactttgtctcctaactttgttacccgctgcccaaaattatcctttcctcaccaaacataaaaataagtaaatcgtacaactaagtaatttgttatatggtggggtttttctttattaaggttagaaatggtttgtggtcttgatcagtaagatttatgaaatagttttcttgtaattaaatagaaatttgtaatttttgaatgtcatctttttagatacgtgaaaactacaaaaattacatgagttgttaaatgtccaagaacttctttctgtatatatcctttacgtatattgatgatttgtgtatataatgtacctgatgagtctaaagaaacaatcgacgtcaaagaaaaagatagcaatcatgttcaccgtattttcaattgggtgatgaaggataattatattcttaaataaaagtcacacatgtgtgaccgacctcagaactcctaatctaagtaacaaataagtaaatactgttaattagtactaataagaattaaatagctttgataataatgatcatggattagcgactagtaatatgtttgtacaatccaaataaaacataaggaaaatattatcactttacatataaacttggactgaagtgcttattgtaaagacggtctagaaaacaggctaggctatatactcaagggtataaatatcacaaagccaaaatccaaactttgcgactgttttgaaattctttgttgattatattgaaaggatcaaatgtcatttggtactatactttcaaaatctgatcattttgcgttatgagacaaacgaataatcttaagtgaaacaagcactcatgagaaatgcagcatcaaagaaaactgagcgatcacttgtggtatattaatgggtcagagcaccaacaccaaaataaatgtatttgtaaagtctttatacagagaaagtgtatgtctaaatatctccatgataattatatatccaaaaatataatttgtttttattgaatgtagctggtttggaagattgagaatgcgaagttataaactaaaattatattttactttattatgttagttcaacaaacaataattttttttaacatgaatattttagagaaaactacatcggtttaccagatctaaattcgactgcacatggaagaacaaaatatttctttagttattaaaaaagatgacaagggattcaatccaaaaaatatggactgaaaactccacgggtttaagaaatttattacctaccttttcaaccttttattttcttagtattattttaatttacaaatattggtccaaaatggaaaatttcaggtaaaatgttcggctaaaatccattaaaaattagaatattgagataacaaagaagctataatatatgcaaaaggtgcaaattgctgcaaagttcaactacgtttctcatgcaatttgcaaagtcaaaccatcgcttgtccgagacatttgttataaaatgtttttatactccaaactttcaataacgcattctctactcaaatctttctttctttctttggatttttaaactctattttacttcagttttgtattattcaaggagaatctgtactataatataatatatattgtggatcgattgttgaagaagaaaaggcttgactctcacaataggcttgatcatgtacacaaaggtattatactttatgttctccttctcgattaggctgcataaatcttaaaattctcatataattatacaaatgaatatagtacatgaaaactgattttgtttccactcctagtaacattaatgttagtcaagcttttgccttttgacaaatagaagtttagtgaatgccactaaactttgtcctctctagttcatattgataaaattgaaatataacttttaaaaacaaaccttgttaggaacaatatgattgaagtattgtatttggcaaaaaaaaaaaaaaaatagcatatggaagtgttaaatgcaagggtaacccttttatacgccaatgaacccggcttttcccgttgagtattgtcctaattatatctttttaaatatatataatcatcattagtttctataataataaaacacttttaataagttatacaatctaacggtatcgtgtaacctttttcatacaattcaaccaatgaaattaaacaaactcttgttatttttattcacactttactttattcttaatgaacgtttaccccatgtgatatcctccttatgtaatgcttcttcacccacaaatctcactttatatatacttatatgtttgtcttcttcatctatatataagcattgctctaaacagtttatagaaagaaaaaagcaccaacttctacattcttatttctctcttttcatcttcttattataaccaagggtttgggttctgcaaaaatg

SEQ ID NO: 752 - DNA, 3000 bp, Unknown
  misc_feature (1)..( 3000): cDNA_ID_2125580_gDNA_ID_1620316_Annot_ID_153175 3000 nt of promoter + ATG
tcagatttcgtcgtgagtcatttctgtttcaggatatcaaactctggggtggaattgcaatttctcactgcttgcgtgagctacgtatcgactttttttctcactatgccaatccatatgttatattgcccagaagcttgtatacctgcaaatctctggtgaccttgaaactcctaggcttgggtattcgtgtggatgttcctcgagatgtttgtctcccttctttaaaaactttgctacttcaatgtgtggcatactcagaagaagatcctcttcgactgcttctttcctgttgccctgttcttgaagatctggttattgaactagatgatgcaaaccaaaatgtgaaagcgctagttgttattgtcccaactttgcagtgtctatccttgaagatacctgcttcatgttctgatgaacggtatttgattgttaccccttctttgaagtatttcaaagttgaggatgacagagaaattttcaatgctttgattgagaatatgccagagctggaagaagcggatatctatgttacgcaacatattgagacgcttctcgaatcagttacatctgtcaaacgacttacactacgccaattgtacaacagcatagatgaggtaatttgtttctgtctatcaactttaagctctcaatcgtctgttacaacttatgacactgttacatgtgatttgtgcagtataagtgtcgtgctggtattgtcttcaaacagcttgaacaactggagctatccatatgcagtgataattggacaaagttagttatatggttgctccaaaattctcccaatctgcgagttctcaatcttgacgctgatgtaagtctcttcattgactatttttgctaaaagctttctatggtgtaatcttgagtctgagtctctctgtctctctctcacccccacgcagagtgattatgaacgttatgaggagtatgaacaggataactggaagaatatacaaagatctgttcctaaatgtttgaagagcagtctcaaaactttggagtttgcagggtacacggcaaggccagaagagagggatttcttgagttttatcttcaaaaaagctcgttgcttgaagacttcatcaatctcgcattgaccacaacataagaaacttgagagctatcgcattttattctgaatcttgttttccaaagacaatttggttttaaactgaatatggaacttgcttaagaacgaaactagtgtagattattaatcttatcatgtggttagtgacttagttctatgatctggttatatgtgtgtgtgtgtgtgtcgcagtcttatgtttgtttaaaatatttcaaataaatccgaaatacaatttagttgaaacagaagcatacaagaaacatgaaattttgtaaattcgtgatgttttcttgtagtcaacttacatcctcaaaaagtcaacattttcaaagttataaatacattatacatttgtttacaaatagccattctcttacaattataacactctcatgacatacaagtgtatcaatatggcaaacaagaaaaaaaaatcataagaaacacaaaatcacttcttgttttctccttcaaataattgggacgtaccatttttattttatttttacttcatgtagtttagatatatacggtgcagatttgaaggataaaaaaatataaatatatgatttaatcaaataagcagcaacaaacaggaccggtgggtttgtcgaagaggcagtggccgtccatggctgcagcgtcggtgctcctgtgacaatgcttgtcgcagtcgccgtcgttgttgcacgttcctcttaagcggcatggtccgtccattacgtctttctctgtttttatgtaaatttaacacacatgcatgtatattattaggtcaaaaaaatatgacatatgccacaaaacacaagttttggatttaaaagtatttgttattttgaaggggtggaagataagtacctacggaatttgcagtaatactaataacgagagagaagacgacgagaagagcaacaagttgaaatcttgatgaagccatttttcagattatttttatcttttgtattgcaagatattcaactttaaatttgtgtttgaaaaattatgatctatgttggggggttttatacgtgaattttagttttaaagatagtaattttgttttgttttaaatagtagaccagttttagtcaaggtaatttatggttaatatagcaatacaagtaaataaatctcctcaaattagaattagccatcgtttcttacttctaaatttggtgaggatatgaaagaatgaacggtagaggagtggctttgattacttgaaaattacttaaaaagtcaatgcaaacacaaagtcttaggtttaattataaatattaaacattgatattttttaccaaattttaagcatcttaaatattaaacataaaacataatatgtccaagatcatttaagtctcaaaaaattatgcacacattatcaaacaaacaccaaagaaaacaaaaatcttattaactttctttggagagtcgctgtcaaaattaaatcttatacatattcgaaattttataaatattgaaagtaaaaaatggtctggtagttttgtttttgttttttgttttttgtcaattaattttgcgtaaaaaatctatacaattttaatgtggtataagtataatagaatctaataaacttttcaaaagaaatataaccaatccaaataaagtgcaatgcgatccgaaataaatgaattaagaattttactatttgaaagaaagttgttaagaatctagatattgaaagaaatattcaatagttaccatgattgaacaacttgggcttattataataatgggcctgatacattatcaatccgagagagtcaagcctcgtgagtggttaaagctctcttcatcggaaaattccagattgggaaacaccaaaacaaatcaccggcgatcggaaaccggcgacgtaagct

SEQ ID NO: 753 - DNA, 3000 bp, Unknown
  misc_feature (1)..( 3000): cDNA_ID_1018890_gDNA_ID_1620316_Annot_ID_153179 3000 nt of promoter + ATG
aaaccaaattgaaaacatgtactgtgtggtgttgaacttgtgccagatgatgtacctattgacgggaggtccgtggtctgagtccggtatagtcttctatgagaagttgtttgatgaagaagaaccagtagtccatgaaggcttgttgggagcaatcgtgagactgagtgccgttaggtgtttgcataagtcttctgcccctaactttaaattcttcagtgttactacttactagtactagagagtagagatgttggaaagaaagtgaataaagatttttagtcatgtgcatctctagtatttttcaaatatattataagttaaattctattatttaaacatcaaagattatagagtccattatcaaattccaagtactaaaatttatggtgatcagagtgtacaaaaacatgtgctgatacttcattgttactaaataatttcttgatgttgacatcaattgattacttactaatgataggggtacagggtactctagtctctagtctacatgtttcttttgctacaaaaaaaaattgctgcaaaaataatttttcctaatctaatacaaggaaactggaaataaactataaataagtatttggtatgattgtcaaaaacacgcttataaagtataaactctgaaactttcacttatcatgttattaaactctaaaccaaaatgcataaacatagtcacatggatgcatatcttgatatgcgatctctcacctacactatattaatattcatgtaattacagattgataacatattatatgcaatgcatcaagcatgtaagtccaaggctaattgaataattggaagggttagactatgtacatggggtgatatttctagaatatcacaagtccaaaaattatttttatattaccaaaataattagaatgagattgattagtatcaatccagtgatatttgtgataccaatatcatctgacgtggcttctccttattggtcacatttatcaaaataaaaaaataatatatatagttattaaacaaatattataaataatactaaaatttttttaatgatactttgtaaatatcacctatgaacatgcttttaggacttaggagcaattacgtggacagaaaggttcgcctggcaaagacaacatataataagagctccaacgttgttcgcatgtcaagaatctcattcttatcatctcctcctcattatttttcttttccttattattattattattaaatccaacttcttagttttgactttctataattggtgggttattttgagattttgttactttgctcatttaagaaaaaagtcacttgtatactgtatttttcatatatatatagttagagaccaaactttatttgccaaaccattttatagatatatcaatttctaactacatatgattgttactgaatcagttctctttaaatttaacaaacccaagataaagaaaatgatttttaagcatcggaattatgtgtttaaaaaaaaatgaaaaatccttagaactaaaaaccaaaaatactttatgttatatatgtatataacatggtaattaaatatattttaaactaggtctatccccgttaatatcgcatatatatcattatttaacttgaaattgtgacgacgttgatattgaaatgtgatataaacttgtcctggaataatttacatgcatgtaataaaaacgttaatagacaaaaatatatcattatttatgtttgagtttgttatccatatatcattaattcattatatcttttttttggacaacaattcattatatctaaatcatcatagttgggttacttaactgataaataaaactctttttgtttatattaaaaactgtcttctgatacaactatacaatatataggtgatttcatattataatttggaaagtcatggactggttcagccagaatataaaagtaccaacttgttaattaaaccgtatattcatttagtatccagataatcttcatttaatctaacatgttggactcgttataacaaaaaacattgaatacaaatctaaaaattgaaaataatgaataaacataaatgataaggagatgaaattcgacgttgcaacgacaattgatgaaaataattaaatcaagggtcgaccaaaacaattattacaaacacaagaatgtctaaatcaaggggttggttggacggatttaaacaagtttatcctcctctaatcatacaatttaagacagctctgatcctcggtcatgttattcggaagatgtacgcataatatacaaaatgttgaattgaagaagcatcttataattcttacttgacatatcttggtgtagacaaaggattggctttaaagatttgttgttttgcgaaaattttacacttaatctactatagtacgttaaaggatgatcgtcatatttttgttttaaattgaatctcgggttaaaaatgaatttacgactagtgtatatatcgcactctaagtcataatggacttggattctaatatttaatcttttatcaaaaagaatatacttaaatttactattaaggtattcaaattgtcatgcataaaatgactcatccctacactcgagcggaatgaaaactaaacccaacatattcatattttgggtaaaagtaaacgaatatagataaccaaaaacaaaactctaagaaatcaaaacattatatgcaaaccaacatatataatagcgaaattgagattgtttctcataatacccaccaggcaccagctcatttgattttcaggtccagaatagatctgattccttcataattatttccaaaataaaaaataaattcaattaactgtccacatagttatcaaccatgtatattacattgtcttataatgtacttataccaaacctctatctatatatatgcacacacaaacaaaccaaaaatatacaaatctgaacaaacattaaaactcatctctctcatcatctttggccatg

SEQ ID NO: 754 - DNA, 3000 bp, Unknown
  misc_feature (1)..( 3000): cDNA_ID_3058741_gDNA_ID_1620316_Annot_ID_153186 3000 nt of promoter + ATG
gtctggatttaaggaaccatttttttatttatttcttttccattctctcattttaaaaaaaacaaaaatcttttgggcaatttttcgtaaatttgttttcgttgcgaattggtgatccaacaaaaggaaaccaaatttctgaaaattcaaatgggaacacttaaagtatagtgcaattgtattcaaactgacaaattaatcattaattgtattagaaaatgatatattgtcatcgtgactaatttgtcttttgaattcaattgtaactactaactactggttttcatttttcagattatttctcggttcttaaaaagaagaaaacacatacctaatatcgtgtgtatcaaaaagccatgtgcgagcaaccatcttcctttgtaaatttgacccttttgtgtatcatttatatcgagtgtttgtaattgttggttgattttgtgttatttgagaggctagtcatttacgcaatttctaaatttatcttttagtacgtatcaagatgttggagcaactgtgtccaacatacatgacatgtgaaattataattgttaaaacaaaaggacatgtgaaattactatctacttaaagaaaaaaaccagaaagaaaaaaaggtattaaatttggaactaaaagaaggttaaaaagttttttacagaaagtaattacacttgcagatgaaagaaaaaaggcagcatcatgatatgtaaaaaattgtcgaagaggtttagtcgtatcactttgtttgactgatcactgtcttctgattcatttttcagtttttctttttcaaattgtagctcacaacattaaagttattcactgctttaatcagatagtttaatactagtaactagctcatttaggctttaaacacctctttctgattactagcccactctttggtggttcttacatatcacacctaactatactgtgtatccttgaagtgaaaatcaaatttaccattcgtatcttacttacatacactattatttttccttttttttttcactcaaggtcctactctttgataccatagctataatttggaaataactatttacagtgtattaattatacctaaacagtttaatctggactaaatatttagatagatgttacaaatttggttcgtctaataaatgaagacaagacatgctaacaaataaaacactaccacaaagggatagtgagagaatgtgttttgcaacaagacataactttgattgcttgatgtgttaaaatgattatgtcagagacagagagcgatcataggctttctttatttctaataacgtcgattttcttcttcttttctggcgttcaataatgtcgaattttaattcttgatttttgcaactctaaatatccttaacgacattgaagcatggtgcatgtcgatcgttaataataaagttgaacaaaaatcttgttgaattaattacaagcacagcttcaatagcataactttacgagacgaccagatcttatagacgagtttcgcttttacttttttaatgattaaaactttcatcggagaacataagtcttcctcttaattaaaattactacccgtgcataacttcattttttaaaacatcaataattaatatacgattacaaccctaaaaattagtcaccctatagtacataacaatgatgatagttttttctttttggtgtaatgttaaaataaaatgttagccatattaaacgatagttcttttaacttagccattgtaagatatttcttactttagtttttccgtagaagatattcattatggtatggatagtatataccttaactgagtttaaatattggatcaataccatctaataacacatatctgatgttcaatacttaataattttgcataaatgttaagcgtgacaacttaaaaaaaaacacatcaacagagtaaaaacatatctgttaaataagaaaaatgtcatttttataacacttaaaaaaaaatgcatgaagcgtttcatagtttttttttttttcaaagtaatgtaggcgttagatatttcttacaattttttgaaaaatattttttatgttgtgattggctgatatcaggtaactaaaacttctttaaagaattgaagaaaatttgaaaagtaaatagatggattcctatattgtcatttcagaaaaacagtagggacaacttcgtaaatgatagccgtattattaaacaaataaatttaaattagaaaaaaggaaaaaaacgcaccacttttctttttcgctgatgcacagcttgtcggtttgcgtgcaaatcctctgtttcacaattttttcttcttctctttctctctcttcctcttttattcctctgttccaaagttcagcagaagcaaacacacacatcacttactatctctctctccttcttcactttctcacataaccaaactctctctttctctcttttttttgaagtctcctttgaaactataattgccctttagtgttgttcgttcagagtcttcaaaacttttgcagcttcaattgtacctgggtttcttcttcattgttcctaaggtttctgtgtccttcaattcttctgatataatgcttctttaagagagttgacatcatcactttcttggggtactcttctctgtttctccccagaaaatccaactctgtaattttgggtctttattctgtttttctctttgaagaatctttaaaattctcagatcttctgaatctctcttctttaaaactttttttaactttattttttgtactcgcttctttgccttcatttttctcgtatccacatgtcgttggtctttcgctacaagccacgaccgtagaatcttcttttgtctgaaaagaattacaatttacgtttctcttacgatacgacggactttccgaagaaattaatttaaagagaaaagaagaagaagccaaagaagaagaagaagctagaagaaacagtaaagtttgagactttttttgagggtcgagctaaa

SEQ ID NO: 755 - DNA, 3000 bp, Unknown
  misc_feature (1)..( 3000): cDNA_ID_2125595_gDNA_ID_1620316_Annot_ID_153180 3000 nt of promoter + ATG
gtcttaagagctcgatctcatcacacgtggaatcaatcaccttagatgggtgccacgtgaaggcaggacccactattctgatgatctaaacgcgttaatctctcgccagctggaatttcaggtttttaagtcctttcgttttcttctcgctcagtgtcactctcacgcgcgacagactcgtaccatctcgatattttctcatcatctcgataatatctgagtttggtctcagcgcgtgagttatcacatgcgagtgggtttatttttgatgtcacgagattcgttgaacgttgaaacttgaaagtctggttggtcctactttgcttgttaagtgttttgctcgaataaaacttcattttttttttttttttttttttgaggtttttgtgtctatccacatctacgctttcattttatgattttttttttattacgtcgaagcaattttgttgtatattgaaaaacattatagggtcaatattagtctaagcgtcattttccatattgtatgaaataatcaatccaaaacgtttagaacaaaggtgaaaactcatcattaaggttatacaattagttcatatttgatgtgtccacagattattaggtctgttttgttcatttgatgatggatagtcattttatttgcttaagattggagccattttcagtcaaatcgaaatgttatttgcttaagaaaacggataaaagcattatttatcgtgattttcagatgtcgacatagtgggcacatagatattatttaattaagtagccaaataaaataatgattagagaaaggaaaagttaaaatactgcgctgtaatagtgatgatgatgatgataataaagtgactttattgcggaaaaacaataaaataaatgaattgtccaatcatgttatccagtccagaaagttacgaggtgaaaccaaaacacaataaatgaacaataactcaaattactttatatagatacagctatccagtcacaaggctcagggaaaaagtgggaatatgatttactgatttttaaaaaaaattagtggtgaattattgggctatttttatatttgaattacgagaagctttctgtttaagtgattaatcgattagatgctacttcattttatatgattcagttggtccatcaaagatcaccatagatcagcatttctcttttcgtttcatagagagatttgtaacagatctgctccaacttccatcttttacagagaaaaagaattttgtaccacatttgttacttgttagaatgtactactccctctgtttctaattaagtgtagtttaagtgtattttaaaggatttttatttttttcaatataagtgttgttttcacttttttttatgtaaacattaaatgtatttaatcgtttttaaccaattatatttgatatcatatttttttattggttggattggttataattaatgatgtttttatagaaaaaagataaattcaatgagatttatatgttttcttaatttgtgtgcaaaaaccttaaactacaaatattcggaaacagagggagtattagttatgcatcgaatttcttgacgatgcaatttgttgttttccgtcttcattgtcataagagtgtcctgcaggtttctgaggggacatattaattattgggtttgaagattaatgagaccactttgtagatatcattgaaatgaatttacaaatgcgtacgcatgtacatcagcaaacctcattaacgtatccggtaaaattcgtatactaattaatatatacatatatatttggcattatctttctcacatcctttgaacttcgatcaattttctctgctctccatacatatttatgtgtgtatgtagatttacccattcctctttgaaaatttcaagcacaagccagtattgtactaatccggaagcatatggcgtatataccttatctcaaagatgatagaagtatccggtccaatcacttgcataaaatacgggacataccataattgaccaattacataaggattggattgctttttaaagttagatggagaagaaaatagacaagaagatgtttataagtttttgttgaatgaaattttagattaaagctttatgtgatatttcattctcgctgtactaccaagagaaagagagagggtgattgatttgttgaattagctaggcttataacctttgtgggatgagtgtgtatatgagtcttaataagtgattagtctaacatgataacaatcaactccaacctcaacgaacatgatgatactagtagactttacttacttagtttctcaaatttcttacctgaaactaaacaccttcagcgcaagaaaacccggatttctatgggtcatgaggattagtgtgggattcggcatgggattcactcggttaaaccgtttaatactttgttgtgtttagggtttcaacaaccatttatttcaaattagggtttggcaacaccaaaatgtttgtctttgaacttctaaacgttttctaacttgtggcttttcgagactgtggcatttctcattaatggaatattaaatcaatccatatcttacctaagaaaaaagcctcgagaaacaacaaaatactaaagagtgaaattttcaacgcataggccgaaaacttgggctttcagatcttatgaggccctatttatcaaaacatataacacaagagtccattaactttaaatccaaacccatttgctttcaaataaaattttcccaaattacccttgaaaaaccagcacagacacctcggtcattgaagcgaaccgaaacaaaacatccggaatggcgaaatcaaccaattgtgtgtttgtcttatttgctaaaaattattttcttttaaatatggttttgatttcggtccagggtaaattcgtaatttgcatttaaaccctagttaaacgcattataaaaagacgaaaccctagaagctgagagtgagtgagtgagagaagaatcagagaaaatg

SEQ ID NO: 756 - DNA, 3000 bp, Unknown
  misc_feature (1)..( 3000): cDNA_ID_2125576_gDNA_ID_1620316_Annot_ID_153174 3000 nt of promoter + ATG
acccgcccgaagagatatcatgtctctgaccctgtcacaattatataaagtggatgcaaacttcttagtatatatgacttctctgatgtagatccaaaagaagagtgttttacctctctgcaaattcaattcctgtttcaccgggccttatggtttgtggttccaagtaccacacttcacatacaacagcccatgatgtcatgagttgcagcaagtgcatagtaaatgattgtctgcaaaaagcatgcaacatatttagttaccaagacaaagaaatgaacctaaatcgcaactattcaatataagtgaaacaaaaagtcgtatctgtcccgtctaatatgaaagacttaaataaaatacgcttactttctgctattccagaaggcgtcaacaaaaatcttgttgtatttaattgcaattggacaaacagtgcagtccaattcaaaagcaccctgacattgtcatgaagcgaatcagaaactatagtgtagtagtagtgcaaatcacatcaaagttaagtccaaataccttcttaaacatcactgtgtaattattatttacacatgtcccttcgggaaatatgagaagaggattactgtcagctccttggacatggtcccttaacctgaatcacgtgattcatgttcccatgattagtgtgagtagatcacgtaatgacacttaaagaggataagaatcatgcatacttttttgctacaatttcacgatcctttgcctctgaacgattgaaccagatacatcccacactctctaatattgtgctttgcagaagaccttcatatataaagcaacaaaagtcaatcatggctttcacaataatgcacaaagggcaaaccaatcactaaatcagtcacaagcctattaaaaactgagcaatcataaaaggttataagcacacttttcgctctctaaaagcctgaggacttaccaacccaaccaggatgcttctgcattataacagcaaatgcggtcatctgctccaatacgatgaaatcaatcattgaagtatggttggcaacatagacctgtaaaccccactcataaagtaagcatgtgtatcatggagacacaaaataacgttttttaaaatgaagcatgacctgcttaggacggatgctaggacgtggcccgtgatatttgacaactccggtccatgaggcgacaaaaaagctgcaaatcatttccaccaagaccctctggtaacacagcaaaagaaaggaaaatcttcctgaattctagatggaagaataacggaataacatagtgaaaacgaaattatacaagacaaacgagagaatccaacctacctctatctttttcctcaacctatcttgacctttcagcaacgcatttacagggataaacaatgaaaggaaaataatccacccaaaagctaaagtgaagcacctgcaagttttaaaacaatgaaactgctcagtacaaacatgcagatctaaactttgagctctggagaggataagagccatatataattgaataaataagaggaaccaacctcaagggaaagaggatacagtatctaacaacaaccccaaagcagtatagtgggaataagtaaatattccagttccaaggttctggaggatttgatttgaaacatcttgtgaacgagtcctgcaacaatcaaacccacaaaacaaaacatcttatactcaaaaatctatcctttatgtgataaatttgaagtcttttgatagagtaatggtgagacagatttgggttttagtctgaaatatcttacatcaacaatggcaccagcagcttcagtgagcgttggagagatgtctagcaaatcacgcctgcgaatcataaagaaaggtgaatacttaatcagcggatcaaatcgaattcaaattcaacggaaatttcggagagagttttacatacaggctgagcttgccgcgaggttcattgatggaagaaccagaaggaaggtaatcttcgatgttagggtgatcgaggtcaagctcggattttgaagtcacgagcctccctgccgtactgctcatagcttacgtcgccggtttccgatcgccggtgatttgttttggtgtttcccaatctggaattttccgatgaagagagctttaaccactcacgaggcttgactctctcggattgataatgtatcaggcccattattataataagcccaagttgttcaatcatggtaactattgaatatttctttcaatatctagattcttaacaactttctttcaaatagtaaaattcttaattcatttatttcggatcgcattgcactttatttggattggttatatttcttttgaaaagtttattagattctattatacttataccacattaaaattgtatagattttttacgcaaaattaattgacaaaaaacaaaaaacaaaaacaaaactaccagaccattttttactttcaatatttataaaatttcgaatatgtataagatttaattttgacagcgactctccaaagaaagttaataagatttttgttttctttggtgtttgtttgataatgtgtgcataattttttgagacttaaatgatcttggacatattatgttttatgtttaatatttaagatgcttaaaatttggtaaaaaatatcaatgtttaatatttataattaaacctaagactttgtgtttgcattgactttttaagtaattttcaagtaatcaaagccactcctctaccgttcattctttcatatcctcaccaaatttagaagtaagaaacgatggctaattctaatttgaggagatttatttacttgtattgctatattaaccataaattaccttgactaaaactggtctactatttaaaacaaaacaaaattactatctttaaaactaaaattcacgtataaaaccccccaacatagatcataatttttcaaacacaaatttaaagttgaatatcttgcaatacaaaagataaaaataatctgaaaaatg

SEQ ID NO: 757 - DNA, 3000 bp, Unknown
  misc_feature (1)..( 3000): cDNA_ID_2125685_gDNA_ID_1620318_Annot_ID_153232 3000 nt of promoter + ATG
atatttaaaatgtacttcccaaataatatagtaggataatatgtctttgacactactccaaaattaagaaacatatttctaaacaataaaatcataagttttagttaacttaaatttagataatgcgtccctaccactagttataagataagcaatacaatgcttaggttgacaaagaaaatgttatgcttatgatttttctagacaaaaaattgttgggcttaggtcgaccaaagaaaaaaaaaattgggcttcttattttcatgtagaacgaaaaaatagaggagggtggttatggttattgatattgtgaagaagatgaaagtaataagacaagtataagaaacacagacgatttttaaggagataaggaagagaaggtgtgtgaaggggaaaaagggttttgatgaaaggttcgttgtggattatatagaaaccaaatctgaagcatccaagatttgcaaaaacataaaatgaaggagtgcggtggcggattctcgaagcccatcatcggagccgtgtcagattgttgagttgttgctagctctggtttttaggtttaagtgtgtttctgatttagataggtttgaagaagtggttaattctgttggaatgttagctctgttccaacttacgtgagattttgtctagccttagaagcgagtgtaaatacgttcacagtgagcaagagctccagatgaaaccgaataatacttgagatccgatttctgagcaaggcaagaaagtgaaaggatatgaagatgtctgagcaagaagagggagtgagagaagacggtgaggttttgttcactgagcatatgagggaatcaattgatgatgaatgatgtggtggtagtggtgttaatttgtcgttaagtaaatgtttggatcatttacacagaaaaaggctatcatatgatctgaattacgttttaggagagcctgttaagttttgatcttttagggttttagatctaaaattaacagagctctttgatttaacattttggaaattgaatcccatgttaatgtagatgaagaatctacccaagtgtgttgaaatatgtttgtgaatttaaaaactgatttattcatttttggaggaatattgatagttggttttgttacatttgagaacgtagaacaattgtagagcggcgtgtaattgattttgttagtttgtgttgaacttatttattttgagatataacaaagaaatgaaagacgtcaacaacaaattggtcttatagttccggttatttattctattctagaatagattatgttggcttaagaagacatttagacttaagagttatttcctctgttaaaatatatgtccttcattcttccaaacgattaagtgattttaagttttgtttttgaaatgattaaatgactctgagttttgttcttccaaattaaatcaaaaatattaacaacataatctgttcttaagaaactgattagcgaatctcaagaaatacatatttgtaaacaagaagaatttggaacgagaataatatatttataggtttcttaacaacaagaatttggaacgatagattgtttggctaccaacaacataaacaaaaaaacaagcaaacggatatagttccaaaataaataattttatatggtcaaaactactgttgctatataaagcacaaaaactatagaaacccaactcaacaataattatcctgttactttttttgtttttttgctatataaactaagcaaaattttcataagtttgaacactcataaactcatctcttcaaaataatggcaactcaaacaataaaaaagatatacagtgttttgatgattgtagttttatttacgatgatggtttcaaccaacgcgagtacggtggaagtgtgtgttaagcattgtgtcccgaaccaatgcatgaaagtttctcagaaggcaactcttccattatgtgagactgcttgcacaaaactctgcaatgaaaacaaacatgaggaatatgtcgtgcctcggagttactgtgagggattattttggtttctatgtgataattgaaatttaataaatatgcaaagtaatatatatgtattttttatctgtaaaaaaataatctataatgtaaaaatgtacctttaatcaatatactaatttcatgtaattattttatttatactaatcaaattgacacatcaaaatgctgagaagttatctaatcacccaactaataaaaatcttataaatgcaatattgttctcatcatctctccacatcaatatttagatcgttttgtaatctcttgctaaaactaatccaatcggttctctatcgaaccattaagttatgagttttctctttacaattttgtatgaatgactagaatgattgtgaaagaggagagcaatctcgagttatctaaattttgttttgtcacttgttcataacaataacatttttgtgctacgaatgtcaaaatttcaggatttgttaagtattagagaggatgaatttaatagttttttttgtttttgtgttttatttttgggtttttaatagaatttaatagttcatgtattgtttaatacaatgtcaaaattgtgtatatatttaagaaagatattatttaattagtgtacaaatatatatttgtaaacttatggtcaatgatgtaaaaatttcaattagtaattttgaggcttgttttttttttagattcaagccacttctttagtgggcttatcgaaggcccaataccaaatttacgtctcctctctctctctccgatctcaatagatcgctggagttgagagagcttcgggacttcgcgttccttgacgaagaagacgatacttcttctccttccatcacagcttcacgcaaatctttctgcagttacatcttcttaagattctgagttccgacttatttcgtggaaggattttgatatttcaacagtgattttaattttatactggaacttaagcatcacttaatcttccggctaaa

SEQ ID NO: 758 - DNA, 3000 bp, Unknown
  misc_feature (1)..( 3000): cDNA_ID_3011881_gDNA_ID_1620318_Annot_ID_153251 3000 nt of promoter + ATG
tgttcctatgatctttacatttgtacctttactagatgctctggttcctcaaaatatatggcttgtattgaaatttgattttgctgttgtttgttttggtttagcttgaagggatggggtttgatcgtgcgatggtcttggaagtgttctttgcgtgtaacaagaatgaagaacttgcagctaattaccttctagatcacatgcatgagtttgaagatcaataaacagagcaaatccattcctccctctaaactcagaccatctttctgtttctttttcttcttctttttaatatgataatctcttctccaatgccatttgacagtttcatgtttatgttcatgggagttgatgtgtttatgttactattaaaactatcatagtttatctggtttgaagatgctcctcttttatcatattattagcctttgaatccttcctctctttaggtctcagatgcaccaatattagctaagattaaaagtggatattttggttctatatgactcatctcgagttaggaatggtatgtcgaatctggtttaacagatctggcctaaaacgaaaccgctattcagatccaattattggcgcttacattgttttctcatagcctcaagctatgcaatatcaattattgcacatttgaattaacacaaacccatcaattaatatatcaacaaaaacccatcatcaattaacacatcaacacaaacataaagacatataagttgctcatgaagaacttataatggtggaaccagtgagcctttgagatctgtcataatcgtctctgaaattgtctcaaatcgagagagaaatgagaaatcttaaaattttaccctaaataattaaaccctagcttttaattattactgcacaaattatgtctaaataattttgcccatttactagcgagcttatatggtttgtaatccattttaaacactttaattttgggcttcaccaaaacccaaccattattatttggacgtggacatcccatggtcagaaaactcattcgataaccctacatttgatgatcaaagtggcacggaagctcgttcgatctacaagttttgtggtgaggagacttctcagtttttcttctagtgtggttgtacttcaggtaaattcttttcaatacttagtggaatttttcgctaactgttttgtgtaaataaggacgaggcctccatagcgttcagtgctttaacaatgccgtatccactctgctaatcttggatttcaagaggtatgacagtttgtgttgtgataggagccttcattaaattaaataatttcaacaatttatttatttttagaaccaaaagatttttcaaaaattttgattatcaaaaaaaaatccaacagattttctgttaaaatgaaaatatatattagattgtttttaaaaaaaatcatctgccggaatttgaatctggacatgcttattttcaaaaaaacattttagctaatgtgctagtgcatatgtttttgctaaggtatgaatttaaattggatatatagatcaatttatttattttaaaaccaaaaaaaatttaaaaagaaacttagcgggatataaaataaatatatattaaatttaaaaaaaaaagattttccgctacgggaatttgaacctgaaaatgctgatttttaaagaaaatttagctaatgtgctacatgagatgttttttttgctaaagtatgagtttaaattggatatatacatcattcaatttatttttctaatctagaatttgctttcctaggacaaatataggtactgaattattaaagaacatattttttggtaagatataagtgagtttttatataattttgatgattttaggtaagttgatgtgatttactgtaaagtcttttcaaattctatctaaaactatgagatttagatttctgtatttttaactaaagaagtcttttcaaatcctttcaaatccttcaaaattaataagaatcaaatccactaactattttcagtaacagtaaaaaggttgatttttaaatttttaatttaataacactcaatttcatttaaaaatttaaaatccataattaaataacataaaatttataaattttacataaattattagattgaatacaccgctctaaatatacacaatgtaaaaagtctgtttaagatcaattatagatttaacttaaatctaaaggcccataataccgtcctgtacatcatatagttatctcaagttgtaatactgtaatacccgttgggcccagtggcccatttatcagatttcaaataacagatctcaacactagcatggctacacacgtgtcagattcaatgcatcagtcatatcttcagcatccaacacttgtcaaccttccattggatctcttaactctacgcctcgaaaacagtttttatttatttatcattccatttctcattgtatcttcatcagtctcttcttattccattttttcaaaccacttgcaaaattcgaatcagatcttctcttcaatcgaaaaaaaagaaaggtaaatctctctctctctaatcatcgttcgtttcgtagtttcttcttctacgtgtagatctgatctttgattgtatgtttctggagatctcgatctcatcgattctctgttcttatcactgattcagtgtgtttgatatctaaatccgatttgtgtgtaggatgttaaaatttaggtttcggttttgtttctgcttttgaacgattttgctctagattcgttatccgtgaagaacatagacgagtatgtagatcttacttcggattcgcgttgaagaattttctctagattcgtcacctatgaagaagattcattgtgttcttaatctagatgattaggttattgtttcgactcatttgtttatgcctattttctctatgttcttaatcggtgaagaaatgtatcaatgtgtgtatgttttgggttctgattttgtaggatttgctctagattgttgaatcgaag

SEQ ID NO: 759 - DNA, 3000 bp, Unknown
  misc_feature (1)..( 3000): cDNA_ID_3058843_gDNA_ID_1620318_Annot_ID_153238 3000 nt of promoter + ATG
accctggcgccttcattaggatcatcggattcgacaacacccgtcaagtccaatgcatcagtttcattgcctacaagcccccaagcttcaccgaagcttaatcccctttctggaatattcagcgttgattattctggaacccatttctatgtggtcaatgcaaatttaagaaattatttgccgacttaacagttgaggaactattgtttgaaagtgaaaatgttattcctatcagtttctctataattatagttatcatttcatttcatttttgcccttaaatctttgaaatcttatttttcgtttagctcctttaaacaacattgtggctcctttaaattatcctcataattcttgcttttgactccctagactaaccaataaactctaataaaaaaagaaaaacttgctacattgttttaagaaattttgcacatgaaagcaatcaatcaaacctcgatatttagagaaaagtttatgtaagggagtgtaaccatttttcagatgacatagccattggagatttggaaaaggtagtatatacagaaaattcaaatgcatcttttaaaattataaacataaaacatgtattccaaacccctaagtgggatattaagtcaagaaatagcattacataaagcaaggatcgacaaagactgaaatttgtcaagcatgaagttactaaattttggaaattttgtttacgttaaatttgatcattggttatgcattaaaagctgaaacagttatttagaaggaaaagtagttaacgttcccaaaaagttctaaataaaactagattccaaatgataatgaaaacgtcgcatctactatatgtttggttttaagtttttgttttgacaaaaaatcatatgtttttggattcttctatgcaaacgaaatataaaaaattcatgattcaaatacaaaatacatataaaaataataattcaaattatcgaacattttttccatctcccggatttaattcacacattttggcttcaattaaaatccaagaaaaagaaacaaaatgacttataaaagacagaaactagtaacttagatggatgggttaagacttaagagttaagactatctcactttcgaaaaatgatttatttagctgaggtgcggagtggagtggaccttgtgatccttttccctacacgaaagttttttcgtgaccagttaatgtgtactttgtacacgtttcttctcatatatatgattgaaaagggggcattaatttgtgagcctgaaggtagtagtcgtgatccatgagtgcatgaccatagttttatgtgactttaagatgagttcttgactccgttctacacctttgattacatactcaagtttgcatggtggaaatcagcttgaggtgccatatttgtgcttgagggggccgtaagtgcaatggcatggtactccaaggagaacggttgcgtatgtgggttccccattgttattgtgatgtgatcagagtcgcaagataatcgtgagctgatattacttgttgatctagaggcagcgtgcattacctcatatagaagataccatggactttgggaggttttcttggaaattcttccatgaggggtttaccgcgcacttgatacatgtagatgatggttttgccgtttcgtttgttcgctcggtctctttgtcccacaaacatatcttgcatgatgtagttgttgttagtatcgactcaaatatttactctctccaaccagtaaggttttgcttttatcctagccacataaaaatcagaaataaaagtactatttgctaaaaatgaagtgaaagtattgaattaaccgaaatcaatgtattcaaattttgtctcgcttttcttttgtcgactaatatattatcatttgaagataatatataacttttccaacaaaaagattatcgacaatttattgtggtaaatgattttcaggatgtatccagaatcgacagtctaccagtactagaatatatctaatagataaatggttcttcttacactatgctcattatggattctttaatttactctttcacaaaagggacgatgacgaaggagtctctctacagcacgttagaattcttttgataggtttacttccattagtctgaaatggaatcttatttataagtctgcctgaaaaatcttaacaattgatattaataaaacggaaagagtaatgaatatttttaagagcatctcgaatctatctctatttttatttatatactctatttttgtatttatttaactctaactcatctctattttcatttgtaaaatagaaatttctaattttttttctaaagcaaaaaatagagatttttattttttctcttatttattttttctaacgaatttttgaggaaccattgaagttaaaatataaatctctattatattttttcctctatattcagaaagaaaataatagaaacaaatattggagatggttaaagcttttttttttgtccggataaatatcatacaatatatttatgtaaatatcaaatttaaataattttgttataactattttttaatgcgaccttatttccaaagaaagtgttaagccaaattaaatcatacatggtaaataagaggtccaaaagaccaaaagcattaaatttaaggtaatgcgtctggtttcttttctcccaaacgaaaggagccaaaagcaaccgatcaagtggagaccagtaaccgcacattcacttcatttcccccacaagagaaaagataagataatggagttttctgccacgtggccttatcctagtggtgcgtaccgataagggtgtcaacacctttccttaatcctgtggcagtaaacgacgttatcatgaatcatggaccctttgatcatgagggcttttcgcctttagggggttctcattatataaagatgacaacaccagtaggaaaacaagtcagtaagtaaacgagcaaaagaagaagagaaacaacaagaagtagtaatg

SEQ ID NO: 760 - DNA, 3000 bp, Unknown
  misc_feature (1)..( 3000): cDNA_ID_2125720_gDNA_ID_1620318_Annot_ID_153240 3000 nt of promoter + ATG
ttaatgaaaactgtcttttgtcatgtgcaattagtgcaactgaacaatacttaagaataattgggaattgggaattataggtgtggccaccaatcggaaagaagaagtttgagactctatcttacctccctgaccttactgacgtcgaattggctaaggaagttgactaccttctccgcaacaaatggattccttgtgttgaattcgagttggaggtaatatacacaaaacttttcctttgtctactaatcattattatttttttcgttttcattgctagaaatattagcctataaccggattttttagaaccgaaatagactatatcaccttgtgcatatcctccaatatcaattgtattgaatggttttcttatgtgtttatagcacggatttgtgtaccgtgagcacggaaacactcccggatactacgatggacggtactggacaatgtggaagcttccattgttcggatgcaccgactccgctcaagtgttgaaggaagttgaagaatgcaagaaggagtacccgggcgccttcattaggatcatcggattcgacaacacccgtcaagtccaatgcatcagtttcattgcctacaagcccccaagcttcactgatgcttaaatccttttctggaatattcaatgttgactatccggaacccaattttgtatggtcaatgtaaatttaagtaattattttgccaaagtgaaaaaactgaaggtttgtttttctatcgtttcctctataaaaatctctattcatatcacttcatttctgctcttatcacttttaactctttttattcgttttatctcttttaactaacattttagttcctttaaatttctctcctaattcttgcctttggttctctaatgaaagagtaccctttttaggtacatttcgcacttgaaagcatagcaaagatgcgtccatcaatcaaattttgagggttgatttagaacattttaatttaaagatgaaaaacagccagtaaaggtagtaaaaatacgtagaaaatagagatgtcgtctcagagaagatgaaagttacatagccctttggaaaggaaaaaatgatcactaccgtcaaaagtttgtcacaagagatacatgctcaaaaattcgcaacactaagcctacgatggacggatacaaagggatctgtttcttttactttaccctaactactcctttctcagttggctagcttcaaaaaacagagttgccacgggagacagaatgtttaaatggaatcaacaagtgaacacaaactgcatgttctgtcacgaacctatggaaacaagacaccatcttttttttgggtgctcttactcgcagaaggtatgggagaagctgataaggggaatactacttgataagtactcgacatattggagggaagtctttaaaaccatttgtgacaaaaactatgacaaaacaaaaatcttcattctacggtatgtcttccaaaacacggttcattcgatttggggagaaagaaatgcttgaaagcatggtgaacaaccatcaccaatggagaaacttgtcaagttaattgacaaaaatgtttggaaccggctgagcacaatacggagtggggggagctttgaagtatgaaggaggtcttcaagtttggtttggtacaagacaagcttaagaccaaatcctctgttttagatttgtttttcaaaaaagtatgcattaagttgtaaacacgtttatttctctttttaaaatctaatctaaaaattttcttttttaaaatgacatagaaaaatccaactgtatattttaaatccataaacatgaattctagagccgcaagtccaaaaatttagagatgacatcatagcaagcaaggacacgcaagaattaatgaaatttataatggagataacaaagcatgaatatttataatttggaaactgttttacattaaattagatagtttacgatacattcaaagctaaaacacttatttacaatgaaaagtaatcaatgtttcttgaatgggtttggctacttcttctcatatggttggaccggggcatatatgagcttttacgtggtattcgtggacccatgaccatatgagcttcttcatgtggccttagagtgtggattcttccctcggatccacaccatccattgaagtgtgttataaaatttccccatgatccgtcatggcttttgtgcttaagttgtcatggtgggaattatcttgaggtgccacattcgtgcttaagtgggccgtaagtgcaattgcgttgtgctccaaaaggaacggtgccgtgggttcctcttgttcatcagaaatatattaattagccgtaaaacctgaaaattcacaagcatttggattgttttctaatttaatatccattatgtgactaaaagttctagtgatcgtacatactacatagaaaataataacacaaaatactagtttacatttcccaattaaaaaccattttgaatgaactctgtctgatttaattatacttttaaaatgtgggatgaattcaaagattatacttatattcttattatttaagattatcaagtggaaaaataaaaatatgaatgtgttaatataaggtaatagaaatttaatcatttttttaatctatatgtaaaaagtatttaaccgatatctacaatttgacgcctcccaattgaaaggagccaaaagcaaccgatcaagtggagaccagtagccatacacattcactcctacccttacatgagaaagataagattatggagttttctgccacgtgatcttatcctagtggtccaaatcgataagggtgtcaacacctttccttaatcctgtggcaattaacgacgttatcatgaattatggcccctttgatcattagggctagttgcctctagcggttcccactatataaagatgacaaaaccaacagacaaacaagtaagtaagagaaaaaccaaaagaagaagagaaacaacaagaagaagtaatg

SEQ ID NO: 761 - DNA, 3000 bp, Unknown
  misc_feature (1)..( 3000): cDNA_ID_4257567_gDNA_ID_1620318_Annot_ID_153242 3000 nt of promoter + ATG
tctcattccactttccgctactcaaccctacggataatccaatgacgaggagaaaccacgagagactatgcattgcctttattgtcgaattggcctctttatttatttatttatttattttttttttttttttttgaagtaatcaatagggacaatttctttttatacaagcgtatcacatggctatcctttcatttttggtatttcctatatttaaacatggttttcttgactaatccatttatcaattttgctatttttttcttattcttatcggttttccttttttgcatttagttaaaaagagtaatcttctatatatacatttttgtagacgtttttagaagataatattgaagatttgagccataattcaacaattaattcaaatgggtgggtataacccggtttaactctgttcggatcttggataacatgtttaattatgttctgatcttcgataacattaatttttggaaaagttacctaaaaactaataattaaaaacaaaaattaatgatttaattaccaaatttaatataaacaatatctctaaacgaaccatatttgttatttaccttaactaatttcctaaaatatttttacctaatttaaacataaatatataattcttctttcacttttatttgatcttatactttatttattttgaatttatataaaatatatatagttaataaaatattatatttttttctgcatatgatgtaattcaaatttttttaaacggacatatattattcaaagtatgaagaaataatatgtatacaatgtctcacatcgcttagaaaaattggacaatgtttcagacccatattataaaaggaccaaaatgattctgattacgaatgagcaggaagcttgatttatcagtcgtccaaaattaaaatagttatccgatttacttgggttttttattttaaagaattgaaactttaaaatgtttcaagaaattataaatattataactttatcaaaagttaaatattataattttaaaaactttttataaagtttatctttaaaaaatactttaaatatttataattttaaaactgataaagttttaaaaattataaattgaattttacaagaaatttaaacattataaatatatatataaaatatattaatacaagacgatatattacaggaaaaatcttaaatataatcaaggtcgatattttattttttgtaagtttcaaattttataatattgaaatttataagaaaatgacaaaattatgtttaatttcacgggactgggttatatggtaggacgggtttgggtggataataattacgattgtacaatgtcccacatcgcttaaaaaaattggacaatggttcagagccatactataaaaaggaccaaaataatttcgattacgaatgagcatgaaacttgatttatgaggtgtccaaaattaaaatggtttgtttactagggttatttattttaaagaattgaaactttaaaaagtttcaaaaaattataaatcaaattttacaagaaatttaaacaatataaaagatattaatacgggacgatatactgcgagagaaatcttagatataacactcaaaattcaatgatgaagtttgggtcaatattaatcttttttgaagtttctaattttataaatatttgaaatttataataaaatgacaaatttgtgtttaatttaacgggacggggttatatggtgtgacggctttgagtgaattataacattggatgatatgctacgaaaaaaacctataattaacaatcataatataattatataatattaagcactaaacaaaattaacaatattaaaaaaaaatacttaaaactttaatttttttaaaacacatttcgattcttttataagatttctctcgcaatactaccacgggtgaaatcctagaattgacgagtttgaatcgatattaatatgggatggtgtactacgggtgatattttagaattgactggtttaggttgataataatttgcgatagaattaggagtaaaattctagaatgacaattaaaatataattatacaattaaatactaccacgggtgaaatcctagaattgacgggcttgattcgatattaatatgggatggtgtacaacgggtgaaattttagaattgactggtttgagttgataataatttgcgatagaactaggagtgaaatcctagaatgacaatcaagttattattatacaattaaatactaccacaggtgaaatcctagaattgacgggtttgattcgatattaatatgggatggtgtactacgggtgaaatccgagaaacaacaatcaaaatacaattatacaatattaaacatttaacaaaataaacaaatacaacttaaaactttaaaatttgagttataaaattttgtctcgcggtgaattatacatttaaatcaaacaatagcagaaatttattaagtcatcctaagaaatattcaattattttttatttaatgaaaatatagacccgcggtataccgcggattaatatttagtgctattgataaatttatctcaacgttcagctttgacattgtgaaatgcattatgagtcatgactctgtttatagatattcctgttatagtatttattaaccgaagtaatgtaaaccaaattttaaaaatacatacaagataaataaaaggtccaaaacattatatttacggtcatgcatctgatttcttttcttccaaaaggaaggagccaaagcaaccgatcaagtggagactagtaaaccatacacaatcactcatttcctcacaaaagaaagataagataagggtgtcaacacctttccttaatcatgtggtagtgaacgagttatcatgaatcccggaccctttgatcattagggctttttgcctcttacggttctcactatataaagatgacaaaaccaatagaaaaacaattaagcaaaagaagaagaagaagaagtaatg

SEQ ID NO: 762 - DNA, 3000 bp, Unknown
  misc_feature (1)..( 3000): cDNA_ID_3011881_gDNA_ID_1620318_Annot_ID_153250 3000 nt of promoter + ATG
caaacgcaaatccattaaacctgttcccccaggtagggtttttaaactggtgaaccgatttcatttgctcgttttcccttgtgaatttgttttattgacatccactcttatctgtctctatccagggcatgcccgctgcagatgctggtgctggagctggtaatcttgatttcctgcgtaacagtcaacaggtattttcaatttcttttccattcgagaacggaaatcttcatttctctcctcttatgtcatttgcaattcttttgccttttcatagttccaagccttgcgagctatggtacaagcaaacccacaaattctacaggtaaaatttttaacctcttattctttatttggtaggttatatgatattgatttcccacttatactgtttcgttttgcagcctatgcttcaggagctcggtaaacaaaacccccagcttgtgcgactaattcaagagcaccaggctgacttcctacgcttgataaacgaacctgtcgagggagaagagtgggtttaatatcatgattctcctttacgttttcattttattcttttttctcaataaagcatgtaatctgacatttcattcgatgccaccaggaatgttatggaacagttggaagcagcaatgccacaagctgttaccgttacacctgaagagcgtgaagccattgaacgggtttgttcctatgatctttacatttgtacctttactagatgctctggttcctcaaaatatatggcttgtattgaaatttgattttgctgttgtttgttttggtttagcttgaagggatggggtttgatcgtgcgatggtcttggaagtgttctttgcgtgtaacaagaatgaagaacttgcagctaattaccttctagatcacatgcatgagtttgaagatcaataaacagagcaaatccattcctccctctaaactcagaccatctttctgtttctttttcttcttctttttaatatgataatctcttctccaatgccatttgacagtttcatgtttatgttcatgggagttgatgtgtttatgttactattaaaactatcatagtttatctggtttgaagatgctcctcttttatcatattattagcctttgaatccttcctctctttaggtctcagatgcaccaatattagctaagattaaaagtggatattttggttctatatgactcatctcgagttaggaatggtatgtcgaatctggtttaacagatctggcctaaaacgaaaccgctattcagatccaattattggcgcttacattgttttctcatagcctcaagctatgcaatatcaattattgcacatttgaattaacacaaacccatcaattaatatatcaacaaaaacccatcatcaattaacacatcaacacaaacataaagacatataagttgctcatgaagaacttataatggtggaaccagtgagcctttgagatctgtcataatcgtctctgaaattgtctcaaatcgagagagaaatgagaaatcttaaaattttaccctaaataattaaaccctagcttttaattattactgcacaaattatgtctaaataattttgcccatttactagcgagcttatatggtttgtaatccattttaaacactttaattttgggcttcaccaaaacccaaccattattatttggacgtggacatcccatggtcagaaaactcattcgataaccctacatttgatgatcaaagtggcacggaagctcgttcgatctacaagttttgtggtgaggagacttctcagtttttcttctagtgtggttgtacttcaggtaaattcttttcaatacttagtggaatttttcgctaactgttttgtgtaaataaggacgaggcctccatagcgttcagtgctttaacaatgccgtatccactctgctaatcttggatttcaagaggtatgacagtttgtgttgtgataggagccttcattaaattaaataatttcaacaatttatttatttttagaaccaaaagatttttcaaaaattttgattatcaaaaaaaaatccaacagattttctgttaaaatgaaaatatatattagattgtttttaaaaaaaatcatctgccggaatttgaatctggacatgcttattttcaaaaaaacattttagctaatgtgctagtgcatatgtttttgctaaggtatgaatttaaattggatatatagatcaatttatttattttaaaaccaaaaaaaatttaaaaagaaacttagcgggatataaaataaatatatattaaatttaaaaaaaaaagattttccgctacgggaatttgaacctgaaaatgctgatttttaaagaaaatttagctaatgtgctacatgagatgttttttttgctaaagtatgagtttaaattggatatatacatcattcaatttatttttctaatctagaatttgctttcctaggacaaatataggtactgaattattaaagaacatattttttggtaagatataagtgagtttttatataattttgatgattttaggtaagttgatgtgatttactgtaaagtcttttcaaattctatctaaaactatgagatttagatttctgtatttttaactaaagaagtcttttcaaatcctttcaaatccttcaaaattaataagaatcaaatccactaactattttcagtaacagtaaaaaggttgatttttaaatttttaatttaataacactcaatttcatttaaaaatttaaaatccataattaaataacataaaatttataaattttacataaattattagattgaatacaccgctctaaatatacacaatgtaaaaagtctgtttaagatcaattatagatttaacttaaatctaaaggcccataataccgtcctgtacatcatatagttatctcaagttgtaatactgtaatacccgttgggcccagtggcccatttatcagatttcaaataacagatctcaacactagc

SEQ ID NO: 763 - DNA, 3000 bp, Unknown
  misc_feature (1)..( 3000): cDNA_ID_3058048_gDNA_ID_1620318_Annot_ID_153248 3000 nt of promoter + ATG
gggagactaatctccctcattctaccaaaaaattaagggaaatattttttcttaaatttgttgatatgataattatggtctacataatatcgtgttttaaatcaatatataataaatgttggttaaaacaagagcaataacataattttggtgaaatttcttgggaaggtaagaggaaaacttccttgatagcatggaagtatgtaaattaggaaatttcaacaaagccttacttgtgaaacaattcggccggatcgtacatttatcgaagctagttacttccttgtaaaaagttttttatgtagtgatggtggttgtagacctttgtatacttggaatagtgttctctattgatgagatctcttgaaaagtggcataataagcaatattggacaaatctactagggtttggcttgataaatggcttatggatgaacaaccaaggagacccactaagaaataaattttatttattattaaacttaaggttgctaatttgttgaatgagagaggtgttaatttctcccaaatgatgttaatcaagtcttattgatttatcttaattcaaacaagaaagatttttcgttttggcgattcaataaaactggagctgaaatcaaaattctttctagggatataaagagtttgttggattcatctcttgaaaaattctttaaaagcaaatcagggaactagacgaagattttagcggaagtagctcaaaaagcaaaagcatccatgaaaattgctatggtagatgaatcacgaaaagctgaaaaagctctgatcgctagtaaatagtaataatagattgagtctagttgatcagaagaaacttgcacaagttatcaaggtggtggtcgaaatggaggatgaactcgaggagaaggttcaaaaagtcgagaagataaacagaaaggtagatgagaagatgaagaagaaggcaaagaagagacatttttcgtttttggtttgttgaatgttgattcgtcttcagctatcatatcatgtcggtgttagacttaaaataagtgtttaccaataacttatacaagagaggttctacaccgtttaccaagagaatcaaagaatgcaaagtttgtaacttttgtttgtggtttaaaagaacaccacaatcattgttgaatgcataacatatttcaaccagataaggagttaaagaacttttatatggatctaatacttaaccactaatactaaaaattgatcttgaagcaacataggagatttgagtagttagaacatatctagcaaattctgatctattgtgaaaagaataactagagacggatgacttaatttctatatagcatttggagggtcataatgacttgtttttatttacgtgttttacgttattttgtttttgtcaaaaggctttcataaattagtaatactctataaataaataaacacaataaaatactctttcttatcgatttaggtatggccaatgtaaaaaactaaaaattaacaaaattttgaaacttctatacatttttatggttctagtaatattataaatttatacatatatagctaagataatattctaaatatgactataatattgtttgtaatttgaattattgttagcgttattctctaatgttacttattattcaaaaactcttcggtgttttcgatttgtatccaaattttatgataaattctaaacacgataattaatttacaaaaataaagtacttatttgagtacccttaaatttatgtttacttgacttcccagttcccagccagtataaatctttttcttatatttaaattaattaattaactttggatatagaattgaattattaggaaaatatatacatatcaatcaaaaatataatatttataagcttaatacaaacatagaaatatctatatctatatatatctagcttaattaattggatagtaaaagcttatctttgcatttttattattttaattaattacttgtatatatatattattttaaatacttattagcatattgacatttaagatacaaggtttaaatttcttttgttattttgaacagaagttttgttaatcagtaaaataaaattattgtaaataaaagaaaagattttgtgcaaaacaaactccaaagtcgtttatttttgtaactttatctttcacgtttaaaaatacaaaacaaaattatgaagtaaaaataatacgtaatgtagtcgattttacaactttacatctattgtaaacgttttcacgatcacatatatttgtttttaaaagttttaaagatatagttgaactcctcatctcaagggctttgatttgataaattatctatctaaattttaaaattatttatcaaaattttaaaatttgacaatagcaaaaaatttgacatatgtataatttttgatttagtattattattctgcattgttaagatgtaaaatgtaaagttgtaaaaagtaaatgattccgaggattttgtgtaaaaaaccttaaaatgttttagagtttcttgcactaaaaggataacttttactttttttccaaaccccaaagtctgatttacctgtgagttaacaacaattactactctctttgagtaaaaatcgcatgccaaaaagattatagaaaatataataccgaagaaaattccaaatatacaagcagtaaattaagttgattttgggaatagtctacaatcccatgtacacatctccactacattccatacaccttttttaatctaacggctcacaaacaataaaactctccgaataagtaatcaccacgtgatttatcttgacacaccaaagtttgtatagacgtgcatgtatgtaattaattaaccttttatgtactatgaattaactgtgttgatatataaagggtgactcaataccccaaaagcggtctctctctatactttgcttctctctctaaacttctctctttctttttttctcaaagcttttttccttctccctaaacg

SEQ ID NO: 764 - DNA, 3000 bp, Unknown
  misc_feature (1)..( 3000): cDNA_ID_3058847_gDNA_ID_1620318_Annot_ID_153237 3000 nt of promoter + ATG
gagtggattgttggatacagaatgtgatggtgcgtggtgtttccgagcttaatttatcaatctttgtggattcggttttcgaagatgactataatctctttccaaaagtgtttgagaacaaaaaactagttaagctcggattaagttatatttcttggttggatgggagcattttcttaccaatgcttaaaacactcgttcttgaatcagttttgttatctgttgagaagtttgagattcttcttcatgctttgcctgcgcttgaggaattagtcatgaataatatatactggaaagagcgggatgttgtcgatttgattgtttcaagtgaaagcctcaagaccctaacaataaacttcatcgtttgtacacatactttgtcatttgatacacctattcttgcttacctatcttactctggttatgtcgtggacgattatgccgaagctaaaatggaaaacttgtttgaggctcgaatcagccttcttgtagttgaaggcgatatcagccgagtaagagcgctaataaacaatgatttgttagaggatgatgagtacgatgttctccaatttgaaaatgtgtggaagctaatgaatggtattcgaaatattcggtgtctctatttgtctcctaatactcttgaggttagttttttttgttcttttctctatttagctggtcttggtaaaataaatgaaagataaccagtacttcgtctcaatttacggagcatggcagtcatgtttcttcggtcccatttttaacaaatataataagcaaaggtctaattatggtttctcttgttatgaggtgctttctctatgctgtgaatcgatgccagtgttcaaaaacctcaaatctttgtctatcaagagtgccgagaatcgaggatggcaagcaatgccagttcttctaaggaactgtccgcatttagaaactctagtccttgaggtacgtataacacaattcattaatttgccaaacatgtacaaaatatcatactttgaatttctcattgtcacttttatgctttcagggtctattgcaccatgtaacagataaatgtggggatgcttgtgactgtgtttcccgagaagacaaaggtcgttcactcacatcgtgtccagtaaaagtgttggagattaaagggttccaaggaacaaccaaagagatgaacatgataaaacatttcttggaatattttccgtgtttgaaagagctaaaaatgtatatggaagagaatgatcctgcacagctcagagtccctgaagttatcacgggggagatgatggaacgctacaaaaagtcatcaagttgcaatgtccagctcctagtaggtggtaagttgtataagaagtggactccatgatgaagcctctaaagaagaaaagttttggaatttgattttggtttaaattggcttgaaaaactgtttcaaaccaagacaatcggaaagccgtgggtaaaggggattctcccattaagaaatgggtaaaggggatagggatagggattcttgcttttgtccctaatcttgatatcgatgacaatacttttctgcatccggaaatgggtaaaggggatagggaagatattcgagagctcttcatggattttgttgatagagtattggcattgcagggtgattctcccattaagaaagtctccatcaactgtgtcggtgttgattcagttagagtggatgcttggatacgtaatgtgatgttacgtggtgtttcagagcttgttcttttaatcgttttggatgtccagtcgattggtaagaagttttgggtgcctccaaaatgtttcgagagcaagaaactagttaagctagagataggttatggagttgatattggttggttagatggaagctttttcttactgatgcttaaaactcttgttcttaggttagttcagttatctgctgataagtttaagattcttcttcatgatttgcctgcgcttgaggaattagccatgggttatgtaacctggagtgaagatgatgctgttgtgtcagatgcaagtctaaaagagactaacaataacttccaaccattatgtctgctattcttattattatttagacactttttcggttgatacgccgagtctcacttacttctcttactctgacttgttgctaaagactaccctgtaattaagatggaaaactaatacacttctcttacttcacttacttcggaatttgatttttgtgtaattggtgtatatatatatctataaaccaataaacccctcctaaatattctgaaattcttagttatattaatcaaaataatacctttttttgcaaaatttaaccaattttttaagttttttattttattttccaaaaccgatccaaatccaacacttatcaatagtcttaaagctgtcccggattatacatgtttgacctcgtcacggggctaatgttgtgatgtccaattcatgatctgcgattctttgcgcgatcaaatctttaacgtgaaaaagcttgctctatgtttttaccaaagtcctgcccttcaacgtgaaaaagtttgctttcttctgcagcctaactcaagctgtcccggtttaccgaaattaaaccagtgatttttaagaaccggattaaataaaaccctaattttgttttcttaaaatttggatgtttcggcttctccgatgcctttttcttcataaaatcaaagaaaccagcgataaagcaactcccaaatctctcttttcttgaaatctccaatatttgtttcttggtaagtatcgaagtttactcaattcgctttttaaggtttcgtagttcacaagcttcctttcggatgtattcctagttgcgttgttaacttagcgtttctctcttttagggtttaccagttataattaattgcttccttctacatgctcgaatttttacatgaatctaaagaccaaacctttctctgtttgtagttgaactgtttggtaatatacgaagcttttctagagaaa

SEQ ID NO: 765 - DNA, 3000 bp, Unknown
  misc_feature (1)..( 3000): cDNA_ID_3058851_gDNA_ID_1620318_Annot_ID_153233 3000 nt of promoter + ATG
aacgtagacaaagatgataacccatgatgatgaatatacttacggttatacgaagataactctgtagaatgatcgaattgaaatttcttcgatatcaaaacatgtcacggtttgacaataatacgaagaaaaccaaaccgatcaggaccaagagaatttaaaccaaaccaaatttcttatggtttgagttagcaacgtgtagtaaccaaaccagtcaagcgtgaaacgcttcgtttccttctcttttggtctctgtcaattttgatgtttcgccgagaaaaaaaaaaaacaattattgatgtttcagcttcttctccgatgcatttgcttgccttcgttgaagctctttcacgttggtcgtagtagtgttgttgtagttaagacttaagaagatggatctctctttgacatcaatgactcttgtctttctacatcccgaagagggtaaatgcattgaattctggagaacttcgtcaacagagtatttgctttcctaggtgttgatttagattgcatgaatcgttggatatgaaatattgaaatgtaacgcgcagcagcgttggtgtttcttaaaactctagtagtttactcagtttggttttctagtgttaagtttcaggtgctactttctggttgatgaggtaaatgatgaaatcaattctttgaactctttcttgtgtttgtaggagatggatatatacactaaagagaataatttatagacctcaaagtctctggaatgtttaacgttgtagcaacaagtttcatagttttgatatttaacaagtggactagtgcacactaatgagtctcagtgtttcttcagaagctaaagttttagttacatattttgctcttctttggtcaacttttgctttccttctctgagttctcttctctttaagcaatacttgtaaatttttgcctaaatctgtttaatcccaaatatcaagccgttccggtttatcgaaactaaaccggtgattttatagaacaggaagaaacaaaaccctatacagtattttgtttgcttgctggtagagccatcgaattcaagggactaagtaaatcccaactctctttttcactgaaacccctaaatattaggtcttggataaagcttttgtaacaaggtaggtttcgaggttttactgattatttttttgggggttccttagtccataagattcctatttgcgttgtgaactccaagtttccctctatgcaaagttcataagattcctgttttaccaatttaacgtgtttcatttgcacttgcttggattttacatgaattgaaactttaaaactaattgaatttttgtcgcccgcggttgttggcggaccggaccaccgcagagtgaacagaagcaaggtccgtcgcgaagtgcccgtttggtcgcgggctcgcctgtctgccacccctattcatctctattacttttatatttagactttacagaatcaattattttggaatttctttatatttccatattttttcttataattttgtagactataaattaattaatattaattactactaattcaagttttcgaaaaatagactacttttttatcagaataatcagaagaaatttaaattaatattttgagaagattttgtttccatataaatgtatataattatatttaaaataagtaatttaacaaaaacatgtagagtatatgtaagaaataaccattgacttgaaaagaatacacaaaataaccttggaccaaatagtatttgtcggctacagaaattttggtaatatttagtctattttagcctttctctttcttattccttcttttgttttttttccatgttctttacgagactttagtcatagagttctctttctctcttcatttttaacacaattcatcttcttcagattcaccatgtcattttctttttctatttctctcttcctctcctaaaataatcttcaccacctttcataaaatatatcatcatatctttttattttgttcacccacatgttctctctttctttttccatagaaatctctctatctctcattctttattttattttttacctgaattctccgtcaatgtcgttgtgatataagagattagatttgattttaaaacaaatgtctgattttaaaatgcatgtattttaagaacaaaacatgttattaacactgatatattaatatttgtcatgctatcccacaaaaactcatgaaataaataaatatttgtcatgttatccaataaaaacccatgtaatattgtaacaattctatatgtttttttaaacttcgcgatcgataagagaattgtatgctttttataaatattttgtgctatttcagaaaaacacattatttcagagaaacatatatatcgttttgtatgtattttaaagaattgcatgcttttttgtaaatatatcatgttattttagacaaatatataaaaactttataactacaaccaccgatatttttgtaaaaacaagaaaatctaaagatattttagtattttatccaccatagaaaatgttatttacctaagtttcctgacacaaggctattgtctcaattcttttcaattccatggttactctctaatattacctttagaatggttttccctacccttaaccttaaaacctttctttcaagcctatgtactatttgtgagtgaggcctcttgtatgaaaatgctatagattttgaaatcttcaaagtattgagaacgacaaggttttagctcttgtttttagctagcttttggaacatctttggactagctactaggttgggaatgaaagatttaagtggttagattgaatacttgggattgggtttgaaaaaaaaaaaaaaaaaaaaaaaaaaaacctctttttctcttagtttttgttgctttgcattcatattttggcatatagtattgcatttgcatttgcatttgttttttttaggtacatgagtggagtttaaagttttggaagtaaa

SEQ ID NO: 766 - DNA, 2025 bp, Unknown
  misc_feature (1)..( 2025): cDNA_ID_2125758_gDNA_ID_1620319_Annot_ID_153255 3000 nt of promoter + ATG
gatctttctttttccgaggtccttgcttccaaggcagcagatctactggacttccataaggatcttcaaagtcttgaatcaactttagaggtttgcctttgtacttactttttccgtccttagcgcagtaagtggctcatcatttgattgtcctgtctattgcagataaatttgaagtctctggctgaggaaatacatgctataaccaaaggattggaaaaactgaagcaggagctcaccgcatccgaaactgatggtcctgtttctcaagttttccgtaaagtatgttgttgtttttctatctatctcgatcttttgcatatcttttatcaaccgtgaatttgagattaggtccatgactgtgccacataacgtaattttccatcacttttgtaaaatctagtttttatgtttttcaacagttattgaaggacttcatatccagtgctgagactcaagtagcaactgtatcgactctttactcctcggcggtaatttttgtcaacctctactagactccaagcgcctaacctttggcaatgtgtttgatcctgagattactttttttttttgaataaatcttatgatggacgacagagaataaatgctgatgcacttgcacactattttggcgaggatcctaaccattatccatttgaaaaaggtatacaatgaacatcatcctcatttgtgctaatacattagaagaaagtggctcattgttatgttgttgctaataagaatacatgtggtgatcgattgcctgcagttagcgcgacactcttgagttttataaggttgtttaagaaagcacaccaagagaatgtcaagcaagaggacttggagaagaagaaagctgcaacggaagatgtatttggtgggcctgaccacaacatagactcagatacttctttagatgattcggaggccaaatcgccttctagaataagacctccgccttctataccaagacccccttcacgtccaaggtatgcatgctgccgaatacctgcagttaatccgcctcctcgcttggtgtgtggcccatatccgctacctcgcttagtgcgtgtaggatccccatcaccaccacctccctcgatgagtggaggagctccaccgccaccacctccacctccaatgcttgttgccagtagaacagctccacctcctcacttgagtcatgtacgttcaatccctttccaaactcgcttggtgatgggcacatctccgctacctcttttagtgcgcgaaggagccccaccaccaacacttccctcgatgagtggaggagctccaccgccaccacctccacttccaatgttaaggtaccagtagaacagctcctcttcctcacttcagtcatgtacgttcaatccctcccattcctcctcccccaccaagtcgtagagctcctccaccccatccttttggtaaaacaattcacctcttccatcgagtcacaaagggaaaccaaaatagattgccaaagagacatataaaaacttgtgtggtcgtacacctgcatatatatattttcttgatcatcttcctccgcaaagagacatactccttcatctgattcttccattcattttcacaactttgtgatagctactggatttcataaaggccttcttccaagactgaaccggttcgaccggatggtttgtattataaaattgattcttatcttctaataaatgaggactagtttgctggaattacagcaaactatattttattcaaaaaaaaaaggacaatctccaatactccgtcgtgcttttaaaaaattgacaatgtcttgtcgtctgttcaagacacatggaatttgggacaaagtcctttgcccaaagtcaactaatctttaacaagtctatgcgatttgatcattctcttttattttctgggactttttgctctgaaaactagtgttatttgatctaaatcggtgaagaaagtgatctgaaacaatctgtttgttgttaaatctactaaatcccctgtttggttcctgatccaatg

SEQ ID NO: 767 - DNA, 3000 bp, Unknown
  misc_feature (1)..( 3000): cDNA_ID_2125772_gDNA_ID_1620319_Annot_ID_153259 3000 nt of promoter + ATG
aacctaaaagcttaatatattaatatacacagtattattatatggactactattgagttttttaagtttgaattttgtttgttaccatcataaattttcaatcttcagtttaattttaataaatgaaatgaaataattcaattattttccttttatgttgtatcaaaagaaatactagatcttaaacatgttttgactaattaatatggtcacttagaataaattgcaaaatcatatggctctgtattaataaagtccaaaactgaaaatattagaagaaaaaattgtcaaaagattctctccttccctctctttcgttcaattaaagatttgttgacctcatttgtttttcttctaatcaaatctaactttctcctttttcttctcaaattctctaatcacactcttcatcctcttctggacaaaactatttagtattttgttcttcagcttcagttctctaagagttttttttttttttttgggaaaataattattgaagagttgggtgatctaaaggtaacaacatctttctatttgtatctcacattttcatcacagttgacttcattgtaatttcttagaactatcttactataacttttttttgttaaaggatcaactatgttactataactctagtcttgatcaaaacttgagatcataaaccaaatctgtttttctttttgtggtaattatgttattgaattcagtcatgatcaaacttggattttttggttgttgttggttgttgatgtaattgcttatttattgacgttggaaccaaagattcaattttgtacttttcattctcaaaatctgagaaaaacagtttaggatcattatgtgtgttgtttaaatgatttaagctcccaaaatttgtgattttgatgatcagtacattatgttctctgtagttgttgtaataagttgcaatgtctgaggagaatatttcacaagttgatgacaagtgttgtttggatgatgcaaacccaatggagatatctgtggaaactatccctgtagtggatgaggaagttcaaggagatgatgatgttcttcatccagctgcagagaccaatcatgcgagtttgaagcggtattcaacacgagttttagataaaaagacaggcaaagctcaggttcaaacccgttaccgtgggaaccaaacgagttctactcatgatctatgtaaacatgggaagaggcgtgaggaagatttggtgatcaaaccatggaaggtggctaagaaaaagaatgttgacagtggagatttggggaagggtgagactttgaggaagtccttggggaatgtttctaaaccggacaagtcatcattgcaggctgcaaagagagaagctgctggtgaggttgtcaaatcttgtgatggtttacacgttaagaagagtgaaaccaagagtactagtccgagtgtttcacctgttgtgagaacggtcaagaagactaatcttgttgtaaataaggcttcaaggatcagccagaacaaaagtcctaaagaggatctttcgaagaatttgaagaacaaagagaaggggaagattgttgaaccggttagatgtgatgatgtattagagaagacagatcttgaagttaagaaggtttcaaggatcagtgagaacaagagttctaaagaggatactctgaagaacaaagagaaggcgaagatcgatgagccagttagatgtgatgatgtattggagaaaacgagtcttgatgctcagaaggtttcaaggatcagcgagaacaagaattctaaagaggaacgtttaaagaatctgaagaacaaagagaagacgaacattgatgaaccggttagacctgatgatgcggtggagaagacattgtatgttgttgaatctagtgttgagaagaagaagaagaagatgagcaccaaaagtgttaagatcagtgagactcagcaatcttctgagaagaaaatcataagaagcaccggcaagaaaagtcttagcttattaccatctttgcctccaccctcagaggtggttacagggtcagatcctaggccaataagacagactacttccaggtccaagactagtttgcctgagaagaaacagagtggttctgctaatcttgttactaatccgaaacccgaaagcaagattagaccgaaaaggattggtttaaaggttactccacctcctcctccaacaaagcagcaaatgaatttcaagaaagggaaagttcttgaaccaaaaccagaagattccactacaacatcgatcaaattcaagaagatagttgttcaagaaccaaaactcagaacaagtgatgtgaacaaaaagaagaagagcctgaaagataaaagagaaggtgttgggaagattaacggtgaaggtaaacgagagaaagttgttctgagacacagaaaagtggaagtgaagaagaaattgcagacacttttcaataatgtgattgaagagactgtgaataagcttgaagaagtgaggaaaagtaaagttaaagcattggttggtgcttttgaaactgttatctctcttcaagataacaacagaacatctcagaagaagaagattcagagcaaatccacatcttcacaagtcgttgaaggctgctaagtccttgagaaagagatcaaagttgtgaattggtttaaaggaaaaatggtttgtttttggttcatgaatctttataatgtaaaattttcaaagaaatcatattttcttttctacgatgctgagtttatagagaggtcttgaagattgtagatgacttgagttcaagatttgtttctcgaaatagtactctgttataaaattggaaatccggtttgattggttttttggtaccgaaccggattttaattttaattcacacgtgtgtagttgacacgtgtggtttcttcgcacccgctcttcacttgttcatgctcttgcgtttcaaaattcaaaatgtcttctcttcacttcttcacacaactctcagattcaatcaatg

SEQ ID NO: 768 - DNA, 3000 bp, Unknown
  misc_feature (1)..( 3000): cDNA_ID_2125786_gDNA_ID_1620319_Annot_ID_153263 3000 nt of promoter + ATG
atggttgattgatcttgaagttttatctgactttttccgccaatctttctctttcggtcgggtttcgggacagcgcgctgctttggcatcgtttaatgggaaaaggggttcttgcggtgcagacagatggaccgccacagctacgggtttacgcacattgttcaaaaggaagagtgagttgctcatatcatcttttatatcgcagtttccaaacgtctttttcggttagagtttgctttaaatgctttggttttttcttggttttaggccggtgtgacattgctactgataaatctaagcaatcaatcggattttacggttagtgtcagcaatggcataaacgtggttttgaatgcggaatcaaggaagaagaagtcattgttggatactttaaaaagaccattttcttggattggaagcaaagcttctgatggatatttgaatagagaagagtatcatctgacaccagaaaacggtgtgttgcgcagcaaaacaatggtcttgaatggtaaatcgttaaaaccgacggcaacaggagatatcccgagccttgaaccggtcctccgtagtgtgaactctccgcttaatgtcttgccattgtcgatgtcgttcattgtgttacctaattttgatgcttctgcttgttcatgatgttaatggggtctctctttgcttattgggaaaaaataaataaaaataaagaatagttgtaatttttttggtaattgtatctaatgctggtgataaatgtatcatttcatatttcaatacaacatgattacaaacctttggttttgtgtctcttcgacttatgagccattgcaagaaagataacaaaagacaagaatcaattcgcagaactgcaagaagtgtctccacaagataaagaagtatcttcactgagtttcttcctctcttcataagcccattccaagccgtgacagtactgaaccggcgggttgaacctactgtcggttatatcatcaggtaagaaagcaccgttccccacaagaaacttgacagcttctcttttccgttctttagctgcagcatggagaggagtccagccacaagcaccagaggttctagcttccatgttggctccacgttcaagaagcaagtccataacttcgatgtgacctcctttggcagcaaggtgaagaggagtcattccttttgatttaggtccacaagctagagcgttcacgtctgctccttggtcaaggagctctttaacagctttgagatcgccttcacgagctttgatgtgaagctgagtccaccccctgtcatctctgtcaacacccgtttccatggaccggcgcctaaatgagttaggccgaaaggacaacgcaaccggctgctcttggagcatcttgcagataaaccagaactgactagaattcacagatgaaagactcaaaggatatttcctaagggaaacttactagacaaggagattctaggagtgactcagatttacataattttggttacaatcttatacaagaatgtctaaagcaggaacactacttgtgggtagaaatcatcaaccaatatcactcagaataagaacttatgggagaggcagattgagatgattcagttggaatggagcaactcaatcaagggaagtgattagcaatgcagtaagggaaagagggattcaaaccagggccaaagacacggagattttgagggatcacaactggagtcatagacagtgaagagaacacgagcatcaactagaaagaggtaggagcttaatggtttctaggaacaaagagaaatcagaaaaagcctggatcaatgggtaaagagagcatcgggccagagtctctatctgcgtgatttttaccagccagatctgccaacaagacaaggatggaaaaaaaaacttagtggattcagataatacaaataagcaaagtgttcattcaaaaaaaaaaaaaaaagcgaagtgctacagaacaagccataaatctctctgcaaagatcgccagaaatattttcagagatcaaaattttaggttaggtaacgaacaataaaaactttagtaacaagtcccaatctttagaatcgaaaactctggcaaatgaacagtatactaagagaattcccaaaataagctgaaattcagaaccacccaaaattcatctaaaaaattctaaagcagcaaagaaactaagataataaaagcttagtgatgaatccaaacaacataaagaccaaatcaatttcacagtaagacgacgacaacgtaatagaattgaatcggggaaagatagaaacctgtaggcgtcgtagcttagcgcggagggagaagaaagagatatggtgaatcaaacacagatttatccttgacggaggatatgaatcaattagtgttttttcgcgggtagagagtgagaatcgtatatcgatttccagatgaagaagaagaagaagaagaagaaaggcgcgtgagtgtgtgtcagagacaaatatcgtttttttttgtttgttactatacttgatccactttaaaatcgaatttgccacctcatattagcttaattaatcaaggcttcttactgttgggcctacaataaaaggcctgaatttggcccagatagattaaaccatatctaatatctttatcaactaatttaatttcaaaaagattttattctattttatcgtacatagtttgcataatatggttagatttcaaattttatatggaagtaactaattttggcagataattggattcataagaatagaataaaatctctatatatttatctatactattaaaagacatcctagaaaatagtataatacaatgtatttcacccattatgcacatcattttgcaatattaccttaaacaaaggctaaaaattacaacaacccccaaaatgataaaacttatataagaatctcatgattgatgctgtaggagaagaagaaaaacaaagaaacagaaccaaagtagagacactcttgttctttat

SEQ ID NO: 769 - DNA, 3000 bp, Unknown
  misc_feature (1)..( 3000): cDNA_ID_2125794_gDNA_ID_1620319_Annot_ID_153265 3000 nt of promoter + ATG
ataatatcaagctctttcttgagcttatacaacaaccatacaagaagtcatctcctcccaaaacacaccctccattcaactactctctgaaccatttgtcccttttgtctcctgatatgttctaacactaagaccagatccaaaacgacacagttctacttttggcaagaatcacgtgacgtccttgtgattgggcttcagaatttgcttgcttcttcttcaaaccctctgtgggaatagtgtttagtgaagttagtagaaacatgcatgtgttatttgattaaagattaatacaaactcctaagactaatgttattcaattagaataaagatcatatatatgatgacatcattgatgatgaccagcatatcaaattgtgcaggaacatacatatagatatgatgacatcattgatgatgatagctatctataatcatattatatgaatatattatttggattgtttatgtaagcgagtataaaccaaagtaacaagataaaagggaagcaaagggaccattgaaagaaacaaaagagtcatattatacacattttttctctttttttttttcttcttgagaaaaatggattcctctccatcagaagtaaagattatctcaaaatgcttcgtcaaacccaaaaccatacctgaaaaatggaaagagccataccatttttcaccaatggatcatgtaatactctcaatccattacatccaaaagggtcttctctttctcaaaccatcgttttctgaatctgtcacaccaaaagagttcatggagactttgctgcagaagcttaaagactctctagccatagcacttgtccatttctatccgcttgcaggtcgcatctcgactttgaaaaccaacgactcaagatctcactcggtgtttgtggattgtaataacagtcctgctggatttatccatgctgaatcagatctaagtgtatcagacattcttggttccaaatatgttcctttggttgttcaatctttctttgaccatcacaaagcattgagtcgtgatggtgacaccatgactctcttatcagtcaaggtacatttcttcattcttgctatatcatattattcaaatatgtcagcagatttgtagtaataaaagttaaattgcttttactaatgatttattgtagtagtgttttactgtgtcatagtgaaaaaaagatgctgaatctttttctggttatacaatgtaacaggtaacagaattggtagatggagtgttcataggattgtctatgaatcattcgcttggagatggaagttccttctggcacttcttcaactctttgtccgagattttcaattctcaagaagataacaacaagtttctctgtctgaagaatcctccaatctttcgtgaagtgtccggtcctatgtacagccttcccttcagtgaacctgatgagtccattagtcaatcagaacgtccggttttgaaggagagaatgttccatttctcatcagaaacagtgagatcactaaaatcaaaggcgaatgaagaatgcggaacaacaaagatatcttctttgcagtcgctgactgcattgatatggagaagcattacaagagcaagaaaactaccaaatgatcaagaaactacttgcaggcttgctgctggcaatagatcaagaatgaatccaccattgccgatgaatcactttggaaattacatctctcttgtgatagctactactacaactggtgatctattggagaatgagtttggatgtgctgctttgaaactgcatcaagctgtaaccgaacacactggcgaaaagatctctgccgacatggaccgttggttgaaggctcatttgaaactagatggatttttcagtccaaatattgttcacatgggaagctctccgaggtttaacaagtacggaagcgagtttgggatggggaaagcagtggcggttagaagcggttatggtggtaagtatgacgggaaggtatcagcttatccagggagagaaggaggagcaagcatagatttggaagtatgtctacctccagagtgtatggaagctttggaattagatcaagagtttatgtctcttgtctcttcttcttcttcttcttgatctaatattcttattcatatgtgctcccatcatatctctatctaaactggatttgttagattggagtattttgtgttgctgttaaaactcaatcaatattatgtgacaatgtgttattcaactgataatgattcatgtttatgaaaatattaatacaaactagtatgtgaggtttagagacgataatgttgaaatctttggggatttattctcactcactctcttgatacaacactttattttataacaacttaaaaatgaaacttgaaaacagaaccataaaacagagtaatcgcagagaagttaattagcaagatcgagagttagtaaagctctttcttgagcttatacaacaacaatacaagacttcatctgctcacaaacacagcctcaattcaactcctctctgaaccttttgtcccctttgtttcctaacatgttctagcactagaaaccatatccaaaacgacacggtttactttaaccaagaatcacgtgacgtccttgtgcttatcacatatgagataggcttgggcttcagaatttgcttgcttcttcttctaaccctctgtgtggaaacagtgtttagtgaacttagttgaaatcatgcatctgttatttgatattgatataaattaaactaagattaatgctattcaatatgacatcattgatgatgaccagcagatcaaattatgcaggaacatacatgttcatgtgatgacatcattaatgatgatagctatctataatcatatgaatattttatttggattgttctataaaagagagaataaacgaaagtaagaagataaaagaagaccaaagaaacattgaaagacacaaaagagtcatattatacacattttttttcttcttggaaaaaa

SEQ ID NO: 770 - DNA, 3000 bp, Unknown
  misc_feature (1)..( 3000): cDNA_ID_2125806_gDNA_ID_1620319_Annot_ID_153269 3000 nt of promoter + ATG
aataaattaaatcacaccttgtttaaatactaacatatactgtataatctagtggttatgaatttaaaatgaaggaattatatacgcacgtgtatcggttcggtatattgcgaagcatgacggttgtgatgtgatcaccgttggattcaacttccggcttgatacttgtcctccatgtcaccttctcacatagttcgtaacttctccggccaaaaactcttctactactagtcggtggaagagtcatctcttggctagggtttggagagtaacgttgaggaagttcttgtgtagactcatatacattagggttagggttaatataccaaagaggataatacacccatattgatggaggaggagggagatatatgtcggagatgaaataaatctgtggtggcgccgagaagtagtaagtacgaggagaaggattgtgaggaaagaaaaaatgtgtcggtgggtttcgagcttgtctagctaagacggagacgtggttgttctccggagctggatcatcggaagaagccattggaggtgttctagttatggagagcagaaatgattttgtgtttggttcattatatatattatcttctaataacaaacagatttgatatcttagtctagaagatccgaagactagtgtctactctctcaggttcataatttcgttttgtcagtaacttgttaaccgtccgatttggtgttttttttctctcttcttatttctaacctcgagatccgtgaggctcagtaccttatgatgatcaagctaagcttatgatgatcaagctaagcatcggtgatatgactatttttttctttatttttggttttaaaagtgactatatttttaggtgttgaaatggaacacactgattctgtacaaatttaccaaatctaaatgtgtacttagatttgccaaatcttttgtgatatagctgtacttgaagtgtccgttttcaaagggacatttatagtttagacttggatcatatgacatattgttgtaataattaagaaacggtagttataagatataattaagaagatttgttctatacgtatttagtagcaatcaaaagtttagtcgaaactgaagatgttcatatcataaacaattacttaagattcccatacatattatgtagttctcatatttgttatctactaaaggtatgatctaaaaaagcagattggtaacaccgtaccaagtgatacaaggtaaattaccaatatcatcaaaaaacacatgtttaggtgttgtatttttgaacttaactgcagtggagtagatcgatcgggtcgagtaccacagatttagtccaaggatcgagcatatataggagaatatatagtgacatatacttcaaagagtaaagtcccatgctgcaaaaggatttcttgctagtaatgccgtatggtcgatggggagtacttggataagatttatagtcaacatttacatattaagttaagaatttgatcaatatgtatctgcaggttgctcgtaaagaatattagtatataaaatattaatatttttgcgtagatatatatcatttttaaaaaaaatttcttaacattaaatgcagtggtagagagaatcatgtcttacacatcaacacttttttttgttacttaaatcaacatcacaatcgcatttccttttttttttgccaaatgtattttagacaaaagcatacaatcaaaaacatttggatgtcaaaaaccagatttggacattttccctttagtgtattgaattaataaatcccaaaagaataattctatatgttttcttctgttttgattgggtcaatgtcacatagtacaagtaatttaggaaccgtgtcatgaaagtaatgggcctgggccctttgccgacaaaaaatgtatgggcacgtggcaactaggaactgtgagattcatatatcctacgtggccaagccgtgtaaaacggatacgatagattaaccctctttttcgcccagaatctttctcctttcacaaatcatattgtatatagtccgatcgaattaatcaaacgaaagattttaattattataagaaaactgaaagagagagcatctctgctttttcaaaatcaaaatttttggatttgggaattttcgttggagtaaaaaagcttcgtgcttggtgcatcatcgattgtgggtttctcttcttctttcgcttttcgggtcgctttctagatctctcttaggcttctgatttgatcatctcttctacttctccctctcgcttcttcaggttagtttttttatttatttgttggtgtaatttacattggatcttcgtggacagagagaaagctgcagtttttgcccctttttttttaataggagatttttggaactttgtgatctgagtttatttttcactagagctcgagttttttttttttttttgtttattaaagtcgaagcttaaaggttttgttttgcctcttatagtattgttggaaatgagcagagtaagttttcatcaatatgtatcaaacttaggaacttgagagcaaggtttcattttgattttaagaatgtgttgtccaagcatgattacgattgtttgattgaagtctgaatccgaggaagaaaatgaccaaacaattaattttcttgtagtaaatttgtttttgtttacattgttcagggcctttgtaatttgggctgcagtgtttcttatgaaaacgattgtttctatcgtgttatgcggttggatgacatgtttttttttcttactgtcagggaagaagagtttgtttttctttagttgaattgtgtttgttgtcctctgcgatatcgctttttctgagcataaactggtttgatggatgatgatgatatggagtttgaggaagaatttttgatgatctgtgtgtggacctgaccaatacaataatctttttggggcttcttattggctcggatttcagggattttcacacttgtagtagagttgcaacatagacaaatg

SEQ ID NO: 771 - DNA, 3000 bp, Unknown
  misc_feature (1)..( 3000): cDNA_ID_1013016_gDNA_ID_1620319_Annot_ID_153274 3000 nt of promoter + ATG
gatttcatatccattactattttaacctttctgtattctttacagtgaggccgaggttgattgggccagagcaactaatcgatttgctgaaaaagtgagtttcctcattacacattttcttgcagggtctctttgtacaatgttgttgaatacgctgatggctttatgttctcacaggtggaatttgcgactttacttgaggatggcccaccaatcagatcaaagagaaggcttatatatacaacacaactcatgcaacaactgtttcgtccccttcctggtagggtgaaatctttagttactagctatgagtttgtggcatattctgctgctagagctgcgctaggagatgcatgtagctccacttctactgacaggattgagggctttttgcttcagaacaatttaaacccgtaaggatatcttctgtttatccctgaaatactgggaaatgtctagacttcgaggtttcgtattgactcgaatggatccactcttgtgtaggttgtctgagagaacggaaactgaaaaaatgagtgaccaatacatctccaaagcagctgaagatttcattagtagaacaaagaaactagagactgactttgcagggtaaaaactgtagatctctcttcttgtatttgattccagtttgaaatggtttcacagttgggctagtttgatctcatgaaaatctggttcttcttgcagactagaaaaaggaactacaattacagacttgagagtcgaagtccaggatctagagaggtttgcagtgatcaatcgttttgcaagtttccaccaatcgtcctcatctatggaccggtccgtgagttcacttaggttaaacccacagagatatgttaccgtagctccagtgcctcggcatattccagatagggtacaatgtctctctttctaactattgatagatccatataattaactttttggccaatcctcccgaaaatgtttgtgtttatgggtgggtaagagttagttggtcggacttctgagaacagtgaaggcctccatcgtcagaaggccggagatttcgtagtagacatgtagcattactgtatgcttaatcacgaatattggatgtcaaatccatttgtatacttagtaaagaatttgccccataacagaaattccacaaggtaacaactccagtgaatctaattttgtttttactcagcgaagattctgaagaactctctctatcaagtcgttgagtgctgtttagaatcagtcattgaaacttaacttcctttgcttcagagtattacaaggtctctaatttaatgagtgtcaatattttacctccggaagccaagtcgacatcattattccatatgtattattccgcaaagaagatttaaatatttgataaggaagttaaaaacataagccaacatgaaatctcttgttcttgattagtttcatataaaagattgaaacaagaaactagagacattcgaactagtgacaatgattgaggagtttgtttggtttgaggagtgtttttgatgttagtccgcgtaacagtgttgtaagaagcagggtccaaaaatcagggagatcaaaagagaaaaagtcggatttcacattttttgcatctggactgaaaagtctttgaactccacaaatgagcaagagctcaaggttctagtttgctactcaaggattagagagtcgaaaacacaaagacaaaccactagcaatctctggtgcggaaacaagagccatacaaggtttatcaaaaaaaagcatactactcttaagacatgaggattatttctttgtcgcgggtctgttaggccctaagtagtttgtaaccaatcccattatagcaaacctgtttttaatacaagaaaaccagattcagagtcaacaatttattgagtagaaacaatcagcttaaatctgatccatgttggattttaacaggaatagagaggttcatttcactattcaatgcttttggcactcttaacttaaaaataagaagaaagaatgagtgaaaaggaacatacatcatagccatggagatctgctttaaatcattttccaagttcctcatgttggccagagattgtgcacagaatataattgcaagccacgagcatatcttgtactgagagatacacaagccacataaataaagaggatgaatttctcactccacatatgatgatcttttaatccactttcacactgactatctcaatctctcgagctcaaatttcaacaagatctaacattttctctagtcttataatatgatgcaatcacacagtcatgaatctgcctatttggggaagtaagctttaaatcaattcaacattcaaaatcactagcgagtattggaaagatccagtctcaaaacatcacgaactagctagagattgatgttgctaaatcggtgagttcaacttataaaatccgacgatctaagtcaccaaccggagtactagtttctacgactgaattgatttctaacagagcaacgatcagaagaggagaaatgaaaatttaccctgaacataacgccggagacgccgaggataacggcgatgaatccggagtagtcaacgggaagatcctccggcgctacaggccgtggaatgtaaggctttgccgccgaaggctgccgtggatcgttcaccgacgaagcgttcccgtgactgtgagacatcctcaatctctctctttggatctctctgaagctccgattggtaaatatatatctgatctactgtaattcttcttagagattctattgatctattatatagacataattgctaattacaattaaaattaatttaaacaagttcagaagtttatgaaaattacaattgtaaccttttcgtatttcttcataaagccctaagctgggtggaaatagaaaacaaactatcgccggccgttcaattcccggcgacgtaacagagtttaggagtgtgactcaagctcaaaaaactcgttttgtattcgatg

SEQ ID NO: 772 - DNA, 3000 bp, Unknown
  misc_feature (1)..( 3000): cDNA_ID_2731167_gDNA_ID_1620319_Annot_ID_153277 3000 nt of promoter + ATG
ttgttttgttttccataacgaaaagagggcccccaaaaaggtactcaaggagctgacaaaaacaataaatatgcatatatatattaatgtaattaaattgtcttaagaaaatatcaaaatagcaaggataatatatatgaattgcaggcttgcagcttcgtgtaagcaggaggctcgcagatgagtttgaaagttgagtaataggatggttaggtaaagatgaccaatgatgacagtatactaggagatggaaatatcttcatggactaataaatgtatcatgtgacatgtcaatatattaattcctattacaaattaaaagtatctctaaaaattaaaataatttgcatgtgggaagatgtggaatcaaactaatacgtcagagaaaaacaagaagaatgacttgccatatttgtcgaggtaccgtaagtaaatgggttaaaccagaacaagaaggtaaagtttggttttctttttcggttcggtttcaggttttaggcaaatcacataaattttagttttatagaaactcaaacctctggatttactgctatagacaacgactatcaatattgaacaacacggaaacaacgtcattcaatgattcaagaattcgtaattctcaaaactctgcagttcatttcaattaacttgattacgtacaaaggggaagacaaaatatcaggttaaagaaagctaccacaaaagtcaaaacacaaactaatgaggctcaagatttaccacaaagatgtcaattgtttgagcaaaactacctaccaaggagccaaaaaatgtacgtcgagatagcctttttttaggaccgacagttaccagttggttcatatgaaatttcttttagcataatcgaatatttacgaagatttttaataatatcagacgagttctttctcatatcatggagacttatatacgaagcttgatcgtcatcatcatccacgaaacgtctaagctatcatataaaccctatgtaataaccacgaaaccctatgatcctgaaccttattctcatttgacaattgaaaattgttgtttctcgatgccttttgtagacctcgaacatggttatatgtagaagaataaaacaagcactattaacaaccaattgtcggttaaactaaagttccaaatctatatcatggaaatcgaaccaagcaaatcttgtaaaaatacttttcgctcaaaataaataaacatagtgctaagatatcaaaatgtgactgtcggatacttttgcatgtaaataaatttcaccttcttatagaaaatatacaaaacgttcataaaaaaactgttgcaactaatgtcatgactcgtcactcatgaacaaacgatgttgaaaacaatatgagatatctcattatgcgtaaaccaccaaaagaatacaaagtttaagggaaactctctccatacttgatacttcaaacgctggaagatgaatgagcagccgagcaggaccgttataaacccaagaaacagaaacggttgcaattaggcttataaagcaaaatctttcggatgaaagtaattatattctacttttcagttttttttggatgaaagtagttatattctaatttatattaaaaagtatttatattatactatgataagagagtgttgacctgaaatttacagtttatcagcaacaatattcggtttattagtttccaagaaagacaaatttcccttataacaattcaaaagtatgtgataatgtggcagtaagttataaaagatgccataatcttacttaaagttagtcaaagagtatctataatttgactaggaaagtcttatgaaaagattataaaaatcggatctaccttttttaataatgtaatgaaaagattgtcatgtggaaacacatcaatacgatgctgttttaacatcttaggtggttccctagttaattaaatggtccgtcacttgccccaaaaccaactagtctaaccttctgtctttgaaagagagttctgatctacgacccatctccttcgtacccgagcctgaaatttatcttccggacccgagcctcggatttgctcctgcgtccgccgttgaaaattttcgtactcccttcgatcacttatctctctttctctcttctcctggtttcgttaattatcggattcgaaaaccctaacttattcttagaaattgaggtcggagaagaaagcttgtcaggctttccaattgttgtcgacgcgacagaacaagtgtaagtctgcatacatctctcttactcttagtagaaaccctagttttgtgtaatgtcccaataggaaaatgatgtgtgaattcccaattctttggagcgtgttggtaaaattgaagtaagataggttctcgtttgaggttgaattctaggttatggtaatgttcgtgttagccagagcttcgattttgggtgaaattgtgttgcggcaattttgatctcagagtaggttcacgagatttccgataaagtctagaaattggtcgaaattagcttatttttcagctgccatagagtgtttatagctgtgaaatgcgagagttccactgtttattttttgtataaggatcttgatgatatttactgcaaatgaatactcgagattactggattaggtgcatttgagtttgttatagtttcagaagttgagttggagtttaggctttggcttagtggaccttggatgtcaatgtacggttttcatttaaggaaacaatgctgattcagctttccttatcacctggtcggcgttgtctcgcttcgttggtctgagggttttcctgcgtgaagatttaaactttcttgtcttaaactgaatcagggttgaggatcttgtccgatgattttcatttgactcacttttgtttcctaatttgcagaaaacaacgattgttttagatcaaaggagacacaagattgaaatatttttcgtttcttttcgaggtccagatatttaaaaataatttctagaagctgaatctatg

SEQ ID NO: 773 - DNA, 3000 bp, Unknown
  misc_feature (1)..( 3000): cDNA_ID_2125817_gDNA_ID_1620319_Annot_ID_153273 3000 nt of promoter + ATG
gtatttgtaatataagtatatataacaatgttactattcatcttgatattattaacttgatcatatataaattacctaaatgaattaaacaggactacaatgaacaaagggtatgctttcgtgaacttcacaaatgcaaaagcagtgtccaagtttaaggctgcttgcaacaacaagccgtggtgccatttctactcaaaaaaagaacttgagattacttatgctagaattcaggctagttccactcctttacatatatatatacacatctttgatctgtgtatcttatcttattcaatcttattgtaacacttgtcggggaaaacaacaatacttttgtgtagggcaaagatgagctggtgaaacgtttccagcatatgacatatccggaggaggcctacagtgcggtatgtttcagcccagctcgtagcggagggaaagatacagttcaaaccacaatggtcggtaaatgcaatgaaccagtgtgctcggtttagtctttccatatatgtaattaggattatgaataataaaagtgtatgcgatggtgaacatgggtctaggatggaaaagaaaagactcagacaccgaaccaaatccaagtaaaattctgaaatgtttagttttggatttggtttttgatgtgtgtgagttttgacttttcataattagtgttatgtttaagcgtctactactctacctgtttctctgatctatatataattttctatgttgttgaactgttgtctggcgatgtttatatacaaaaatatagctatggttttctctttttttttttttgttaatgattattctgatattcaaaaatttggttgaaagttcttttttttggtgaaaatcaagtcatacttcattccagttatagagaagacaaaaaaatctttctacaatgaggattgtttttgcaccaattaattttttaaaggaagtaagccacgaactcttagcttagaaggtgatcgcatgaaaaactagctaacaacataaaaaaaaaaaaaaatgagttggccaaatatcgccggtggatattattagactacgttttcttgtcaacggtggatattttagatataagactttttggaacgtaccaaaaagtttctcttattcctttgaactcgcattatgttacaaaatataactagagaatcttgcatagaaaggtttgcggttttgtcactattttgtatgtgtactactgtactgtacattgaactgttgtgatcttttcaatcatgtaaaaacctactatagaccttagcctattctggcgttacctttacacattccagtttttattgagccgaaaccatcattgttagtttgggtgacgatagattctgcagtaccttgacacaaatcttcgtttcttggggaatggagcgacaagtgtgacgtagatgtgcatcgtaggctcctacaaataatgaccaaaaaggcctttttccatcaacaattgcttctttttcttttctctctttttttgccacttttttccccactatggtcatgagtcatgaccggcttcacataaacgatgttgaatcaaatagctttttgggcggggactgagtggaattaaagatgatggattcagttagggttttgaggtagttcttggcccataatatggcccaatatatgaattttgacttttttcgaattatcgttgaagttcatctcttaacaataataagcaacaactttatgagataatgaattattgcaatacaatgatgtagaaacggaccaatacagtgtcgtgtttgacgtttaggtgggtttggttataattgtcttatcactggcccacactacaacaacaactctcgtctaaaaccaaaccctctgacatggaaagagagttttgatctacgagccaattgctttggacccgagcctcgtatttgcctccggacccgaacctctgtttggctcctccgctcgccgttgaaaaatttccgcactgatatcgatcactttatctctctcccttctctctctctttctcttcttctcctggtttcgttaattcttgaattcgaaaaccctaaacaacttgttcctagaaattgagcaagcaaaggaaagctttttttcatcttcaggtttccatttgttgtaaagctaaacgtgacacaagtgtgtaagttcacatctctgtttccctctgtggaaaccctaattcttgctatatatcctaaaaagaaatgatttttttttttacccaattattgtaccgtgtcgataggtagtgttattgtttgaggttgaattctcggttactgtaatgttcatgttattattaaccatagcttcgatttgcagtgagattgtgtttgcggcaattttgatctcaagtgtgttctcgagttttccaatcaaattctgtatttttttcgaaattagcttaattttcagctgccataagagtgtttatagctgtgaaatcggaaattttcagctggtttttgtttaatgaagttgatgctgtttactgaaatgagctctccaagtttacttgattaggtgttaagagtttctgatgttgactggaacttaggcgtcagtgtaccctaagttccaatctaaggaaacaatgcttattctgtttccttgtaccatgtgggctctgcatcaattctctagtgtctcactttgctgccctgtggtttttgtttcctctttgcagaaacaacacttgtattggctttcttctgtctagtgtttttgtttcacttgttgtgttcaactctaaattttgcagtatctgttttgtttgtttagcaggagaacctatgagtattcaaagcatgccaattggaggtagctcatgaattctggggaaagaggtgtttatatgttcccttttttcttacacattcggaatttagatcaacgaaggcgcaatgttgaacttgtttctgtgtttttttcaaaggctcagataattacaaataatttagaggagctgaatct

SEQ ID NO: 774 - DNA, 3000 bp, Unknown
  misc_feature (1)..( 3000): cDNA_ID_2125798_gDNA_ID_1620319_Annot_ID_153266 3000 nt of promoter + ATG
tttttctattgacattttgttctggacattcctctggttgtttcttctccaaagcttaatcgtgattcgggatagccttgcagataacgttgttgaagagcttcctgcatcactctgcaatctgattcagttaaagtcgctttccttagacaataatcaagtgaaccaggtaaacagattgaaatgtgtttttttttgtttttgggtttattgaatcactatcttcttcctttgaaatctgtaacacttgttgttttccagattccagatggattgctgatacattgcaagagtctgcaaaacctttctttgcataacaatcctatttccatggatcagtttcagctggtaattcaataatccataacctcgaaagaacactttttaaagttgtttgtttgaattgggttttgtgtaacatacatttatataaaaatggatagatggaaggataccaagactttgaagagaggagaaagaagaaatttgataagcaaatcgattcgaatgtgatgatgggctctaaagcacttgatgtaggcgttgataaatgaaaactgtcttcacatctccttactttgtaagttcatttagactagtgcagatagatttggtattagtctctatgtattattcctcactgatgataaaatattcgttttttgcaggtcggttcggtgaatgaggatcatcgtttcgtgtaagaaatattgttgtaaaactctctctctctctttctctcgtctgcaagatttagaatctctgttactgtcacaccaattcttatgaacacatacatatgtacgtttgtatactctatcaaggcgtgtctgtatatgtatatgtgcgtgtgtgtatacaaatcatataggcagaccgattcttggctttggcccttatattgagatgacgattctacttctacatgcaagtcttcaattgttctgtctttaaaacacacgttgggcttgctaatcagctttcctttcactaccaaaattggattacacactagactcttttcacaaagattcatgtctctcagcatctgacatttgataatgaaaacagtcaaaaacaaaagctcagagtttggtgcatcctagatacagattcatcaactcaggcaactcctcttcgtacttgatcacgagcttctccaagaacactttctccactggaaccaacaaagacgtcaagctccaatcctctttcacaagcccgttcgataccaaaaccttagtaaccgaacacctcgggataatcctcttctcaaggctgaagaagagcaccactggacactgtgcgatcgatctaggcgccatattcatctcattcacaaaatattccatcgttctgttaatcttcctctcagacaacatcatacaatgagggtgcttcttgaacgcacacatgatatcatcttccgaccatccccatctctgataaacctcaaaacatttgtcccatatcgatttgtttcctttcccagagagagcatgaatggccaacacaaatgttgatttttgaggattgaaccccatctcttgagcttgcttagcaattgcttggaactcatggttcttctgcatcacagcttcaggaaaatgcgtgagaagcagcttgatacatttctcaggaacaccagtctccgccatatagttgatgtttgggacaaggttcttagtgtgatcctcaaggaaaacccaagtcgtcctccgcaacgccgccacaatcttctcatcggaatcaagaacgcttttaaggaaattgtaagaagggataagctgattaacaagggatctagtcaaaatggttggatcagaagctaaagttcgagcaagtaaagattttgagacaccaattgagagaaagaagctgagtttcgggaggaggacagattcagcattggctaataagagaacaggacgtttcttgacgagagatgagatttgagctgtggtgaatccatggtcacgaagaaggttgagaactgtgttgggtcgttctggtgaatctagtaagagcttacgagaggctacggtggcggaatctggagatagtccacatgagtcgataaggtagttgagggtgaaggagagtttttgctgttgctcatcatctttagggtttttggaggtgagtgtggttactggagaagaaaattgagtctggagagagaatacgaagattggtttccgatgatgcttaggtagtatggtggtgaagcttcctcgtgggattaatttcgtgaggaagacgaggttcgtaagagaagtggcttgaggtattgcgaccgccattactagagagggattgcttactaaaaatctctcactctcacagtacataaaccaaatccgaaataataactagtttgacccgaaccgacccgaccggaattgaccgggttttgttttttaaacaaagcagagagtcatttttacttatctgggctggcatcgcttcgaagaaaccgagagacattttttttttttggaggatcatcaaattcaaacatcatttctccggcaaattcgccgtcggaattatctcagagagggattgagctgcgaaggtaaacgtttcctgggcttgtattcgtgtgtacgctcatcaattttattctcgtgttcgctttttcttttgtggttgcaatttttatccttcgttgttgaaattggctatctagtggtgtgtgtagtactgttttccccaattacttcaaaggaatcgagtagaagcatcaaggctttcatctaattttatgaataattggacctgtgaagttgacgtcttctctagttcttcatttagttgttgtaagtgtttttatagcctaatttgatttccgtggaaagataaactgaaagaaaaatctgatttgatttagggaatgaaaacttggattcgtttgaagttagttgtagaaagtgtttctataggttattggtgctaatgattcattgcctttgcagtggtgatttttgtctctaaatg

SEQ ID NO: 775 - DNA, 3000 bp, Unknown
  misc_feature (1)..( 3000): cDNA_ID_2125790_gDNA_ID_1620319_Annot_ID_153264 3000 nt of promoter + ATG
aatttgccacctcatattagcttaattaatcaaggcttcttactgttgggcctacaataaaaggcctgaatttggcccagatagattaaaccatatctaatatctttatcaactaatttaatttcaaaaagattttattctattttatcgtacatagtttgcataatatggttagatttcaaattttatatggaagtaactaattttggcagataattggattcataagaatagaataaaatctctatatatttatctatactattaaaagacatcctagaaaatagtataatacaatgtatttcacccattatgcacatcattttgcaatattaccttaaacaaaggctaaaaattacaacaacccccaaaatgataaaacttatataagaatctcatgattgatgctgtaggagaagaagaaaaacaaagaaacagaaccaaagtagagacactcttgttctttatatggattctacttcatcggaagtaaaaatcgtttctcaatgctttgttaaacccaaaaccatccctgaaaaatggaaagagccataccatttatcaccgttggatcttgtgatgctctctatgcattacctccaaaatggtcttctctttctcaaatctgatgatgcaaccaaaacaaaagatttcatggagacttggctacaaaagcttagagattctctagctgaaacccttgtccatttttatccgctcgcgggtcgtctctcgactttaaaaaccgataatccgagatcctactctgtgtttgtggattgtaatgacagtcccggagctggatttatccatgccaaatcggatctaagtgtaagagatattgttggatccaactatgttcctttggttgttcaatctttctttgaccaccataaagccgtgagccatgatggtcacaccatgagtctcttctcagtcaaggtacattaatttattcttgtaatctcaaaatcatataattcacttagcctagaagtttagtctgaacgatagtaatacacatatagtactaggtttacttaacttcttgccatttgatttagagatacatcgaagtattgtgtatctatgtagtcttagttgtttgtatatcacgcaactatgcatgcaataccctaaagagatgaatcttttcaggtaacagaattggtagatggagtgttcattggattttcattgaatcacgctgtgggagatggaggttccttgtggcattttttcaactctttgtcggagattttcaatgcacaagaaaccgataacttgcttctcaagaatcctccagtcctttcacgttggtttcctaaagggtacggtcctgtgtacaaccttcctttcactcactctgatgaattcattagccgattcgaatcaccggtcttgaaggagagaatattccatttctcgtctgaaacaataacatcattgaaatcaaaggctaatgaagaaagcagaacaacaacaatttcttcttttcaagcgttagccgcatttatgtggagatgcattacaagagcaagaaacttaccttatgatcatgaaattcgttgtagccttgccgctaacaatggaacaaaattggatccaccattgtctttgagctatcttggtaattgtctttctgctgtaaagtccaagaccgttacatccggtgagctactagaaaatgatttgggatgggctgctttgaaaatgcatgaagctgtgattggaaacactagtgaagtggtctcggagacaatcaaaaactggttgaaatcatcttatgttttccatttagaaaaacttttgggagcgatggtggttcacattggaagctctccgaggtttaagatgtatgaatgcgagtttgggatgggaaaagcggttgcggttagaagcggttatggcggtaagtttgatgggaagatatcagcatatgcaggaagagaaggaggaggaaccatagatttggaagtatgtcttcttccagagtttatggaagctttggaatcagatcaagaattcatgtccgttgtctcttcttcttcttgatcttattcatataagtttgattgattgtttgtgttgctgttaaagtccaattaatattatgtgacaatgtgttattcaactgataatgactgttatttattaaagattagtacaaactaaaatgtgaggtttagagatgataaagttgatgtctttgtggattactcccactcactctcttgattctacactctacttgtaagaacttagataggaaacctgaaaacagaaccatgaaacagagaaaattgcagagaagtaaatgtgtaagatcaagacttttacgttttcaggtttcagtgtgaaagcgcctactcatgccttgacattgttactcggaatccactattaacaaggtttataatatcaagctctttcttgagcttatacaacaaccatacaagaagtcatctcctcccaaaacacaccctccattcaactactctctgaaccatttgtcccttttgtctcctgatatgttctaacactaagaccagatccaaaacgacacagttctacttttggcaagaatcacgtgacgtccttgtgattgggcttcagaatttgcttgcttcttcttcaaaccctctgtgggaatagtgtttagtgaagttagtagaaacatgcatgtgttatttgattaaagattaatacaaactcctaagactaatgttattcaattagaataaagatcatatatatgatgacatcattgatgatgaccagcatatcaaattgtgcaggaacatacatatagatatgatgacatcattgatgatgatagctatctataatcatattatatgaatatattatttggattgtttatgtaagcgagtataaaccaaagtaacaagataaaagggaagcaaagggaccattgaaagaaacaaaagagtcatattatacacattttttctctttttttttttcttcttgagaaaa

SEQ ID NO: 776 - DNA, 3000 bp, Unknown
  misc_feature (1)..( 3000): cDNA_ID_2125764_gDNA_ID_1620319_Annot_ID_153257 3000 nt of promoter + ATG
aatgttattttctgtctatctggttctttggagaaaatatttttggtttcatcagtaactgtagattcttgatcccttttttttttttttttttaaatgatgattactttgcagataacaaaactcactaaaggtttaaatgcggtaaattcagcatgtgaggaggtaagatttttgtgcagtccatttgcgtttctctttcttggaccattaatcgatctcctcatttcttgttcatcagatacgtacttcacaaaagctaaaagatattatggaaaatattctgtgcctggggaacatattgaaccaaggaactgggaggggtgagtgagtatttctattatttttacccaaatatcttttggctttaagatatttcctaacgcaacataataaaatctgtgtgttgttcaatgtgagctaagaaaagaatggcgcctttgtttcattgcatcatatatacttttgttttgtctgaacgtaaattctttgtggttgataaagacccttgttcttttttctgaaggcagggcagtgggattcaggttggatagtttattgatattaagcgagacacgtgctgataacagcaagatgactctcatgcattatctttgcaaggtaaaatacaatgcgaaagaaagaaacatgcagcgtctttgctttagaaatcatgaaaccctcctctttgcttttcccaggtccttgcttccaaggcatcagatctactggacttccataaagatcttgaaagtcttgaatcagcttcaaaggttttcctttctacttactttttccgtcctgctgtaattggctcatcatttgattgtcctgtctattgcagatacagttgaagtctttggctgaggaaatacaagctataaccaaaggattggaaaaactgaagcaggagcttaccgcatccgaaactgatggtcctgtttctcaagttttccgtaaagtatgttgctgtttttctatcttctccatcttttgcatatcttttatcaatcatgattcatgaatttgagattaggtcctgactgtgccacataactaaatcttccatcaataccagctgctaaaatctagttttaatgttttttcaacagttattgaaggagttcatatccaatgctgagactcaagtagcaactgtgatggctctttactaccccgcggtaatttttgtcaacctctactagattccaagcgccttacctttgacaatgtgtttggtcctgaatttgccattttttcttgaatcaatctaattatgatggacgacagagaggaaatgctgaggcacttgcacactattttggctaccattatccatttgaacaaggtatgcctcggaaacaataaacttcatcctcatttattctaataccatagaaagtggctcattgctaataacatacatggtgatcgattgctgcagttaccgcgacactcttgagttttataaggttgtttaagaaagcacatgaagagaatgtcaagcaagcggagttggagaagaagaaagctgcaaaggaggcggaaatggagaagacgaagtaacgagtcagtgtcactaagaaaaagagcaagcggagttggagaagaagaaagctgccttatataactgaccatagtgtggtaactcagatgttcttttgtgttgaaataaacaagtgatgtatatactttcactgcttggttttgttaaaatgtgtgtggttgagaaaaaaaaacagttgaaatttgcattcaattaaaatatttgatactaattcgaacttgggactctgaacagaagaagaagtcctcctcccaagtcaactgatattttatgtgtgggccgatctacaatttcttttattttcgtaaaatggcccatttaaaggccttcaagactgaaccggttcgaccggatggtttgtcttaaaaaattgattttaattctttccaataaatgaggatttggtttgctggatctgtaattctccagaaatagtttttttgttcactttttttctatgtaggaaatgataaaaagagaataattttctctgacttgggaaagtaaggatacattaaatgaataaatgtaataagaaaaagacaagaggaggaagaagaagaagaatcagatagagacgaaaaaaggagtaataatctttttttttctttttcttggagttggagtgggtcttttctctcacacaggtctctctcttctcaactcttcccatgttgtttcgcttcttctgtaagatttctgtaagttagttccctcagaaaattctccattctccattttcctgcaatccaatatctttatctccaaagataatggcccagcagatctcagatatatagaagatccctcttcttttggtccactttcccttgtttacattttcccgagaaaacaaaaagaaagcttttttgcttttttttctttcttctctgctttcccagctttcaagcttctgaagtaaaagaacgaagctttgtgttaaaatctcagaattttgattattcttcggattgaaaaaaactgttccttttcctaaaggtagatcctttcactcgttttgatttctgggtttcttcatcggcagattttttgttctgtttctttctttaaatactcatttaaaatctatactttctttcattactatgttcttctaggaatctagctcaaagtttcatcttttgcttccttcttggtctttaatgcttacaatgtcttgttttcttcttctttttttggcaatcaacaatgtcttgttttaaagcttggtttttcttttaaaccacttatgatttttctgcctacaaaatgttgttaatagtctttgagatcttatcttaaatctcatctttttacatttgcatattttgtttgtatagagaagcagatttgatgatgcattgtggggtttacttttttattttattttaatgatattctttcttggtgcagagtgtgaaagtgaatgaaga

SEQ ID NO: 777 - DNA, 3000 bp, Unknown
  misc_feature (1)..( 3000): cDNA_ID_2125768_gDNA_ID_1620319_Annot_ID_153258 3000 nt of promoter + ATG
actttttcagatagaacatggaatttgcacaaactgcaaattagactgccaccaacttgtcaaacggttaaggcctttaccactggaaaaacgacgtacatacataaacaaagctgctccagaattgtttgcccggaagaacttgtgagccattcaagcccaacttttttcttgtagttctatttgaatatcataaggagtttaattactgcatttgaacatacactttatttttgaaactgaaattcttaattttcacatctaatgttcaaggcttgaaaccctggttaatgatccaacggagggaaatgcatggcatgcggatcatatcattccagtctaccaaggcggaggtaaatcctaatctcatacactagataggcctaacactagatcactcaataaacgtttgaatttgtgaattcaactgacataacaagttttattggatcattggtaggcgagtgccggctagagaacatgaggacactatgtgtggcttgccatgccgatgtcactgcagctcaatgtgcagaacgtaaactgatacggtccaaagccaggaagcaactcaaaaacactttaaacgaactcagaaacaatccgaagcaaaaagatctctcggctgacgagaacacaaaggtatgactgagacttaaatgaaaatgggggaattttacaaaagactcgatgtagcattaaatgtttgttctgtatgtttccaggagactgattcagctaccaatgaagaggaagatgaactaatgattgaagttcctggtagtgcctactccatagatcagaaaatcaatcatgatgcctcatagaactcattttttgacttgtcagtagattgacctctcaatgacaaagcacaggtcctgtttgtatccttgtatctgtaatcacagttttgcttggaatcaaagcctctttcatcggcagtttcttgtcagaaaagcaatgttgtcctaattttttttaaaatggcgtaatactaagtcatattgaaaaaaagaaaaatactcaagactttttctttttatataaataagcaacaaaaagaagttaattattgaaaatactcaagactttttctttttatataaataaattaaagaaaatttgttgtgtaattaacaagcaaggatgttccaatgggcgaaacagatactggagaaaacaaagagacgatccagtgctattacgtatcatcgttttattacataaactaataagtaataatataaaatactgttgacaacaaatatttcaatgtttccatacaccaattttcatggctgctaatcggatgttttgattttttttaatgttttcaaactcttattatttagaagagaacctcattttcaccaactatttaaaagataaacacaagtacattataatttaatctggtaaacttcagagaaacctacatattaaaatttaattgcatctattttattcatttttatacgtaactcccaatacgttgcatgaagatagagtttttatccattttcttattaaattttcatgagataaaaatatcaattatatatatcaaatctgagtttggttttatagttcatgaggggttatgtaatcgtaggaggatgggatcataaagagcccaatgaaataattgttgatgttcccttgcctttaagacttactctttccaatatgtggggacccattttagtcttcctctcccaatttcaataatttggttatctatacttgtaatatttgcatatataatcatatatgtataattgatatgtataacatatcattcatgtttggaaaactattgtagatatttcgttatttttgttatttaaaatcaagtttttatatataaacctatactagttgaaaataacatttaaaagcatttatttgtattatttatcatatttaaatttagtttcactttgattcccatacatatatactatatgtatgtatattatatagaggtgggtaatgtttccaacaaaccctaagcacaacttttaacagcaaggagttttctttgagttggagggacacatagccattattttgtgtctcaagactgtttttcacctttcttttaacttggttcgaaagggtttactaactttttgtctcactttttcttactttaatattaataagatttgatatttgtaagtcggtatatactgagttttcatataaattatcatccaaaattcagaaaaaaatcaaactatacggttaaaattaaaaatagaatataaggcataagtatatatgcaacaaaaatatattaattatatcaatatcaaaacacatgtatctctctccgatatattgccaagctaattatagttaccgtttttagcatacaattaagtaaccaattgccaaagcaatgatatagagttttaaaattgttttctaaggaaaatgatggtttttaattaattatgaatctcttttgccggaagaaaagaaagaaaaaagttttgaaacactagttttctcgtggaaatatgaatttgacctacaaaaatagtcatatcgacgaagaaggtggatcggtcagagtttttgatatcaaatcgggacccattgaattattatttttaattgagtattcaaaatggtaatacttattaggattttgatcagtttgaaggttagaatgtacgtatttattaacaattcatttttttattattaccagtcagtctgatttgtcatgtatttattctgtcaaatatatcatttttcttgaaataagcaaaacaattttatgtaatctgcaaaaagattagaaatgtaataattatataaccagcaaaaggtaaaaaaataaagagatatgaaacatgccatatcgagatgtagtagtgaggaagtcttaaatttctactataaaaacaacctccggtgagagaccacacaaagaaaccaaatcaagaagccattccaaatccatctttcttcaaactaacaagtatg

SEQ ID NO: 778 - DNA, 3000 bp, Unknown
  misc_feature (1)..( 3000): cDNA_ID_3058919_gDNA_ID_1620320_Annot_ID_153288 3000 nt of promoter + ATG
accaccaccgcctccatagccaccacctccaaaaccaccaccacttgttctatcatttgcatagtttactttaacaacccggccatggagatcctgagggaggattaaggtaatggatcagggagagtatcaatgaaagttaaacccaacgagacacgagaaagttaacagacattataactctttcaaaggtttcatagattagcaatggaacttacccggccatccaaagcctggatagcactagatgccgcttctgaagaggtgaatgtaacaaatccaaatccccttgacctaccagtttcacgatccaaaataactctagctgtgtaaaaacacaaaggcttggttagcagaaggcaactaaacaaaccatactcaagaaacaagtgcctaatttattcactaagacactgcaatagcattttgacaagaatactaaatagatcagtaacttactatcgacaacttcaccgtatttggtgaaagcttctcttaagctatcctcatccatgctataagccataccttacaacaagaaaagagaaaacaaaatcataaagttagtaacataacagcataaacaagtaaacagatgaaaagcctatagaactagactcacctccaataaagagcttagaagatgacatacaccttattgcttgaaaaagcgaagggcttgataaagaaacctgagcattgagttgcttgtttgtggtctgcttcaatatgttcccgaatttactcaaaaaagccatcgcaattagatatctagcatgaaaaagacaaatacttcagccaccagatagtcaatttcaaagtaatgatgatatcatttcctattttctatcaagaaattagcaagtttcatactttttcccccttaagaagaagggaatcttaaaaacgacaatcaaagcttttttaactcgtactctgcaaatacatgaactactaaggaaccaaaaagtgaattcaataccgtaacacaaagatcggaacctaaatccatgaaaatgaaaagcgaagaaataacagagaacactcaaaatcagaaaagaaagaaccttcaaaacagctaacgagattcaaagctgagagtgaaatgagcgtgaagagtgaagtacctctacactgacttcgcttcctctgtgatttctcgcgtccgttaaaacttaaaaccctacttctcccagaaagggtttatgtagcgaagttgcaagatctgagtcaatcgtgaccgttgaatctaaaatgattttggaaaatcatattagacacgtacggggttttcattgggtaagtcattcgtttatgtgacagcccagtagctctaagcctataacgatttaatctctctattttggtttttaaacgaaaataaaaaggaagaattcgaagattaacttaacttagaaagatatttcgaaattaaacttttttcttagaagtttggtaaaactacgtataatttttgtaattgaatcctatacattaaacttctagtttgaatattgttgcaataaaattataatatagaagtattaaaagataaaaggaaaacaaaaaaaaaagttaacccttaacaaaactttattctcttttgtaactgggccttattctcttttgttatttcagcccatttgatttgctgaaaatgcaacccgaatcacattattttgacccgaaagtgaatgggttaaacccgaaacatgaaatactcaaaaagttgttgcttttagggttttgtggtctccgctagtcaggcgtttactctctctctctctcacattttctcattctctcctacaacaagtttccgccgctaagccactcactacgcagccatggcaaatcctgaccgtatccttcattatctgtgtctatttgtatttgctttatgagtttttgtcaaagctttcttctaagaagattctttttgttcagagggttttaaatataagctgatttcttcattctagctggatctgttgttagttcttttgacactcttgtttttctacgatggatttagatcttcttctttgtttttatttttttgtaaatcgttcataaattcttaacttttagggtttatgaagaattatcgtggttcttccttgttgatctgatgttttgactcgtgaaaaaatcataaattttgttattccttcattgtttttttctatagatgtttcagatgtgctacataatttgtcgattgatccaacaaccaaggctttagctcctgattctgaaacaaaggtatttttctgtggtttagtgttcaccttttgtttagtgattcagaaaacatgccttttggtttcaataagagtaattttcagagtgaacttataaaggctagtgtccattttagttgcagggggcttatggcggaaacggtaatgacttcttgctcaatgatgagttagtggaggctaccaaaattggtaaacctagtcttttgtctaaagatggaggtgtgaccaaagacaagggatccaaccttaagaaactcgggtaccaaagtgcagcttataacgcaaagggttcatatgggaagggtgcctatgcttatgggtactatcccccagcatatcagtacccaagacatggttacactgggagctatgcttcagggaaaaccaatcttcagtatcagtacctggtatgttcttatttcattcattgagctgtagttataatcacttggtatgtaatcttgacttgtttattcgtttaatttattatcatcttattttgcagactcagcagggaagatcagctggtaatggtcaatcttatggaggatacatggacaacatttactccaattatgggatgtgtggaccttacacgaatggctatgggtatggctcttacggttatgactcatggaaatacatgcccaattggtatgcggttaacaatacctacaagccaagaaacgggtatcatggatatggcaaagaaaacattgaggggttaaatgagatg

SEQ ID NO: 779 - DNA, 3000 bp, Unknown
  misc_feature (1)..( 3000): cDNA_ID_2044917_gDNA_ID_1620320_Annot_ID_153301 3000 nt of promoter + ATG
taggatttgaatttcgagtaagggggtcaatttaatatttgaacccaaattatatactaaataccaaataattaagctattaaatttttttttgtaaaagtcatggggtcaagtgacccccctcctgaagctgtacctccgccactgcgtatcacagctttttttttctgaaatcaaagtttcgatttttcaaagtagggggaaatagattcactgatcatgaaaagtctactaatatttcaaatatggatgattattgtaccccaaaaaatagaattcaaaagacagaatcaatacaaatttgcgtagtacatatagggcaattattgaactagaaataaaaatacaaataagcaaaagctgggatcgattaagaccgtacgttttcagtttccaatccatttgtaaaataaagacagaaaagtatccatctcaagtttcttcaaagagatgccaatctcgacgccaccgataccatctctcctcttggacatagagaactcatcgttcttgtagatagacattgtctcagtgtgaatgggtcttccccacccgaagtccgtttcgtacatcccaatctggttcgacccgtttacgaccaacaactgtgtaccccatttcattgtctttgttccttcctcatacactttccaagttgactctaccccttgtgaagccaaacgtttgaccgaatcactgagaatctcgacggtgttgacaaatccatcttctcccataaactccttagctttgtatttatagaaatccatggctaagacacaagtcccgaagtatgtcacagggactggtggttctaaccggttcctaaaatcagcagcgtacatgaaacgaaccggtcggtttgggtcaccactacgtgccttcaccatgcatgtccacacatgggcgaacgtgactacgaacgttgacaagtgaagctcagcgcgtgttgactctttcttggctctctccttgagtttctcaatgttttcaggacttatctcgatggtgattcggaggacgttgtctttagcgttaatctctttgactggaggtagctttagggttcttccgttctctttgtcgtcctccgtaagatacggcagaagttcgagcatcttttgttcaagtccggctggaacattgacgacagaacgatctaaaaccgttggtagaattttcggtatggtgccatgtttacaagtgtgagcccatgctttgttaaatttttcagccgttttgccgtccaagacgacatggtgggctgtggttccaatgcagaagccttgtttcgggaacaaagtgacttgcagagatacaacagcccccgagtcagaataaatcggtagctcgggtattagagggcgtaactctagctctggacgaagccctctgccagagatacgtgagaaatccgcatcagtctcagccactgtgagagagagtgtgtctcctgagagaacaactaaatgcggctttggatcttgtgaatcccacttaaggtgacccgtgaataggcgaaagtgagtgaggatgagtgaaagagatcgctcgagcttggggaggatggaggagtagaaaacgtcgcgagatgatgatgattcggtgagtttgtaaaagaagacttgctcggtagggttgagtttaagccactgtaaatcaaagaacgagagtgggacaatgagcgggtcgacggaggcggttgcagggctgactcgggagatcttgatcacctttaacgccatttctcacttgtactctcgtcttttagataatattcctttgtacgtatgagtttattcagctgagtatcagatggagttaactcttatactaacataacaagctaccgagtcagccctagtcaaaaacgttggttggaagccaaggcacgtaattaccatttgaattattttggtccctccagaggcggccaggcggcttaagccaactgcgactgccagatatcatagataaaaattgttatatatatatatatatatatatatatataaaatatataattttatttttgtggtttatatttattatttttggtggtaaaaacattcttagaagataaatttttgtagataaaaggctgaaaaataaatttatggaaaatatataaataaacatttgtgagcaaaatgtgtctacataaaattgtaattttctcgagttaaaaaaaagcaaaaagtgaaatttccaaaagccttaaactagtttgagtaatttaaaagtgtccatagttttttcttttttctttttattccataatttcttgagtttttcagaaattactataattctgtttaaattttcaggatttcctgaatattcatgatgtttagttgtcacttaagttttcatagaacacaagtcggttatgcttttacctaatctttgtctcttgttaatttctaaagcagataaaatctataaaccaacaacaatgttttagaagaagacataacatttattttggcaactcaagttatttgatcaaagaagttaataattagtttttaaaataaattaaatataaaaaaataggggccaaaagaatcagttaaaaggatgttgtatcattcatatacataggggccaaggcaaacacaagctcactatcacaaagaaactggtatccataacccaaaatttgtgggccaaaaatattgaattccaatctcaaaaaagcccataaaatcccatcttttttccctctctagtcgtcgttacacgtaaaaaaaatgatttttaataatccggtaatgcgttaaaaaagatatatcgatgaaaatttccttttctttgtaagttgtaacaattgtttttaataataataattctgatgccataaaatcgcgaggtagagatgaaaaaaaaatagcttcttcaacaaaggccgataacagtgaacccttcgtcggagctcagatcacgagccgccgtcaccagctaagaggcagtgacttttgagtaagtgaggcgaagatg

SEQ ID NO: 780 - DNA, 3000 bp, Unknown
  misc_feature (1)..( 3000): cDNA_ID_3058895_gDNA_ID_1620320_Annot_ID_153305 3000 nt of promoter + ATG
cttcaaaatcaaagtgtagaaacagagattaccaataactaattgtgaacgtttcaaagtttttaaaatttcttgtaaacggaggtaaccattaaaaaacgaattacatttattattttgtaatattcaaaacaaaatcaaaatcttgagaatcgaaaccgttacgtatactacaatttatatgatcacattttaaatttcgaaaattgagggacatttcaaattcaagaaaacatatactccactaatttagggtgtctccgttagtttctaaaactcgttgccccttttaattccagttcaaaagctcacgcctcatacacaatctctaaaccctgacctcccatttcagtttctctgtttgagaacacttgatttcttttaaaaatggcggctacagtagcagagtacgcaactgctaaatcattggcgttgctggacacagagaaccgcgaggttctcaatagttttgatgccatttttactcatggcaacaccgatcaagtcgctcctcttgatgagcctctggtctttaaccgctttggactcagtcacatctcggccaaagacacccatcaaccaaaaacggacgtagatgaatcagcgaaggcggatttcgctggtgcaaaaacgtcagtttggtgggacattgagaactgcgaggttccaaagggttgtgaccctcatggggttgctcagagcattagatcagttctgtcgaaaagtaacttctgtggtccgctcactatttatgcctatggtgacacaaatcaaatcccttcctctgtacaacaagctctctcttccaccggcgtatctctcaatcacgtccctgccggttaatctctcttcttgaaacacctgattagctataaattaaagtatgaatattttggagttagtgagaccagtctttgctttgtagtctctaatggcttaattattctctatgttcttgatgatggtgagcatttaacaggagtaaaagacgggagtgacaagaagctccttgtagatatcatgttgtgggcaatggacaaccaagctcctgctaacataatgctcatctctggtgataaagacttctcttatcttcttcacaaactaggtatgaagaggtataacattcttttggctcgacctgagaaagcttcaacgccactcatcgctgctgcaaagaccgtatggttatggacaagcatttttaatggcgattgtcctaacatacctattgatctcactactagacgtcatcatcatgattctgcctatgaggtatcaagacatttgggtcctaaacaagctcaagggaccaagaggggccggagtttttgtgaattatgcaatgtttcttgctcaaaccatgatttaaccgctcacctctctggtagaaggcacagagctaacgtaagctatacatttctttttcttaatgtgtgcttgaatattgtcctctctttaagcctaatcttgagttcactctacgggcattagatgtgaggcacatatatatatatgttttatgttgatatagtcttgacaattgttgttgtacattttctcaacttgtgtaggttgagctagtagcccgtggacgccctcttgtcagtaattcaaccgaaccaaagtatgcatggtgccgagtttgccgtttgcgtttccgcagccaagcaagttatgaaacacacatcttagggaaaagccaccaagaaaaacttgaagaccaaaacgagcattccaaaaagcgcatctgcaggaccccctaatcgtttcatataagattttggagggaagacataatgcgattagagtttgttaattcccaaacttgtcttttgagtctcatctttagttgttggttgaacaacttttggtttcggttttcatttagtctcgtctgtgtttttggataaaagccgagagctgagcccacgttgataacttttttttttttcaaaaattgggaacctagtagatgatgatgtgaagtgataattacttaaacgtgattatatatatatatatatatgtgggaaataatgttttactggaatgttgatataatagttttgacagttttttgtactctttagctgaaaccattttcttaattgatttttgttgtcagtgtgctaatgtcattggtgtaatcaaacccgaagcaaaatcgaaaaccttccgctgtaagctttgccaggtcgattgctcgaacgaagctatgtataatgcaagtcatatttcagggcggaaacacaaaaacaaacttaaaagtcaagctaatctgtttctttaattaaatttagagtaatagatataatgatctttgaggtctatggatttttggtaaggaataatttgagccaaatttgagcaattttgattatcgatcgtacaagttgtagttttgttgctccggaagatttcagattttgatgtaaatttaatcccacaagttataatcatttttgtagtttatggaattgaaattctaaacataattgttctgacaaaacttgtatttttaatacaattttgaaactctgcacatccaattattttctttaacgtgcatgcaccgatttatttagtagccttaattttttcttattaagaaaagatcctttactaattatgacacttattttcgctaattaccgatggggagatacagcccccaaaagttacaacggctattttcaaatgctgattggtgccttttcaaatgctgacgtggcttaaataataattgtcgaaaaagtagaatactgtatttaacttgatcgtactacagaggacaaaataaaaaagcagactttgcgaaaagcgaaaggtttcttcgtcaacatggaaagaacttagtggaaacttcttaaaacttagattgtcagattagcataactcaccttagcaagctccgatcttcgacgagatagtgagaggagtaaagagtaacttttggttcagaaacaagtgtctcttctctctctagtatctccggtg

SEQ ID NO: 781 - DNA, 3000 bp, Unknown
  misc_feature (1)..( 3000): cDNA_ID_2044906_gDNA_ID_1620320_Annot_ID_153306 3000 nt of promoter + ATG
gtgatgaagtaaagggtcaaccaaaagaaatgactgcactgcgtaatgcaagtgctaaatacatttgtcgtatgtgcaatgtggggtgccacagtccaattgtctttgaaactcatctaaggggtcagaagcacgctgccaatctgaatcaatcaaaggcatgtctcttacttttgcatatttgagagcatataaaaaactacagtgtggtagacatatgctttatgtaataccgtaggatcaggcactcattgattctaagaagcttcaagagaaaggtttcggagaaaaagaacaaccaagagaaacaattgtagagccacagttgcagtctcaaaacgctcaagagaatagcaagtgtttcgaaaagcatgttgtcatggtgaatcaatcagaggtcagtttcttaatattggtaatttggtattttaatttacaatttccagtgtagcaaaacatatgctgaatatgagagtcttaactgtggtaaaatatataaagaatgaagcttatatagttgcatcaggtactcatcaatgcgagtaagcttgaagagaaagatgcccaagaaaaagctcaaccaatagaatcaatagccgaacctcagtcgcagtctcaaaacactcaagagcataccaaattctttgagaagcaaaacgaagagttgagaaagatttgtggcactttagaaagcagtgtaaaagaacctcttccaagtactaaggactgggtggagactcttaacaaacagattccaaatggagaatttttctttggtgacctaagatctgattttgaagtacccagggaagcaaggtaatttttgctaacttggatttgcttgcttagtatgtcaaagatgcaattatctaaatgtattctccaacttttgtcatagtgaatgttttgatggcattgtcaagcctgtaaacctttccaaaggagaaactaagcattcatgggaggtaaagaagaagaaaatcgaggtgaccgtacgccatgcaagaccagctgcatctaaactttgtcatctttgcgtagtgatttgtgatagccggggtttgtcaacagttgtttgtgataacaaagctcattggccgaaccaaaaacatactactgtagtgacacttacttcatgttctacctctttatccttgatcaatatcaaacccttctgacttcttatttttgatgtaggccgcctttgtagccagcaatggttctcagtccagcgtttcaaccaatcctttgaaggaaccagagggtttgcagcccgtgtggtgccaagtctgccagatcagctgcaacagcaaggttgcatttgcaagtcacacatatgggaaaaaacaccgacagaacttggaatcacaatcagccaagaacgaaactatgtctactggaccaggcaagctttctaaagattatggagaaaaaacgaagaaagtatcatgcaaaaaccaaaccacatttgattctcaactgaagagtcagaaccattataccatggcgaaggagcttgtagaggtaaatcttactatttaggttttctttcgtgaacttggaatctgcttttagtaatgaatattacaaatcttagtaaaaataatatccttaggtttgattcctatcgaaagtgatgaagtatatattagaccttaactaaaatatcgatgtagaaggcatttgtctccgcatttgagcatgtctccgcattggagcagttcagtattgttgactcaaggacaatccgagaagacaccgaccaagaaaaagaagcaacaaaggagcagacacttgtaaagatggatggtaatgggtttcgaggggcaccagaagataaagtggaattgaaccaagaaaaacatagagaagcactggagcagttcagtattgactcaaggataatccgagaagaaaccgatcaagaaaaagaagcaacagaggagcagacacttgtaaagatggatgatcttgggtttcgaggggcaccagaagataaagtggaactgaaggagagacacaccgtatctgagaacttggtgcaccgtgtcttcactgaacagaatcgagagtctagaatacccaatgaaccgaggtaagagccaacattcatgggagtgtataatatggtctctctctctctctctttctcttgaatctcgatcaatatgtgtgtgtctaactggttgcttggattttgggttacagaggatgtttagatgtgattcctgagagagtaaaactgccaccaaacgtgaatgtggccaagaatttggaagatgagcagaagcataaacccgaaccaaaagcacaggaagccgaaaacaagtctggaggacgcaaggatcttcctggagaggctgccaaaagggaagagattaagggccaagctgataacttttggactcgcctttgggggaaaaaatattaaaataatgtgaattgttaattcatgtttaagttgtcaacaatggatgttttcttttgaatggcagattaacgttttattttggattggcttttgcttatttcttactgttgtttcttatatataaactttacctcttaaaaaagattcaagaacaatagaatttaggcattgtagtatataggttctctcaataaattgggaaataacgaccggtttttccaacagaattttcggcttagtctgtaatgtaatcatcaaaaattgcattatttgctttacgactacagctcaactgggccaccctgattacttatccgacccggcccgacccatccggatcttccttctcttgtttaaattaaagcagataaaaaggaaactggaaaattcagttcaagtattgtcgtcggaatattactcttcaccggccaggtaaagctttcctacgactatgcttgtgttcgtcggaatgtgtttttctttctttttcttatagtctctggtcgctaatgactcgtattcttggtccagttttcagctcttgtgtgtaaatttgttagtctttttta

SEQ ID NO: 782 - DNA, 3000 bp, Unknown
  misc_feature (1)..( 3000): cDNA_ID_2025614_gDNA_ID_1620320_Annot_ID_153303 3000 nt of promoter + ATG
aacttaagtgacaactaaacatcatgaatattcaggaaatcctgaaaatttaaacagaattatagtaatttctgaaaaactcaagaaattatggaataaaaagaaaaaagaaaaaactatggacacttttaaattactcaaactagtttaaggcttttggaaatttcactttttgcttttttttaactcgagaaaattacaattttatgtagacacattttgctcacaaatgtttatttatatattttccataaatttatttttcagccttttatctacaaaaatttatcttctaagaatgtttttaccaccaaaaataataaatataaaccacaaaaataaaattatatattttatatatatatatatatatatatatatataacaatttttatctatgatatctggcagtcgcagttggcttaagccgcctggccgcctctggagggaccaaaataattcaaatggtaattacgtgccttggcttccaaccaacgtttttgactagggctgactcggtagcttgttatgttagtataagagttaactccatctgatactcagctgaataaactcatacgtacaaaggaatattatctaaaagacgagagtacaagtgagaaatggcgttaaaggtgatcaagatctcccgagtcagccctgcaaccgcctccgtcgacccgctcattgtcccactctcgttctttgatttacagtggcttaaactcaaccctaccgagcaagtcttcttttacaaactcaccgaatcatcatcatctcgcgacgttttctactcctccatcctccccaagctcgagcgatctctttcactcatcctcactcactttcgcctattcacgggtcaccttaagtgggattcacaagatccaaagccgcatttagttgttctctcaggagacacactctctctcacagtggctgagactgatgcggatttctcacgtatctctggcagagggcttcgtccagagctagagttacgccctctaatacccgagctaccgatttattctgactcgggggctgttgtatctctgcaagtcactttgttcccgaaacaaggcttctgcattggaaccacagcccaccatgtcgtcttggacggcaaaacggctgaaaaatttaacaaagcatgggctcacacttgtaaacatggcaccataccgaaaattctaccaacggttttagatcgttctgtcgtcaatgttccagccggacttgaacaaaagatgctcgaacttctgccgtatcttacggaggacgacaaagagaacggaagaaccctaaagctacctccagtcaaagagattaacgctaaagacaacgtcctccgaatcaccatcgagataagtcctgaaaacattgagaaactcaaggagagagccaagaaagagtcaacacgcgctgagcttcacttgtcaacgttcgtagtcacgttcgcccatgtgtggacatgcatggtgaaggcacgtagtggtgacccaaaccgaccggttcgtttcatgtacgctgctgattttaggaaccggttagaaccaccagtccctgtgacatacttcgggacttgtgtcttagccatggatttctataaatacaaagctaaggagtttatgggagaagatggatttgtcaacaccgtcgagattctcagtgattcggtcaaacgtttggcttcacaaggggtagagtcaacttggaaagtgtatgaggaaggaacaaagacaatgaaatggggtacacagttgttggtcgtaaacgggtcgaaccagattgggatgtacgaaacggacttcgggtggggaagacccattcacactgagacaatgtctatctacaagaacgatgagttctctatgtccaagaggagagatggtatcggtggcgtcgagattggcatctctttgaagaaacttgagatggatacttttctgtctttattttacaaatggattggaaactgaaaacgtacggtcttaatcgatcccagcttttgcttatttgtatttttatttctagttcaataattgccctatatgtactacgcaaatttgtattgattctgtcttttgaattctattttttggggtacaataatcatccatatttgaaatattagtagacttttcatgatcagtgaatctatttccccctactttgaaaaatcgaaactttgatttcagaaaaaaaaagctgtgatacgcagtggcggaggtacagcttcaggaggggggtcacttgaccccatgacttttacaaaaaaaaatttaatagcttaattatttggtatttagtatataatttgggttcaaatattaaattgacccccttactcgaaattcaaatcctatttttgccccactcaattaccatattttgtgtaaatcaatctcattattcttcttctattaatttcctgaaccctatattaaattttggtaactggttttattattcccctaaaaatacatgaatttagatagacaaaacaattaaataatgtgggtactaatctttacatttagataaacaaaaaacaattttagtaacaaaaaagatgtatatcatttttcaccagatttttagtaaacttttaaatagaaaaatgatgaataacatatgactactcgtgtattttccacaaagaattttttttcggaaaaacaacaataatttacgaaattgtgatattattttttgttctatttttttatctataaaaaatttttttttaaaaaaaatccttgttttaattttctcagaaacgtgggaccacaatattttccaaagggttcagagtttagcgggccgaatatatgtcataggcccataggctaaaacaataagggtagttatgtaaaatccgctcacacacactcctcaaaagccctaatcgtttatcataattcctcaatcccgtcttcaagtatcgccgacgccgcagcacaaaggaggagaagaaggatcaaaggcgcgacaaca

SEQ ID NO: 783 - DNA, 3000 bp, Unknown
  misc_feature (1)..( 3000): cDNA_ID_3058903_gDNA_ID_1620320_Annot_ID_153300 3000 nt of promoter + ATG
atatactaacattaaaaaataaattgtttccgcggtgtaccgcgggttaaaatctagtatatatgtataaatgtaacgaataaaatgagtatataattttatatgattagtgttgaatgttttgacttaacataaagttgcatcaaaatgtataactaatgctatatacttctctttttgaaaaaaaaaattgagtcttggtatattaaccggagacgagataatgtaattatatattaagattttttttcactggcatcaaatctaccagaacagtcaaagaggtaattaagagtaactgcaagagctgaaatcttcttacaaacaaaaacataacatagacccataacacagagacagagattaccactaaactagaccaaaatgtcctcgaaacgataactaagtgcacccacagaaccagagaccattaacatccttagagcatcaggaaagagcagaatccactcgaagcgatcaagagaaggcagatgaacaatttgcttgagttcttgagagcaaacgcgctgctgtctgtcgtgtaatccgggttaatccctgtcccagtggtgcctcctgtgctatttcccccaaaaactccattggttgggttccctgaataaggactgttggtaccactaccaggaagtgtggtggtcgttgggctgccttttggattggttgtgccaggtgtcacagttgtgctgccgctagagccactggaagaaaataagagttatatcagacaatgaagttccaaaaccagaccaagtcttgatgaaagagattgatctaaaggaaagtcttcaaagcaaattcatattctatactcaaaaaacgctaacaaaaagaagagtctcagtttctattaactaaaagggtctttgatgggtccaaaagattaaagatttagagtactattgcttaatacggccatatcagtcaagaacatgatcatgcgttcaaactgtaatccaataaagcatttgattttgattatagatatgaccaaaagtttggttaaagaaataaagaaaattgagtacttttaggttcacgttgaacacttacaattaacagtgtcttaaaataagactgttcacaacagagtcaaaaaatttcattacttactctatttcctttagtctatttaagtaatactaatgatgctgttttctattttaatttaagctgaatgatgatatctctttcacaacaaaagtaaacaagaacaaaaaaagttgtaatttgggacccaaaccaaactttaatctactttttctctttgccacaaacatagaaaacaaattcttggttttggttccataaaatgcaaaacgtttctttcaatttcttgataaggccatttgaatcagaagcatacctggcactagtaggaaaggcacaacctgtataacctgtaaaaaacaaacacagaaaatgttaagccattggttattgtccacaaatttgaaaactagaaatatagtctttattatgcatttggcgtatccattttgtctcagaatcttgaataccaaagtcattcactagtgacaaaaataaaaaccttcaactttctgtaactatcaataattagacaccacatgaatcctaacaagcactccaaaaagagcaagtttctttagcattggcctaatgtaatatcaaagagcagaacaaatgagaatagtttagagagactaactgggatcggagttagtgggagtggcagttccatcgaaattacaagagccaggagattgacccttcttttggaagaagctattgactgcatagttgcaatgagacctaacattgtcagggttgaagcaagattgttttggtttagtaggattacaatctgctccatttccacaagcatagtctagggttgcctgtagcactgtatcactcagccctgtcttacacacacaccatgaggcacctacaaagaccacaagaaagccaaaattagaaaatagatagctgcatcttccttgttctataatgtgagaagccaacaagatttgggtaaatcttggaatcacctttaaaaggcaagatttacaaatattagggtaaaaaaagtaagtaggaagttgagagacaacaagcaaatcagaagaagaaaaaaatcagtaaagttttctagaaatttgtgaactatgccaagaaaaaacactttaagaacagaaaacaattttttattttttcattcttcaaaggaacagaacctttttcagacaagagctaactaagagtgaaagagataagaagactaagctaagaaatctgaagaagagtgaaagttcttactagaatgtccagccaaggatagaaggagaagtgaaagcaccagagcagccatagatgcgttcagacaaaatgtcactgttgtctttctagaaacagagagagaaaagaatggagatagagagatctctagagcaagaagaagaagaagaagaagaagaagagaaagtggagagacacagagagagatagagagcaagtagagagaaagaggggtggtgagatgagagagtggctacttgttctgtgtcttcttgtctcttctcaaaacccttttgaatgcttttttacatcattaaagaacttagctcgtgtagactttttttgtacgtatatttttagatttaaattaaagacacatcgtattattggtacttcaaaataatttaaaatgacttattgtaaaaggcaatttttttattttttgtgttgcaggatgagatgtgaaaaagctgattcagaaaatcttgttcatgcttgggtcagatttgaataatttgttttgcaaaaaaaagaaataacaataatttgtttactgtgtattggccattctaaattttataaaatcgacataattacagtaaaaaaaaaagtataatattttgtgtattttatttttaattgtcttgttattaattcaaaaaaattctctaccaataataataaaaaaagaataatttagtc

SEQ ID NO: 784 - DNA, 3000 bp, Unknown
  misc_feature (1)..( 3000): cDNA_ID_3058909_gDNA_ID_1620320_Annot_ID_153293 3000 nt of promoter + ATG
actttctcaatctgaattgtgtaattcatagattggaaagattctgctgattttatcctatataggtgtttcctagcttggttaactgtttctttatcctatataggtgtttcctagcttggttaactgtttcgttatcctatataggtgtttcataaattgttaacaatgttggtctttccttttttgcagatgtgtggttcttggtggtagtaaagctgaagataagcatctcaaattggttcacacaaagaaacatgttaatttagtgaagagtattagcacaaaaaagaaagattctcggagaaacaagattgcttcacagttggattcgatttatctgaatggaggttcatctgaagctgcatatcttgcagctggatctgttgtaaaggtaatattagattcatacaaattgtctctctcacacaggaggatagcaaactgttagaatgatttgtttgacgattagtaacaaaacaaattagcaacttggtaggtggcagagaaagttgcagaaggagagttagattgtggctttgctattgtcaggcccccaggacaccatgccgagtcagatgaagccatgggtttttgtttattcaacaatgttgccgttgctgctagttttttactaaacgaaagagtaatgacttcttttgacttttgtgatgcttttagtatctcttacttgctctcaaatttctttggtcacattcctttggtgcgtacgtttgttctcatgttatgcggcattaatcgaatgcagcctgatctagatgtcaagaaaattctgattgtcgattgggatatccatcacggaaatggtacacagaagatgttctggaaagattctcgcgtactaatattctctgttcataggtatgtatttgcaacctctgtctattcttctttccaaactactttttcacatgatctttgttgaggtttaaagtgactggaaatgcatttgtgactaggcatgatcacggaagtttctatccatttggcgatgatggagactttaacatggttggcgaaggtccaggtgaagggtttaacattaacgttccatgggagcaaggaggatgtggagatgcagactatcttgccgtatggaaccacatcttgatccctgtgaccaaggaattcaaaccagatattattttgctttcagctggatttgatgcaggtttgtatggtctaaccatttgtttcaaggctttgtgacggtaagctgtgtgtaatcttttcaacttcttcttaacagctattggtgatccgcttgggggttgttgtgttaccccatatggatattcagttatgttgaagaaggttggtgttgaagtgaactgcctcttttctccattgtttctattatgcgtaccatggcttctctaccattgaaaataacaaagctacataattttacttggatatgacatcatttaattggtttctctcagctgatggagtttgcacatggaaagatagtgctggcattagagggaggatacaatcttgagtcattgggaaagtcttcactcgcatgtgtccaagttttgcttgaagacaaacaaattcatggttcatctgaaacatacccattagaatctacacggcgtgtcatacaagcggtatggctctatataaccctaacagtctgaaattttgtatgaattggctacgatttctcttttcagctcagttcttgtgtcataaatattgtatatcgcctatgttactaattgacaaagctcatctgtttcttgtgggtttaggtacgcgagagactatgcacatattggccttcacttgacgcgtcaatggcgtctaatgagaatttaaagaacccaagtgcagaaagaaactccgctgacgccctccttcgtgaagtggaagagttaaagtctctaatggctgcccgagatggagaactggaggcaaggagaaaagagttaaaggccaaaaataaggagctagaagcgaacgagaaggagctagaagcgggactaatgttgattcgcgctcgggaggatgtaatctgtggtcttcatgcaaaaatagagagtttgcagcaggagcgagatgaggcggtagcgaaagctgaacgcatagataaggaactccaagaggatagggcaagaagccaggagttcaaagaagacacagagttttgcttgagtacgttaaggagggagaaggagcttgccatcatggccaaaaataaggacctagaagcgaaagagaaggagctagaagcgcggctaatgttggttcacgctcgggaggataaaattcatgccaaaatagagaggttgcagcaggagcgagatgaggccgtagcaaaagctgaacgcatagataaggaactccaagaggataggtcaagaagccgagttgggaatggatcttttgccttttctcaggagttctatgaagacatggacttagacgagctcgaacctctgtctccggagttcaatgaagacatggactcggaagagcttgaaccgtttcaggtcatcaagaaaaacatggagcgttcccacaagaagttcataaaagatatggagtgtatcaagtttatcgccagtgagagagccagggtactttaggttgggagcttgaggccgtagcagaagactaccacaagtttcgcgagatggttgataagctcgggaagagcaacatatacccttcttagaaagtacaatggtgtttcattgtaaccacagaacctttttgtgattgtaaaccaactgtgtcgtgtcagactttgattggttgcgatacttggtttcccaatttccctccaaagaatctccaaattggtcaaactctcaaacctaaaaaaaaaaaaggagagaatgaaaaaaagaaagaattgaaaagtaaaaaatacttggaagctttagaagctgagagcaaagacttgacctttttcacttccttctcactgatcgtcgaacaataaggccgtcgcatctcccagttatg

SEQ ID NO: 785 - DNA, 3000 bp, Unknown
  misc_feature (1)..( 3000): cDNA_ID_2044944_gDNA_ID_1620320_Annot_ID_153294 3000 nt of promoter + ATG
ccaaaacgtgtcccgccgagtcgaactcctgaagcaccaagatctgtcccggcttgtccaattcctgaaataccaagacctgtcccagctcgtccaacccctgaaacaccaagacctgtcacagctcgtccaacccctgaaataccaagacctgtcccagctcgtccaatttctgaagtacaaacacttgtcccgactcgtcctacttctacagcacccagccctgtctcggctcatccaacttctgtagtaccaagccctgtctcggttcatccaacttctgtagcaccaagccctgtctcggcttgtctaacttctgaagcatcaaaacctgtgttggctaatcctgcagcaggtattagaagagaactcgtttgcagtcttcgagctttgagtatgactactacaccagtgagacagagaaccactccaagtctccttaaatctaagaaagttgagcctccaagtccacgtgcgttgcaaattcgttcaagagttaagcaacaagcagcaaatgcaacaaaaattcaacaaggtgttatcttttgtttctcttttctttctgaaagccaaagatcctaaacttgttttgatcggatcgctaaaaaaactattgatttttcttggtttctctaggggcgatagtggaagttggggataaagctaaagatcatggttccaacgagatacgtcgatcagtctctgaggaagaattatcggaattacttcaatatctaccagctcagaatcctacttggaagtgagtttcttaacacttcataatcttttttgagctaaacatgtgttttgttagaagcgtcaatcagatcacgctatatgctaaattgttgccatcactctttcccagttttacaacttagggaatgttgtgtgactacctttttcatgtagctcttagccttatttgcatttttttcaaggaaatctagtggctcttacttgccagaatgtaaaacagtccctaatctctttcacagtttaggcatatgctacattgttgaaactggagatgtgcaaatatagaaacgtgctgggatttcgagagcatgaccataataagattcactgatgccaatattgcacttttctccttttttgattcctttgatcttttgaccttcacaagttatatgatgaaattttccttttaactactgaaccagcggacgcattatggattctgcctcgccgcctgagtttgactgcgagttttggtctaaaccggcatccaatatcaggaggaaggccctcagacgttcaaaggcaatgcctgcgttactcaaggtcgaactgcttcctacatgccacattctaaatgatgtgtctggcagaagcccaactctattgaatgtcgaaatgtaccttttcccagatgagaagaaaacagaaaggtactcaaaacccctttctatgaaggacaagcttcttattcttgttgtatctctgttatcagaaaacttatcatctcagggcatgtacactcattcttttaggtttacaggggaacatgctactctgttcaaggcaatggtaactcgcaaagtcatggccaaagctaatataaacggcactgaattgttaatattctcctcaaaactattggacaagacctcccaatgtatgtatgcattctgaatttctgcagagcttttagtttgtgcatagattttcgatggataacatccgttttgtgttcagcagttctcatcaatacgcagaagaaaacagaaaacttcctttggggtttttttctccagaccaagaactcactaggacttgttccagaaactgcttctcaaattgataatgattttgatgatgggggtgttgttgacatggacttagacaatgaatgcctgaccccgcgtgtggctctgaagcttattacagaatcacaaaaaactccctcaagatcaccggagaaggtgaagggagaagcaagtgtacctcctggtttcgagaagatatggacaccacccttggtgaaacttaatatacaaggaacatcaaaccctctgtctgatctaaccagatcggctggaatagtgcgtgaccaatcagggaagtgggtgtttgggtacatcaggtgccataagagcatccctgaagtcgtagctgggcttttggctatataccaaggcctcaaatatctctgggacagcggtttccgaagaatccacttggagacaacaagctttgagatcatcaatgctctaacaacaaaatcgtccctgttttgtaaaagtaaaacgcttctaggagcgtgcaaggacatgatattgaaggagtgggagtgtgacatttaccatatctccaaagaacagaactcatgtgcagaatggttagcaaagagatcagaagaacagcctcaagaattagttttctttgaataccctcctcgaggccttatggattttctggagaaagaccgccttgcagctatgtagagcttcttcaggtttgaggtacagtcccagtgagcagcttagaggtacatatctcgattaagtagtctgaccttttgaaaatactagtagaagaagagatgtttggagtgttaatgtgacatccttgcgtagtcgtaagtacagtggagtctcattgtagccacagttcaagaacacagacgtttttgtgaagtgaagaatcgaaataactgtagattttccctccagattcagtgttgctcctcttcatctttcgtttaggcacagtcttaacaattcacaaaaaaaaaaaaaaaaaaaattactattaaacgataaattcgccgtttgcagaaaattcggttcaccaattttaaattggtttatgaggttcaaccggtcattggttctaaatgagtttgaggtgtccgcctttgattggttgagatgctaggtttttcattttccctccaaagaagctctttaatggtccaacaaatatatatttaatcgtaaataagataaagaaaaatatattttgaaaagaaaaatg

SEQ ID NO: 786 - DNA, 3000 bp, Unknown
  misc_feature (1)..( 3000): cDNA_ID_2044940_gDNA_ID_1620320_Annot_ID_153295 3000 nt of promoter + ATG
acaggcacatgcaagtccagtaggtaatgaaaaacattctcttttagcttaagtatcactcagtttctcttccctgctattgatataacatcaagaaactgatgtattattttactttgtttatggatattatgtagctgtgccaatggatacatcttcaagcgataatcagcagccaccctctgattcggaatctgcaatctaaaactgctttttatcagagaggttttggtgtaagctttagcttaaccattgacagagagatatggattttttttttgggttgttttttctttcttgggtcaaaagtcattttggttggacttctctttgatcctgatttgactcatcactctttgtgcattatcttctctcattgtttgagtcatttgctactttgaaccttttttgttgttaccaaaaattggatatatgctttggagacagtttatggatatggatgctatttccaagctgtaattaggggagtgctctgtttttttttttaccgtgtgacagtttttgaaataaattttctcaattttgtgccatgtgaatctcatttttttattagatactaatagtgtgtttgttttgaaaaaaaaaaaaagattctcaatgtttaagaaaacaatacatggttaacaaaatgccacgttggatattccatagatctcggcgataaacaaattttgctaaagcttctttttataaataaacgtgaagttaattcccaatatttaaataagagaatttgaaaaattcgatttcgtatattaaaaagaaaaatcaatattcaagaatcaagattggggattggggagtgttaataaaaattcgtcttggctcttcaagaacacaagaccaaaaaaaaaactgattcttcgatttcaagaaaaaagatcgaaaatttggttacagtcgatgccattgaagaaccttttgattgataacaatggtctacgaaagtgggaacaagcctggaccagaaaatccgacatttagttcagatttaagcctttcagattctcttgtaaaactggtaaatcacatcttcgcttgcagtttattgatatgggttttcgatttcatgagtaaaaattgcatctttacttgatttttcttgaatcttgactctttgtaatcagaaattaatgtgtgttcttttagggtttcttgatttttgagtttttctttatttttttttaaatgttcttttaggctttttttaatggtcttgtgattagcaagatgcgaatttctttttatactgatctttaatatgcttcgatgtgtatatatagaagaagaagccttgtgaagtatgcggaagtgatgccaatgagcttttgatgatgacttgcttcatgtgcagagatactagggagcatacgtaagaaattaagcaacactactcaattagttttctttaattactgttttaacactcaatgatctttaatcctcctttagttttcttgtgtgtgtgtgtcagttattgcgcgagggtgatgtttcaacgtgtgcctcgtttgtggatttgtgaagagtgccgtgatttctcatctgtcgccaacaaaactgctaatgctcaatcatcaagaactattcaagtggaacaagttgtggttaaacaagttcgtattgatcaaactgttccatcaccaagaactaatcaagttgtggataaccaccaagatcctcctattgatcaaactgatccatcatcgacaactattcaagttgtggataatgaaaatttgattgaagctgctccatcatcaagaagtaatcaagttgttgataacaaagattggattgaagctgctccatcattaagatctaatcaagttgtgcctgttgctcctcgtattcatgagtttactacagacgaatcatcctctccggtgtctccatgttcgctagatgatgaaaccaatctctttcacttcaagtatccttcactttctctccctccgttgatgaaaaattgaagaaaatctctttttgactcatcaatgtttcagtgttcaagtccatgtgggaaagatttccagtcaaacgaccatcacattacattgatctgtcctctgattccgaatctgaagagtaaatgcctcatttgagagagattcgtgtcagggtttagggtttttaaaaagacatttgctttaactttttcttgtgtcacaagtcattttgctagctaagtgagattagactagtttgatcatcatttggagtcatatactatatgacttatgtacataactaaattattaaagctatgagtaaaaaaggtatcataacctttttctttttttttccataaagtttaaagtttttgtttatggctcttcccaaaatcgtacgaatctgtttttttttgtgaagacgaatctgtttttttttgtgaagacccatttatgaaaaataggccatgaacacgaagtttcctagaaagatgatagaggtgctatgatgacaatatatggactcattattcgatgttaccaattatagcaaaccttcttctagctagctttttctgtatttgacattgacccgtaatgaaaacttcatttattttctcgttttgttaatagccctgcatttcaaattcgacatgtttatgtaataaatttcacttacccaagttgcataaattttcaaacattttatgaagttttaaacgctataaaacatgttgaaaatcaagagtgacaccaaagaatcaagattagtatagaaatggtcacaactcacaaatgccatgaatgaatcatgatcattgatcaaccattaaccatattatggttgaattttccaataactaaaacattaccataaaagctctaaaacattaccataaaagctcaaatgtctgaataattatcttctcactagcacatgggctttcttgcaaacttaagaaacgttggcaccttttttaataacgatagactataaggggtcttttgaaattaagtaaaagatatg

SEQ ID NO: 787 - DNA, 3000 bp, Unknown
  misc_feature (1)..( 3000): cDNA_ID_2044958_gDNA_ID_1620320_Annot_ID_153291 3000 nt of promoter + ATG
atcattctttttcttttgctgctcataaaccgagttaaacagctttcattttttttttcctgaggtttctcaataactttgtgtttgcagttgcacgctttccgctgttgagaaattcaaatccggtgagatccctataagacctcctgcaaaagcttatgccaacactttaataaggggacttgtggaaggaggaagattatctaaagaagaagctgaggcttacatagacaaggctgtgtctaaacctctctagtgtataattatttactcagaaaccgcccgtttgaacacgatttggagcttcgggtttctgagttattcaattaggataaaaaccacaagtttaggaatattgtgagacctttgaatttgtcttttgaaagagaggactgtgtcctctgttagctgtgttgtgcttgctccctaagcaaactctcaatgtattttagttatcttcgggttttaggctttaccaagaagctgtattcggtaaatgtattaaagaaccctccaaactgctttatattgaccggagagaaacattcttattcttcggaatggtactttgaagtttgaagagttattttaaaaaaagatttaacagcactgtgaagagttctggtcaaacaaacctatttaaaaaaaagagattggaaaacatgtataaataaaaattgaaacgtaaaaatactttgaagcttcagaagcaaagattggaccatttctcttttttctccctgctcgtcgaacgatagactctctcatctcccgcatatggccatggccgacaaaaaatatggaaactgtgacggtaaagtcgccgggaaaagccagcaaggtacactagttgaaaaggagcaagtagataccgcttctacatcctggagaattgatctcgcaaaggttgacgtttggtatgcctcttacggatccaacatgtggaaaccgaggtttatttgctatattcaagggggacaagtaagtagccttgtttcgtttctttttggagtctgagcttgtgtcttaattgacacatctatggctgtttgtgtttattttcaggccgagggaatgataaaagcatgtgtcggttcaatggacaaaagtccaccaaaggaaataatgtggaaaacatttccacatcgattgttatttggccgtgaaacttcaatgttttggggtgtaggaggagttgcttacaccaatccccttactaatctcaatgatcaaactcacatgtgtttgtacagaatcacgttaagtttcttcatctccgtttccgagttttctcttttcatatatctgatcttttctacttattcattatatggttgttgttttcgtgatcaggcttgagcaattcaacgaccttctgtttcaagaaaatgagttgaacgtagattctgattatccgttctttgatctagctgctctgcggttagcagagaaggaaggatccatttcacttcaaactgcttcggttagtcagataacagatggttatttaataggaacatgtagtagtaatcacacttgacccctatattgacatatttttacaggatagtttgtatgggaatgttgtctgcttggggaaagaaggcgtcattcctatacttacattgacgtaagatttcatcattcgttattcctttgctagctcagaaacagagtacttaaactgctaagcggatgctctctttcaactttcatttttttctcaataactttgtgttttgcagttgcacgctttctgttgttgagaaattcaaatcgggtgagatccctataagacctcctgcaaaagcctatgccaacactttaataaggggacttgtgaaagggggaagattctctatagaagaagctgaggcttacatagacaatgctgcgtctaaacctctctagtgtattcaattaggattaaaaagaaaaataaatcacaggttaagaaatattgtgagacttttgattgtgtcttttgaaagagaggatgtgttgtgtgctttgaggttgctctactctctctgtatgtaatttagttatattttaagatattataatgaacattattacagttcacaaaatttggcataagaacgaaaatagaaatggaagaaaaattatgcaaacatttaaacatatttgagaatatttttcttgttcttataactattttgtaactaacttttaagttctgttattgtgtagtactcttgtaaaatatgtaaaacttaagagagggaaattaatttcttagtaaaattgggcaaactgatattaattgtttgtcaatttcattatacaatttttttttattttttttcagcaaccgtttgattaattatttaatgatcagatattttgggaatttaataatataagcttacagtattctcactaagttgccgtatcgtcgtcttttttgtcagctaagaagataataaaaattaaaacacagagccgttcgtttggctgattcgattgtaccaacttccgacaaagattccaccttttccgattgttcgatttcttagaccttgagcttctccattggttcatcgatcatttcttcaagcaaaagtctctcttttttctttgcaaatttcgcccaaaggaaaagggtacacgttgttacagctcctcaccttatctctgacggaaaaatcgaagctttctctgggttttgctcagtagtaattcgatttccgtatagttttggtacaaagtggaagggttttgggcattgctctgtggcctgattcctgcgtttttaggtctctccttgaggttgaattcgtttgggaattttcagataacatttctgcctgaaagtgcctgttaactctggttcgatagagtggggattgtttaaagccctgagctttcaacttctttcattggattggtgtttgaattggaatgaagaaggagagattgtactgttgtatttttgggttgctctcttgattcctcaaggcaagagaggacgaaatg

SEQ ID NO: 788 - DNA, 3000 bp, Unknown
  misc_feature (1)..( 3000): cDNA_ID_3058962_gDNA_ID_1620321_Annot_ID_153323 3000 nt of promoter + ATG
aaatactgtctctacgagggtgagaacaatctccagacacaaagacattcctttgcccatccacttctagccagctacatcccgctggctttttcatttcctttttcttcattaggtttctcaactccatcacgccttcccatttagcatctgcagcatacatattcgatattagaacgtggtttccggtgtcgtcagattcagcttgcaagagatgatttgcaactgagtgccccagatccatcctattataggttgtacacgcccttaacagtgttccccatatatttgcattaggttcaactggcatctgtgtgacaaaagaatatgcatcatcaagtcgaccccctcgagcaattagatctacagcacaagcatattgttccattgtaggtttcataccgtgaactgtccttattgagtcatatatttgcaatccatcctgtattaaccctgcatgacagcatgcagtcaacatagtagttatgaaaacatgatcgggctttatgtttgattcagtcatatgagagtagatcataagtgcttccttgcccctaccatgtacagcatacccagctaccatagcagtgaacataaccagatctctacgagcatctgactggaagacagaatatgcatgcttcaagctgccacatttagcatatacatctagtagagtccccttcaggcggatatcaccaagtccgcctctaataatatatccatgacattgtcttactagatgcagagaggctagctgcgcacaaacaggaaggagattcatgatagtcacagtgttaggcctcattcctcgagcttgaatctcacggaaaacaccaatggcttcattagggcaacaactttcagcatagatacgaaccatcaaactccaagtggtgagatcagtagtagacatctcagtgaagagcatctgagcatcatcatgacttccactattaacatatcctgataacaatgagttataggaaaccaaagttctcctctctgataaacccagaaaaatcttatgagcgtattcaacattaccacatttggcatatgcatcaagcaatgcattgccaagcttgggttcctcttcatcgtgtaaaagaccagccttaactgagtacccatgaacttcttttactttaccaattccctgtacatttatgcaaaactttagtaggcttaaaatagtaacagagtcaagagtgattgcttcattaagtaagtggtgcaagagattcaaaaattgaaactgctttggactgtctgcaaaggcatcaagtatagcattccaagatattatatccttcgtggacatcagtgaaaaggcccaatatgctgcacttgtgtcaccaaatcttgcatagaaactaatgagagcattcccaactgatgtatcctccaaaaggtaagaatggcgcaatatataactgtggatctctttcccagaggccaagtcagttaattgcgcacagacaggaaggatactgataatagttaccgaatcaggagaaacatcccccttatgcaccaagttgtgaaataactgaaatgctttaaaccactcacaatttgatgcataaccagctatgacaacattccatgaaactagatctttagaacccatcctggtaaacaatgaggctgcttcttctatccttccgactctcaaatagaaactaacaagtgaattacatacaaaaacatgggtttgcagccaagacctctgcacaacataactgtgaatctgtctaccacttcgacatgcaatgttcttgtccatagaagcgcaaacaggcaaaacatttgcaattgttgcataatttggctctgtaggttccttcagcattagacaaaacgatctaaatgcatcagccatcatattattctcagaaaacccagcaataatcgcattccaagagacaacatctttatcagctataccatcaaatgcagtataagcatcgggaaaaataaaaccaaatttggcatacatggaaaccaaagcattccccacaagtgtatctttctccaaaccggctttaataatataagaatgcatactcttcccattgtatgaatccccaaggcgaacacacaaaggaagaacaatcgcaaaggtaacagagctcggcttaggttcatctgcaaagtgcattgctttgaaaaacctcatcgtttcacgaccgcaagaaacagaaagtccagtcagaacaatattccaaacaacaggatcaagactgtccatttgcctaaacatcttctggcaatcatccattctcctgcatttcgcatacatgttaagaactgacttcgaaacctcagagcaggctatatgaccaagcttgaacacgcaaccgtgcagagccctccctgatgtgagatcagacactgaagcacaagctttgacaacatccagaaaaaccctgtgatcagttccaaaaccagacaaaagtctgaaattctgaacaaattgccgtaaagggcccatctttcccctgaatatcccaacaacggccctttattagcaaaaaatctacgttacattgggtcagacattttcacaaacacctgatatgcaagaacagtttctctagatataagcgttgtcgagatgtaacagacatagagaaactgaaaaagcaatatctttatcaagctcctcaatttatcaagcaatgaaggtgtctctcagtctccatctcctccacatacaagcgacagtttttgtcttgagtgaattgaaaattatgaatatatatggactattccgatttaattaaaactgaagggctaaaaaagaatatattaatttacttaggtccttacatgaaaatttactatttctattcttattcgaataattagaagaaaaaaaacaaattccataaatatatatatctttcgtcgactctgcttttacacatctctcacacggtaaagttacaataatctcagcttgaatcacactgacgaaggcatcttcctgcgatt

SEQ ID NO: 789 - DNA, 233 bp, Unknown
  misc_feature (1)..( 233): cDNA_ID_2126513_gDNA_ID_1620321_Annot_ID_153340 3000 nt of promoter + ATG
cttgttcagtttcattaaatttgtggtctaatttcggtttaattcacacaaaacaaattcgttattttaagaaaacagatttggatcgaatcgggtcgggtgggttagaatccgatggacaggcccaattggatacagtggcccagttacatagtctgtggctcaggatactttgaatttctctcaaaacagtagagagaggtgtagagagcttagacagtgccatggccatg

SEQ ID NO: 790 - DNA, 3000 bp, Unknown
  misc_feature (1)..( 3000): cDNA_ID_2126506_gDNA_ID_1620321_Annot_ID_153337 3000 nt of promoter + ATG
tccttgaaagcaaacggtttaaactttggaggattatcatctccggttagttccggtaaaggtccaacaatcttttcacggggaggctccaagaaaaccggccacgacatcctcgtcttctctttatccaccgtcgtcctatgcaacacatttttatacctcccattactcaacctctgcaaaattcacaaaaccaatccattaaaaacattttataaattaatctacatttttatacaagaatcataataaagttcagaccagaatctgatcgccgatgtgaacaatgacggcggagggaatatactctgcatcgaaccagtgatcatctttgaaaacttgaagtccaggaacttcgttaggaacaagaagagtgattccactgagatctgtatgagccggtacacctaaagctaaatccggccgaggacacggcggataatagttaatcttcatcatatactccgccatctctccgccgagaccttctttcaacgcatcacgctttaaccctaatccatccgagagaatccctaataacgtctccgatagcttcttcacatgcactgcatactcttcattcacctccctaatacattaaaccaacggttaacttcggtttacaaaatttgaatttttgatgattctgttttggtttacctgtattcaggtggattcttaggccagaatctgtaattgacgcatgacggtggccagattcgatggaagagatgatcgacccaagcttttttaccttctggatctttctgaagctttgttccgtatccttcaatgtctttcgaatcttccggtttagcgacggattctttctccgacgaaggaagctcgaagaattttcttccgacgtcttgtaaacgtcgtatcagctccgtcggaatcccgtggttaaccacttggaatagcccccattcttcactcgctttcaccaccgcgcgcctcacgctttcttcgtcgggatcgcttagatcgacgacgggaatcgccggcgttggacctcggaatgttgtgatcgctggttgttctttctctgatctgatgaactccaacgggattgcttctgttagtagagaagaagatgaaatgtcttggactctttcgacctccattattttttttggtagtttgcgttgccggaaacaatggcggatatgtaatttgggggatggtgttacgagtggttttaaggagggaggaagtgaggacgtggcgaaatcttggccgctggatagagacaactaccacataaagtacgtgttgatatgtgtaagtcgtcgaggcttcgtcactcacgagtttggtaccaagttttgatagatttatggatgaagaatttaattaatttgatttgttgttttgtggtggtagttttaagaaaaggaaaaaagtgatgttattatattttaggccataaaataccatatttgaaatagatattttagtacatatttttggcgggtgttcatgtaaacacaaataaatatcatcttgagtcgttgacaaaaacaaaaacaaaaacaacaaactttggttggccattctaattactgtaaagattttcttctgcatttcgattggtccatgaattttacacaggaaacattatttaatgacttggtttctagagtgggttatttgaagttttctttttttggtcaaacatcatttggaatttaatcaaataataatggtggagagttaaggctttaccattttaaatcgtaagcaatgaataaaatactggtttcaaatccaaccccatttaaagctaaagattcaaggcccatataacaagacaaggcccagttattgggctactatagaaaaaggaaaaactacagtatagggctctaaaacagcaacacctgtataaacaaaaaaaggaaaccgagtgctacttaagatataaaataacaaaaaaaaggtgagaggctaattcgcatattaagttttttttcccgtctttcccataaggaaggacgacgaccaaaaagagctgagagcgagagagagagagagagagcgaagagaaaaacgaagagagacggtgagatctcaacacttgtattctttccttgagagaccacctctctctctcgacgacgcgcattcccaatttcatacattctccgtaagatttttgattgagtctctctaatttcgttgtttataattctctccaatcgttttctttgttgtggcgggaacatcgatcctcttttcttctgcgattttgctttcttcgttgtgatttcgttgcattagcttcgaattttcgttccgttttgtttgttattgatgattgtgttcgtctcttctttgttacatgtgttgttatgcttttttgactgctttttgtgtgttttacttgtccgtttcgccttctggattctccgaaagtggcgcatgatagtgctttctttttctcgatctctcttgggtatgtgttttgattcctcggtttcgttttggttcctttgctctcaagtgtcaattttgtcccatggtttcagatcttttctaatttcgattgggattgcgatttttctagggtttagtgctatctcggtttcttctgcattgcttttcttaacatttttcattggcttttcttttttgcacatgatctcacaagtaccacttgcttttccataggctctgtcgaattcagtagaaattagaatcagctctaggcttgcatgcaatcatttgcattctgtgccacaaatttgtacgtttgctaagttttacttgaccgttgtgtcaccttaaacgccttatgggttgattttctgttctccatggtttacattttccgctttggaacaactgtgacgtcttgcttttgtatacaattcccttcttgcttggatgacctggttctacatttactaggatttcacattagtgaatatgagaatcacttatatagaccattcatttttgtctacactgcaggttggttttgccatttgaaggatg

SEQ ID NO: 791 - DNA, 3000 bp, Unknown
  misc_feature (1)..( 3000): cDNA_ID_2126482_gDNA_ID_1620321_Annot_ID_153330 3000 nt of promoter + ATG
ttcaagctttatatcacataccacttcgactccaggtaaagaaagtgtgaattcaaggtctaaggttttggaggaactgcaaaccttgcttcctgcttctgttataatcccagaaaagaggttggagtgtttagttgagaattcacttcatattcagcgggattcttgtgttttccataatactttggatagtgatttgtctttgtattctgatcatcaatgcgggaagcaccaaattccttctcagactgctcaggttagactaaacactctgctgtgaatgttacttccgtttccttcttgttgttgtatcgtttcttggtgatctgattcatgagtttgtcggtactataagagatttacatatctttagctgagatgtttacagtacaatgttctgcaaacgtttccacttccttgacaggtcattgagaaagatatagaagatgataattgtctcaatctgatgcctattttctttttcggttattccttttccatcattggctatgtagtacattcttttctttttgctgtcacctgtacccatgttcctctgattaactaattacttgtgtggcatctttttctggttgtagtttagtcagacttgcagtgcatgtgtgcttactgacttaaatcacattcgttaagttctctctacgtgaatggttcagatcttggagtcacataccgatgaagtttggttcttgcaattttcacataatggcaaatatttggcttcatcttccaaggatcaaaccgcaattatatgggaggtaattctgactgaccaattaaggcttgcctgaattgagttttggtaacctgttcaagttttgatttgttacctattccaattgaggcaacctgtttgctgattcacttagaatgtacttttcagatcagcgcagatgggcacatttcattgaagcatacacttgttggccaccacaaacccgtgattgccatcttatggagtcctgatgatcgtcaagttcttacatgtggagcagaagaggttatcagacgctgggatgttgattcaggagactgtgttcacatgtatgaaaaaggcggtatcagtcccatttcttgcggatggtatcctgatgggcaggggataatcgccgggatgacagaccgaagcatctgcatgtgggatttagatggtagagagaaggaatgctggaaaggtcagaggactcaaaaggtatcagatatagcaatgacggatgatggaaagtggctcgtaagtgtatgcaaagattccgtgatatcactatttgatagagaagctacagttgagagattaatagaagaggaagacatgattacctcgttctcgctttcgaatgacaacaaatatatcctggtaaacctcctcaaccaggaaatccgtctctggaatattgaaggtgaccccaagattgtgtcgagatacaaaggccacaagcgttcacgattcatcatcagatcatgctttggtgggtataaacaagctttcatcgctagcggaagcgaggactctcaggtaaaatccactcttttattcgcatagtatcatcacaatagcacatgaaaggaaatagctaaatcaaatggtgataatccagtctgttctctgaattattctgtgaattgggtagtggctgcttcattctacattttatcaatttagacagaacatgataattaataaatgatgaaattcgggtctctggtctcagaatctttgcagaacaaggaatttgtttgtttctttcttcgtttaatctatgcagttttaggatttacagtctagacaaaatgtaatcagtttagacagagcataaaccaaatatccactctgtttttcagtatcgaagaaaagttgctttgttatttagttgatccctctgcggcttttggtgacattggtccacaattctgttatgtgcaggtatatatatggcacagatctacagggaagttaatagttgagctaccaggccatgcaggagcagttaactgcgtgagctggagcccgacgaatctacacatgttggcttcagcaagcgatgatggaacaataaggatatggggacttgaccggattaaccaacaaaaccagaagaagaagctagtgcaaggaagtagcagtaatggtgtgattcaccgatgcaatgggaattgattatgataaaaaaaaaaggaatgaccttcttaaaactatttaacagttatgttgtttcttctttcttcatcagcctctttttgtttgcttcctttggtatggaaagcaaacgaaagaaggtaaaagctgtttttttttttcaaattctgaacccataagtggaaggaacaaaaaggaaaaagaaaatgcaatttgcaacataattcttctattgatgttacattgtacataaagtttgaatggtagcatttgcaattgcacttacctttgtttatctcagacttgtattgctcactggtcctactcactagttctaatattggcgttttaaccttcaattcaatgttcatgtctaaattcgttgatttgttatagttggcctacttaactgattgcatgtctacttaaatttgaagtgtccttttttccatcaataacctgcattatgcagatttcgatttagttgtttgtttgtgctttatggtagcaagttgcatttgaaacaatggtttcgatcggtaacacacattaatgcgattattcaagtaatttaccgatcagtaaaaatatttcctcaaacgaatttgaagttgaacaagaaaaaaaattcctattttatttaaaattaaaaaagaaaacaattgtgaaatttatatatttttccttcttaaatttgtccctttttttctttctatgacatacaagaggatcataaaagcaaagcaaaggattagttcaattgcaattctctaattcaaagtttggatccctaactgtaaaatccctaattcgagagagagagagagagagagagagagagaatg

SEQ ID NO: 792 - DNA, 3000 bp, Unknown
  misc_feature (1)..( 3000): cDNA_ID_3058947_gDNA_ID_1620321_Annot_ID_153334 3000 nt of promoter + ATG
tttctttttaccagaagcaagtcaccaactcaccaaggagtgttcttgaagaagaaataaagtaagagaaacagagagcatttttctttttaagctttgtcagactcttgacaagactgtgcctctttgacatgcttctcgtattcgtcttcatcatcttcttcctcttccacttcagcttcaacgtcctcttcctcttcttcatcagctcctgagcccgagcttttgacagcactagttgatggagctggattccttgcttctccaactatcttcattatgtcctctacgctttgaagagagaagcttgtgtctctcttgtaatacgccgcttgagccgactctagcagctcctttggcaaattcttcaagtaccacggatgattcttgatctccttaagtgtgattctctggcaagagtgttaccggcaacaatcagaactgcaagatatcttcctcacaagatatagctagaaatttgaaaccggaattgttaagttaccttagcagagttagtgacgaatatgcgagagagaagatgtttgcattcctgagatatgtgaacatagtccgggatcttgtattgtacagccattatgcgctgcagaataccatttgaattgtgatatcattgagacacttgataaataagatgagaagtaaatcagaattgttgaatggtggagttacctggattgttttcctgaagttttttggatcattagggtcctcaaacgggtaagctcccaccagcatcacataaagggttactccacatgaccacacatccgcgtgctacaaaaacgcagtcatatatatgagagccaaaaccagtgtatgtgctcttatgacaatcatggaaaaaatatcgattagcaccccgtcaaattttttaattaagaccccacttaaatcttattagaagtacaataacctgaaaagtttcacacagaccatgccactaaaaaagatatactagaaggactctatagcctggatctttgagcagtctataactttctatcctcatattttcccttgatgacattatttgcttactttgacaaccaatcaagcgttaatgacaaactgatatgtatgtataacaagacaaaaatactgtaccttgccatcatattctctccgtgaaagaacttcaggtgctatgtaagctggagttccaacagttgatttaggcctagaatgtagtatagatgactacaccatagaaatcaaattgaaaacatgacaaagatataagaatcaagagaggagtgaatagataatacttttgattaaagaacatgctaatctgttttggattgaagattgagaaaaactgagcaaagaaaagaaaagggaaatggataagtgcagaccttagagtaaccaaaatcacagattttcaaaagcggagcagggctcccatcgagcagtgtgttctcaagcttcaggtctctatgacatatttgctgcacagaagcaaaagagaggggaaggttacacaaggacagaggcattaaattccaaatctcaaacaaagactctgggaacaaaaacatcaatagtactccacgaatgcctcattaggcagcacataactttccttttcagcttaatgtatattctaagaactactatatacataccaaggaatggcagtaatcaacaccacaaatcagctgttgaaagaagtacctagcctgaaatgaataagatcaaaagcaaaaacttatacacacacataaataagatcacagaaaatgttgaagaaaatatatggatcaaagtgtatgactttacaaagagaaagcaacctcagcttcactaaatctaccggcagtacagattcgatcaaagagctctcctccagaagcatactccatcacaatagcaagatgagtaggtgtcaggatcacctagaaccgaatcaaaatcagatcccaagacagctcttagataaactataaagagccacacaaaaaagagacttgcctccttgaaccggatgatattaggatgtttaagtgatctgtgattaataatctctctcgccacgttctcatctatctgcaatccatgatcaatatataccaaacaatccaaaactaaattatcatcatcattttgatctgttgttatcaaaaccccaaatttctcaaattttcctacaaatgtatagcaaggagacttcaaataatgaatttgaacatacacactgagctaaaagtaaaaactttaaaccccaattcaaaacagaaagaacccaaaaatagtaagaacaaaaaggaaaaaaacaaaccttgcgacctctctcgatgtatttcatggcaacaagctctttggtgtccttgtgcctgagaaggcgagccacaccgaaatttccagctcccagatccttgacaacgtcatacttgtccatatttccaaatcaataccgtaaatggatagagttcgagtatatccgtagtttatctatctaatctacctataaaacgatttggatggggatctgagaaagagaagcgagttccattgataagaaatcgtgagatccaatacacacgcatgtgtgtataatatcgatgtaggaaggagtaaacgaagaagatggtggactggaccacgtggagtgtaatctgctagatttttcaattattaagctttgattgaaagtgaatccaacggttgtttcaattcttctcgaaatgacaaaattagcagaaattcgtttaatcatttaaattgcgtttagagaaataaatgtacaatattgatgtgtgttgtgggctctctcttaaatactacaaaccatttgactaatttggtcgtaacagatctagagtcaaaatcttctatagatatatattcgcaagactccatctttccaacagatctaatcttcttcacttcccaagtgtaaaaacctcaactttcagccaacaaaattagggtttcaagctgagattttctacttctgttacacaaaaatacccaatg

SEQ ID NO: 793 - DNA, 3000 bp, Unknown
  misc_feature (1)..( 3000): cDNA_ID_2126494_gDNA_ID_1620321_Annot_ID_153335 3000 nt of promoter + ATG
aagctttgcttataaaagattaagcttcaaaggtgttaaattaaacatacagaaatggagaaagccatctataattgattgaacaagatccaaagaaaagtatgtttcttttagctgttcagaatcataaatactcttctaacttctaaatcaccagatgatctacgtgagagagattcgtgctggactctgcagtgtaagaaaagccgcaagtaagtcaataacgaaggtatagaagattaacaatggtgccagatattctcgagatcacctgttttgtgaggaatgttccttgaggatatattgaactgagcctgatgttgtttattcctctgtgttgtgtattgaagaataacgattagtgttataagttaagttgggacatatttcgacaaactgaataagaatagtttgtggcagatgcttacaaattataaaactagcggaattcatcgtggaaaccataatcatcatcagtgtcatcttcatcgaaaatggcactgtagaagacgtatggatgctcaatcatctctgccaaagtcaaacgtctatctttgtctgaatccgcctggacgattagaaaaagaagagataaatcataaatgtaacatggaacaattcagcagctaaatacaccatttatttggaaagttatgtacctgtgatattatataatcagcttgttgctttgcataataatgctcagtaggatggattttactgataatgggaagcaattcaacgtctgataagtacctgtagataagtggcaattatgttaagggatgtatggtattaatggaaatgctaatcatggtgtgtactcgtatattacgaacccgtcatcatttttgtcaagctgagaaaacaactgctttgctgggccttcaggcaagtcatggtaaggatgcgtagaattgtgattgtcttcttcgtagttccttacagtgtcaaagaggccgtggaaaaactcttcgaaactgatcttcccatctttatctgaatccctttctctgggagagggaaggaggggaatccgttgataaacattaagctaaaagaaaggttcctcggaaataatcatatgacaaccgtacattaccttacttcctccttgcataaccataacagtaactttgggttcttggtgtcagcaggatgcagaaagctaagggaattaaccagcaaaaacattgtgagaaatagaaagaaaaaataactgatagtactaaaaacctgaaatagctcggttgatttctatctacactagaagaaaacgcttactcgttaaactctgttaaattcagaagaccatcaccatttgcatctgatgcattaaaatgctcctccttccaccagcccatatcatagccaaacgaattattatctgttaaatttataaccaagtcagctagcagtcctaagagacaaaagtgagatcatttgcttaaaatcgcaatcaaactgtggtccagaataaggaaaggattattatataggtcataggcagaagagctagaagtgaaacacagattaaagcaaatctacttacaagactgtcatcaaatatttctacatggtcatattaagtagcaaacattttagtcaatgaaactcaaagacgaacaggaaacagcagctcacccgacttacggacccaagacggtggttcatattcagagaaagaaataaaaccatctttgtttctatcatgaacatccaggtctcgttgagttctgtgcacaacttccttggcagaagactgcatagtccactcagtcaattcactctccgtcataaacccatcagcaggagaaacatcaatcttcggaaacaacaatatcagcctgcaaagtaccatagcaatcaaactcattccttacaaaaatgacatctttagtaaatgctaaactaaaatcttcaaagatccaaactttgaaggaaattgaagtacacattgttgcaattagcgctcaaaatcaaagattgggaactgaagatatatataagtataaccaaacctatcagtgacattgaacttctcctcatcatttaagtaatcctcagcatccatgaattcttcccactcaggctgcgactcgtgaccaggtgcatgttcatgtccaccaccggttgtttctttctgagaatgagagacaagctccgggtgagaatgctcaatgtactgtcgctcccactccttatcctcgcggcggcgctccatgtcggcgacaagaggatcaaacggaactggatcgtgacgagtgggtttgaaattgaaagaagaccggagttttaagcggtgatgttgattgtgaccaccatggtggtgatcgtggtcacccttcttcttcggtgaataagagacgaggaagagcaccaggattcctaccgtaatgtataggatcaccgaagctttactcattgggtatttttgtgtaacagaagtagaaaatctcagcttgaaaccctaattttgttggctgaaagttgaggtttttacacttgggaagtgaagaagattagatctgttggaaagatggagtcttgcgaatatatatctatagaagattttgactctagatctgttacgaccaaattagtcaaatggtttgtagtatttaagagagagcccacaacacacatcaatattgtacatttatttctctaaacgcaatttaaatgattaaacgaatttctgctaattttgtcatttcgagaagaattgaaacaaccgttggattcactttcaatcaaagcttaataattgaaaaatctagcagattacactccacgtggtccagtccaccatcttcttcgtttactccttcctacatcgatattatacacacatgcgtgtgtattggatctcacgatttcttatcaatggaactcgcttctctttctcagatccccatccaaatcgttttataggtagattagatagataaactacggatatactcgaactctatccatttacggtattgatttggaaat

SEQ ID NO: 794 - DNA, 3000 bp, Unknown
  misc_feature (1)..( 3000): cDNA_ID_3058943_gDNA_ID_1620321_Annot_ID_153336 3000 nt of promoter + ATG
taataattgaaaaatctagcagattacactccacgtggtccagtccaccatcttcttcgtttactccttcctacatcgatattatacacacatgcgtgtgtattggatctcacgatttcttatcaatggaactcgcttctctttctcagatccccatccaaatcgttttataggtagattagatagataaactacggatatactcgaactctatccatttacggtattgatttggaaatatggacaagtatgacgttgtcaaggatctgggagctggaaatttcggtgtggctcgccttctcaggcacaaggacaccaaagagcttgttgccatgaaatacatcgagagaggtcgcaaggtttgtttttttcctttttgttcttactatttttgggttctttctgttttgaattggggtttaaagtttttacttttagctcagtgtgtatgttcaaattcattatttgaagtctccttgctatacatttgtaggaaaatttgagaaatttggggttttgataacaacagatcaaaatgatgatgataatttagttttggattgtttggtatatattgatcatggattgcagatagatgagaacgtggcgagagagattattaatcacagatcacttaaacatcctaatatcatccggttcaaggaggcaagtctcttttttgtgtggctctttatagtttatctaagagctgtcttgggatctgattttgattcggttctaggtgatcctgacacctactcatcttgctattgtgatggagtatgcttctggaggagagctctttgatcgaatctgtactgccggtagatttagtgaagctgaggttgctttctctttgtaaagtcatacactttgatccatatattttcttcaacattttctgtgatcttatttatgtgtgtgtataagtttttgcttttgatcttattcatttcaggctaggtacttctttcaacagctgatttgtggtgttgattactgccattccttggtatgtatatagtagttcttagaatatacattaagctgaaaaggaaagttatgtgctgcctaatgaggcattcgtggagtactattgatgtttttgttcccagagtctttgtttgagatttggaatttaatgcctctgtccttgtgtaaccttcccctctcttttgcttctgtgcagcaaatatgtcatagagacctgaagcttgagaacacactgctcgatgggagccctgctccgcttttgaaaatctgtgattttggttactctaaggtctgcacttatccatttcccttttcttttctttgctcagtttttctcaatcttcaatccaaaacagattagcatgttctttaatcaaaagtattatctattcactcctctcttgattcttatatctttgtcatgttttcaatttgatttctatggtgtagtcatctatactacattctaggcctaaatcaactgttggaactccagcttacatagcacctgaagttctttcacggagagaatatgatggcaaggtacagtatttttgtcttgttatacatacatatcagtttgtcattaacgcttgattggttgtcaaagtaagcaaataatgtcatcaagggaaaatatgaggatagaaagttatagactgctcaaagatccaggctatagagtccttctagtatatcttttttagtggcatggtctgtgtgaaacttttcaggttattgtacttctaataagatttaagtggggtcttaattaaaaaatttgacggggtgctaatcgatattttttccatgattgtcataagagcacatacactggttttggctctcatatatatgactgcgtttttgtagcacgcggatgtgtggtcatgtggagtaaccctttatgtgatgctggtgggagcttacccgtttgaggaccctaatgatccaaaaaacttcaggaaaacaatccaggtaactccaccattcaacaattctgatttacttctcatcttatttatcaagtgtctcaatgatatcacaattcaaatggtattctgcagcgcataatggctgtacaatacaagatcccggactatgttcacatatctcaggaatgcaaacatcttctctctcgcatattcgtcactaactctgctaaggtaacttaacaattccggtttcaaatttctagctatatcttgtgaggaagatatcttgcagttctgattgttgccggtaacactcttgccagagaatcacacttaaggagatcaagaatcatccgtggtacttgaagaatttgccaaaggagctgctagagtcggctcaagcggcgtattacaagagagacacaagcttctctcttcaaagcgtagaggacataatgaagatagttggagaagcaaggaatccagctccatcaactagtgctgtcaaaagctcgggctcaggagctgatgaagaagaggaagaggacgttgaagctgaagtggaagaggaagaagatgatgaagacgaatacgagaagcatgtcaaagaggcacagtcttgtcaagagtctgacaaagcttaaaaagaaaaatgctctctgtttctcttactttatttcttcttcaagaacactccttggtgagttggtgacttgcttctggtaaaaagaaaaacacatttgtcaaagccaaaggctgtaaactacgtgctggttgtttcacttttagattgatgtcgttgtactgagtaatgagcatgaaacagaaggtttatattattatatgatactatactataggttttcgtctttgtgatgatgatttcagttcacctataaaatccgaataaaccgaatctgaacaagatttataaaccgaaaatctgaaaaaccgaaaagaacgaaccggatactaaccgaaaccgggatttgaacacttaaggttaagggtcgagaaaccctacgaaagtgtatctctctcaatctcgacaggtttcaaaacagagacagtc

SEQ ID NO: 795 - DNA, 3000 bp, Unknown
  misc_feature (1)..( 3000): cDNA_ID_2106908_gDNA_ID_1620321_Annot_ID_153333 3000 nt of promoter + ATG
gaaaaaaaaatgttatcatcagaagtttgtatatgaaaacccggaaagaaaaaagcttctccaaagactggtccgccacgtatgacgtatcgtttgtgattccgttggtagaatcgtaatgcaaaattatccaaacacgacaaagacgatacacacgaatttgcttgaacaataataaacaaggttctttgaagaaaagaaagtaataaactatgcacggcactaggagtagaaatgattgaaaccctttaacaaattgaactcatcttgttgccgaagttatacagataacgtatggaatatgaatgggtttgcgattattagtttattggactttcaggccctttttagagaaaattagtttcctcctcccgaaatagtcctgcattatggaccacattatgggcccatattgaggcccaccttaatggtacttatatactattttgtacggaactgattgatagacattagacacggagacattgttgtcgttcttcgcagacatttcgattttgaagacaaatcacaatgggagaagcgcctgcccagattccgacgagtttcggccacgagcttagggcttgtcttcgatgccgcctcgtcaagacctacgatcaggtctggattctcttgtcacttgtgatttgcgtgtttcttctcttgcgaatattttttgcctaatctggtttctccaacagtttagggattctggatgcgagaactgtcctttcttcaaaatagaagacgatcatgaacgcatcgtcgatgttacaactcccaacttcaatgggtatggcttaaattcgaatccttactttgaaaatttacatggcactgttcataagtctgtctctcgtacttgtcgttacattgaaatttctgaacctagtctatacttatgattaaatcgtatagtctatacttattgagaagacttattgttggtcgctaatctctcgtttttttgttgaatgagtcgttgcaaattgtgaaatcactgtggtggatatgaccataaagtttgctgctttacgttaaaatgagttaatagtaacagagatgatgctagtgttgattatacttgtcatttgttgatgtcacgtccatgtaattatgtattgatataatgaatgtttttgcagtataatctctatgatggatccacgcagaagttgggcagcaagatggttaagaattggtatgtttcagctctgtttcctgatcatcctcattgtcttttagagtttactatactgtgtagcttcttctttccgtttcctgttattcttgtctcaccattatactttataaatggggatattagtgctgaatttaactgtgttgtctgcatccatttgagcggtagctgcattctgatttgctgtgtgtttatggcttgatgacctgatgttgtattccctaatattgccagctttgtttcagacagaagagaaataaatctaacacattgcaatatcttgtttccagggaagtttgctcctggttgctacactcttgctgtctcagaggcactcccagaggaaatgcaggtaaacatatttacttctcttagaaacctaagaagggattaataagcaaatccttagctctgttttcgtattgactgttcgtctttttcacatgtatgtggcggaaatccgctggcagttcatatgccaacaagcacgggtgcagtacgttccacccaaacgtatttgaaaccttttgcaggttgcagcaagtgtctccatattagcatctctgcaagtcgtcagtttcaagacaacttagtccgatggaggttatgaatggaagtagttaagttttatgtactttgtttctgatttcaactaatatagagagatttgatcctcttattgttatcaaaaactcttatttgatccggaagatagagatagattacattttttttttcaagtatggaatggatttcttttcctgtgatattcagtacattatttgaattacaaaatgaagaaactttaaattgagcacctagcagaaatgtgtggtaccaataattcacagaaaaaatgtcaactacgcagttgatagaagaagtggctccttaatcaggccaagagggaaacaaggagagatatttattggtttttggaatatgaccattgaaattcccaaagaaccgaagaaaactatgggaaaatgtataaaatgcctgtctttataccaaaaaaatataagacccacaaattcatggatacaaagtacaaacaaacaaattatacacaagaatcatcttccgatccaaggtatattcttctgctagagtaaatcatggacgtaacatgcataattaacaatggttacttaacaacaagtagtaatgaaaaattgaagacgttcagtctatttgggcaagaggcaaatattaattttcgttactatacgtttattttcttggcaatttagtttaattttgtttaggtcaaaggcaatttattttgttattaaaaagataaattagatttttttagaaaatagcctttctatattaattttaaattcgagttcacgtggcggtcgctaccaaacttcgctaaactttagtgctttactccaaaacccagagtccatcacacaagtccaagcccgaaaacaagggttcttgctccgacacgacaacaaatccagattttgagcttaggtaaactcctaactccccttatactctcttcttattcaatctaccttgtttctatgccttgaatccaattcccagacactctggttgcttgtaatctatgttcggttgagagtgaatctgtgttcgatcgtgtgtattaatacctccttctttggttcggacatggatctctgtctataaataacgggaaatctagactttaagtatacgaatttgagaaatttcgattctttcgcttgttttgttgatgggtgtgagtttttatgcttaaattctttttcgttgcagggaaacttgagaaggagaaaaaa

SEQ ID NO: 796 - DNA, 3000 bp, Unknown
  misc_feature (1)..( 3000): cDNA_ID_3058958_gDNA_ID_1620321_Annot_ID_153326 3000 nt of promoter + ATG
aatctagagaaggctagaagagaagcgtatgcagctggtctcttggggaagaatgcatgtggttctggttatgattttgaagtttatatccactttggtgctggtgcgtacatttgtggtgaagagactgcgcttcttgaaagccttgaagggaagcaaggaaaacctaggttgaagcctccgttccctgctaatgctggtttatatggttgtcccacaactgttaccaatgtggaaacagtggctgtttcgcctaccattttaaggcgtggacctgagtggttttctagtttcggtaggaagaataacgctgggacaaagctcttttgtatatcaggccatgtaaacaagccatgcacggtggaagaggagatgagtatacctctcaaggaactgattgagaggcattgtggaggtgttaggggtggatgggacaatctacttgctatcatccctggtggttcatctgttcctctgatccctaagaacatttgcgaggatgtgctgatggatttcgatgcgctcaaggctgtccaatcagggttaggaactgcagcagtcattgtgatggataaatcaaccgatgttgtggatgcaattgcaaggctctcttacttctacaagcatgaaagctgtgggcagtgcactccttgcagagagggaacaggttggctttggatgatcatggagagaatgaaagttggcaatgcaaagctggaagagattgatatgctgcaggaggtaaccaaacagatcgaaggacacacaatctgtgcattgggtgatgcagctgcatggcctgtgcaaggtctgataagacactttaggccagagctcgagagaaggatcagggaacgcgctgaaagggagttgctacaggctgctgcttaagtaccttgttaaccagaggtttgcatctccagtccttgctcttttaatcttctgttgcaaacttaaaagctgaggtctagagtttacgcagccttttagaatgtatttgtgacaaggtagactgctctgtatctaatttctttgggcatttcaagaacttgagccgtaatgaacagttagtttccgtaactatctttctgctctatccctgtcttacaaaattgatgtttttgcagggagtttgctattattctccatggaaataaaatctgaatgaacaactagtaacggttttgggatgcaaagctacttcagaaggagaagaaggtaatgtaatttgtttgaatggttaatgttaaaactctcttaaagttgtatcagaaagagcgcgatttgctcttttgcattactctactttctttattgtttgcttgttatgtttattcgagtatgaaagcacattttgggaacaaccaaagaaacccttttcatgtttgaaataaagaatgctcctttttgggtttataagtagttcacatagcaaataaattataaatcaatgtttctttttggcattttctgaaaaatatctctaggatataaattggtatatcattgttctgtatacaacttgatatgatagtccaaaattagtttttttggataatgtataaccaaaatgtgattagtcccaacttgatttcgtaaaatcaaacaaagtagaaatcatcttaaaactataaactagaaatttctaaatggaataacttaaagaataaaatgaaatggaagtgatatatatattcgcattgaaatggagaaagagagaaaaaggaaaagagataaatgaaggcaaggaagacctgtgagggtgatggggaccggtctgattggatattatttttggaggatatttatggataagacgtcaacatcttccctaacttctttgtccacctctcccacctttttccccccttttccaatttctttacttaatcgatagaactactgaatcaacaagttgttgtatgatgaaattacataatcacatatttgcataactcggaaagtcgtcatataggcaattagcatctttgttgttttcgattttcgatatgagcttaagtttgaacaatgtttacaaatagtttgatatagtatttcattgccttttataatcaccgtacaaataattattattcatcaatgattgcctccccaaatgtcaccaaaagaaaaatctagtcacatgcgaaagcattatgaaagtgaaaaaagaaaaaactgatatgaaattaccaacgatgaggagtagcagtaataaaatacatatggcataatttggtcaacaaggaaattccaatatgaattggaagtgtaacaaataataaaagagtcaacaataccaaaaataacaacagcggacttgagctgtgaaaactgttgcttatggtttttattcactgtttctttgttttgaacttccccttcctttaacaatggcgttttgacccctccctatctctctctctctctctctcagtcttctgggtttttcctattcctctttctctctctctccttcaagttgctgcaatcccttgaaaacccaataaacccccaattttccatttctcataaagttcacatttttccttcttcttcttctgccaattctctgattccctcgtttcaatctccgttttgctttgcctatcagataaatttcttcttgctttcctttctatctcataacgataagttgaattaatctttgcgtcttagttcatcagtagagagagtagggttttttccgcttatttttagggaatttcattttgttggaggtgagaatctctattcgagtccccaagattctctttatatccctagtttagttgtatggttgggttttgattggaatatcaaggggtagtttttagctaggttcactgatacttggaagatctgagttctttgggattctgttaagtttgtggagatctaaaagacacgaaatttgtagaaatctggttgatatcccagacttttagagggattagggtagattctatagaatttgaggcgggtttgattggaattatg

SEQ ID NO: 797 - DNA, 3000 bp, Unknown
  misc_feature (1)..( 3000): cDNA_ID_2045084_gDNA_ID_1620322_Annot_ID_153354 3000 nt of promoter + ATG
caaatctccagcttaattaatttgtacaaccatttatgaaaataagagaaattaagaattagaaaaattcatctaaaagtagataaatttcctgataataatttaagagtaggaattcaagtaaatggttgtacaatagttgaaaaattcatctaaaagtagaaaaattcatctaaaagtagatgtaaaaattcatctaaaagtaggagtatatgaatcgtagtatatatttttaaaaatttaaacactttgtacgtaattggttaaaatttcatgacttcagatacatttcctgataataatttaagagtaggaatttaagtaatccgaattaaaaggatacaaaacgaatgtaatgaatgattatgttcacatgataaaatgaaaattttgtgtctcttgaaaaatgcatacgatatgcaatttccctttctttcttttgttcttttctctctaattttacgttttataatttctattagttattaaatgtagtaaaacaaaaaaaaccaaagggtaggtaaagaggctaatatataacgtgagagtagatttgctattctctcattaccctatcaaccctaagtaatctctttagctctcgattatcatcattacaccatcatcatgtcctcctcaaacaaaaattggccaagcatgttcaaatccaaaccttgcaacaataatcatcatcatcaacatgaaatcgatactccatcttacatgcactactctaattgcaacctatcatcttccttttcctcaggtactcacaaaatttacattttcttctgttaaatttataaaaagtatattgttaattttacttgattatagaaacaagctatatgaacgatgttatgtatatatgttaagacatgcatgcatgatgatataaaccgctctatgaaacagatcggataccagatcctaaaccgagatggaatcctaaaccggagcagattaggatactcgaatcaatcttcaattccggtactattaacccacctagagaggagattcaaagaatccggatccggcttcaagaatatggtcaaatcggtgacgcaaacgtgttttactggtttcaaaaccggaaatctcgagcaaaacacaagcttcgtgttcatcacaaaagccctaaaatgtcaaagaaggacaagacggttattcctagtactgacgctgatcattgttttggttttgttaaccaagaaaccggattatatccggttcaaaacaatgagttggtggtaaccgaaccggccggttttctatttccggttcataatgatccgagcgctgctcaatcagcgtttggttttggcgattttgttgtaccggtggtaacggaagaagggatggcattctctaccgttaataacggcgttaatttggagactaacgaaaattttgataaaattccggcgatcaatttatacggcggagatggaaatggcggtggaaattgttttcctcctttgactgttccattaaccatcaatcaatctcaaggtaaattaatcatttcgaaatagtaatactgttcatatttttttcttttcgaaatagttttattacctcatttgctcaacatacatgaaaataaatattataattaatgcttaatttggtatatttcgtagatgtataattagtatactaaatttagtatatagcatatatatatcgaatctaatatcatatagttcttaccatatgcatgctggtgttatccaatgtcacatatacatagatatgtacgtacactcatttctcatatttcatatattagtgtgtatatatatatatatatatatgtatatgtatcttggtcataaaaaaaaaaaaggaatcttggtcatatatatatgaattataatacttagataggtcatagattatggtaaataaattattaaattattccatattttggaatgagtaacgcatgcatacgatattttgggaaaaagacgttttggtctttagatttgaccatttactgtgtatttttttgggtaaattagtattatttaattactttgactaacattaattaccaaaatgtgctctattgatcacaagaaaaacgagatgtaggattatccggtggtgaagacgtcggagataatgtttatccggtgagaatgacggtgtttattaacgagatgcctatcgaagtagtgtctggattattcaacgttaaggcagctttcggaaacgatgccgttttgatcaactcgtttggccagcctattcttacagatgaatttggtgttacttatcaacctctccaaaatggcgcaatctattatcttgtgagttttgtgtaatggtcttaaggtttttgtttttcttgtatgaattgctgaaagcttttgtgtttggttttgcagatttagaagatattgaaaagcaaatgttatggtgctatggataaatattaatataataataaaagatttctgcgatttatttagttattaattatataagaatttcatttcttatcttttaaatttatgaacaatttacaggacatttacattttcgagactttgaaaaataaagaatgaaattaagttacagctttatttaagtttgtttccaatgtaatatgttcatttgtgcatttctattttctttcttttctgaatatatagcttatctagtatgtcattaaaaaatgttaattcttttatatatgtattcataatatttttcattataaaaaaaaggaagatattcattcatgtgagaaaataaatgggccattgctcctagttttgggcttttgggctttttcttagtttcttaatgtgtttgggccattgctcctggttttgggccaatattgagatatcctgagcctaacttatttaggcccattaagaacccattctattttgtgcgtgtatgttacgctgtgttctctcgttcaatcattttcttctctcatttccaaaatctagaaaccctagagcaaaaagtgatctc

SEQ ID NO: 798 - DNA, 3000 bp, Unknown
  misc_feature (1)..( 3000): cDNA_ID_2044985_gDNA_ID_1620322_Annot_ID_153382 3000 nt of promoter + ATG
tattcagatagttctgaggcttcgagatgatgttttaagggatagagagactggttccaggaatcaacctcctgcaagatctgagaataacaatttcttctcttcaagtagtagtaatactggtcttgcacttcctcaatctttcatgtcttctgttccgcaagttgcttctgtagatttcaataggagaccagaaaccgggagcagcatgagcatgcttccttcgagtggtggaatctatggttatggaagttttccggtaacatttccttcttctgctcaaaatggatgatctcagtttctgtgtttataacttaagtttttctaactacaggtgggcaatacaagttatggatccaactcctcttactcatccaatctatatggagggtaagtttgcaagttagtttcgtttgttcagtattatattttcaactcttttccctgttgattatcttgtgaattcacagattgcctcagtctactactatggaggttcgaatcccagcaaatgcagtgggtaaagttatgggcagaggaggaggcaacttggacaacataagaagggtttgtttaatttttatttttatttttccttcctcattactctctgattgccatagcttcattcgtctcttcttccctctttcctatataacattttcacatggtatgtgccctctctctctctctctctctcagatatcaggagccatgatagaaatttctgattccaaaaattcccatggcggtcgcgttgctctcatttccgggacatctgaacagaagcgtaccgcagagaacttgttccaagcttttatcatgtccacttgaataatttgctctgccccttaatccttttccatggaagtgtgttccatcaatctacctctcagtggatttctttgatcgggtttctcaggctttcctccttccatcaagctcatgtttagatatggttgcatctctcatcaaacatttcggtatctcatctcgactcagttacttttggtttctcgtgctagacattttatagtctttcaggaccattcttttcccctttccttgcgagctgttcgtactataactacttatctccgtgcaataaaacaaaatcgttcttatatcaatcaaactttgcttattctccatatgtggaatcagatctgctttgttcttagtccaaagcagcagtcctatcagttatgtgttagtttaccgactctgcaaatcccacttctcagcttcttatgtgatgccaagtgatactcaccatatcatagttcttggtgtttctgtataaatttctgcagtgaacagccataggttattatagcatagtgatcttcaagaacagtagcctttagatctcctcttgttaatgatcgtatttgtttctgcttcttagaagtttgaacttgttagtgctttgatcttacgatctgattatttgaaactccatcggtttatcagagtatcagtagaggaatttctcattcttgatgatcatcccattctctgctacgattttactatctttaggtcaaactccactgattgatcttctttatcttagcctctgttaccatttctgatttattctcttcccagataagctccccggaactctgatcatctatattaaacttaaatcatgatcttatagtgcttgtagcatatttagaacctgccaggctgcgacaagcttttgtgaatgttatgtgttttctggccattcccacatattaggttgtctctccatgaaaattagcatttgtcaaaaagattttctgattatgctagcgtttgcgctcgaacacttcgggcttgggatttgtcctataaagctgaggttccacaacatactaggctgtcaaaaaccagccacaatatagttttttgcggtttgatgatttctctgataagcctgacactcggcgctggctaggttggcaccgtaggattgttgcattagaaccacaatacttacttcttcaaacggttttctgattctgctgtgttttggcttcagcgtttgctctattcccttgagagtggcatttagttgacaaacccaaaatactaggtttttggaaacccacaacatttctatatactgtttctggtttagcttttgcggttgaagcctaacattctaacacatcccgggattttaagcgggtgtgttgatctttagcagatcctatattcctatttcgtaaaaaatgggtttcacgagtgtgatgaataatagtttagttgttgcaattgtatagtaccttgagcatcgttttgatcaaaagaccactgaagataagtttcttagtagaaagattgatgttgatccatttggaaggttttgtatcatatatggtcatgtagtagtttacgttacgcaactttaaagtgcttttccatttttctaatataaatgtgaatttcgatcaagtgtttaccaagttcaattcttctaatctctctattgcatatcacataagtaattaaagtatagcattaaataggaagaaaaaaaaaaaaaagagattatggggaagtcttggattaacttaggagagaaaaacaacatttgacaatttgtaattttcaaactcatgttataaagcaaaaaggttcacttatatccgatttttttaatatacttggaattattcgaataacctagattgtaagctagaatttgagaaataaatttcccatatttggttaatgaaaaaataaaataaaaaattcccatattgaaaattgagtctaaaagtagaataaagttacaacattgttcaaccaaaaagaaaaaccgaaatcaaaccgtaaataaattttataccatatttttagtattcggataaaatttgcccatcccgagaaagtcagaaaacgatcattttctaggaaaacgaacgaacagaggacaaatatattagataaacagagggaaacaagaacaaaaacgtttgcttcattctctgaaagactctaatg

SEQ ID NO: 799 - DNA, 3000 bp, Unknown
  misc_feature (1)..( 3000): cDNA_ID_3058993_gDNA_ID_1620322_Annot_ID_153379 3000 nt of promoter + ATG
tcccgacggttacttgaaagctgttagagaactctgcacaaaatacaatgttttgatgatagcggatgaagtacaaagcggtctggctagatccgggaagatgctagcttgtgattgggaagaaattcgtcctgacatggtggtatgttcttttacattttctaagctctttatttcattttcttaacggtttcctccgtgagcaaagcatcttgacactgttttctgaaagatacttgggaaagcattaggtggaggagtaattccagtaagtgcagtgcttgctgataaagacgtgatgcttcatataaaacctggtcaacacggaaggttcgtattcattactctgctcttttgttgacctgaattagcatatagtggtttgactgctattaagcttcttcttttttctgtttgtgaaatcagcacatttggtggtaaccctttagctagtgctgtagctatggcttctttagacgttatcgtggaagaaaaactcgttgaaaggtacagttttgctttctatatcgattcaggttctttagattaaaatattaagttcacgttttggtttgaatctatagatcagcaagtcttggagaggaactgaggattcaattgaatgaaatcaagaaacagtttccgaagtacataaaggaagtacgaggaagaggcttgtttaatgcgattgagttcaatagcgaaagcttgtccccggtttcagcttacgatatttgcttgagcttgaaggagagaggagtcttggctaaacctactcacaacactattgtccggttaactccaccactctctataaggtaaattagaaacaactgaaccggtttggtttatttagtagcttatcataggtttcttggttgaatcaattattggttttctttcttttgccagctctgatgaactccgagatggatctgaggctcttcacgatgtactcgagctcgatcttccaaatctgctgaaaatcaattccggtaaaactccggtttctcatataaccgagtgtgatcgctgtggaagaaacctctatgcttgaaccggtttgaaacttgattaggttctggtataattagattctttgtatcttgtgatttccataggacacagcaccggtttggtataagaaatatattaaagtataaggccgaaccggattctaccgagcttggtagaaataactctggtttatttctggtttggcattaaataaaaccaacataaaataatatgatgcctgttttcataggtgttatacatgatatctcaattaacaaataaatgttacataacaatatgtatggaagtatggatgtactaatttatacgtacacgtgttggcatgtgtagatagatattgatatggaacatgaaatcatgaataaacatatgcgtgtcttctataattgctcaacccaaacatgttgaggcgtgaaaccccatatgattggttggctctctaatatttaaattacattatcataacctgatttaaaacaacaaatacatatttaaataactatctgaaacatgtaaattatataccacactaatggcctcatgatctcgatttctttctaaatctagtgaaagaatattactcatttcttgttgtcaaaatgcaataaaactatttagagggaagaaacttagatgtttcgttgatgaatctgcatttaatagtcacatgtgtctccattgtatcctactatcattttgcaactaagtcaaatataattaaggaaaacgccgaggcgtgcgaaatgggaaaacacacatgacacaacgtgcatgtttatcgcaaaatcaacacatgacttgtctagtcactagtgcattatgcatatcttctagtattttatgattaaggataatgaagttcggtagaatatgcaatggtggactaaactaagtttgatagtaaccggttgcataaagaagatattatggacatataatattcatttagttactaataattttaaaattacatatataaatttcaagtacaatcggggatgtgcctttagtcaagtggttacgttcatctgactctgttttttccatcggaatttgactccactaaatcgcattatcccacacaataggaagtgattatggatcgggccttgtcgatccaaaaataaaaaaaataaaaaattcaagtacaatctttttacttaagtaatataagtatgctttttttttttaaaaataacaaaaagataagcttttttctaagcatataaaataaaatcttagaaaacaaaattcatgtatttaaaagattaacttcatatagattttataaagaattatttgttttcttttgcgtataatacacaagtttaagcaccgagaatgtaatacatgtgttaatcttaggctaagaaaatgtacaaagtgatacatacaatcttgtgtcaactttgtaaattccttttgtaaacaatgaaattgaaatgtgtctctaataataaagctcatttagaaggagaaaaatataaattactctttagaaacttataatccgtttatgtataacaaaatatcacctacttactatttgtaaatattgttttcctcctatgaatgagtctagcattaggcaaatccaattcactctcatgtggtacagctacctataaatttcattgtctatttttatcaaaataacgataaatacatttttggcaatgtatacaaaaataaaactaaaataattgtcacatcaattgttcattacagaaagaaaaaaaaacagtccacgcgatacacgcgctcatattttttaatacacgcgctttaaagtagagacaaaacctcgtggatctatctcctccgaccatttgatttcttcctctcttctctctagaaacatctttcatgcgttatcttctccaaaagctctgattctgattctgaatcatcctgaaaaaaacctagaaaaattctatcccacaaaatcttcaaagatccatg

SEQ ID NO: 800 - DNA, 3000 bp, Unknown
  misc_feature (1)..( 3000): cDNA_ID_2045052_gDNA_ID_1620322_Annot_ID_153363 3000 nt of promoter + ATG
tctttggagcgttatacacattagcaatcggtacaggcggtacgaaaccgaacatatcaacaataggagctgatcaattcgatgtattcgacccaaaggagaagactcaaaaactatcattcttcaactggtggatgtttagtatcttctttggtactctcttcgccaacactgttcttgtctatgttcaagataatgttggctggaccttgggttatggacttccaacattaggtttggctatttccattaccattttcttgttgggcactccgttttaccgccataaacttcccactggaagcccattcaccaagatggctcgagtcatcgtggcttcatttcgcaaagccaatgcaccaatgacgcatgacatcacgagcttccatgagctgccttctcttgaatatgagcggaaaggcgcctttccgatccaccctactccaagtttacggtaatgtgtatatttatttagtataatctcaatctaaattcatattatatcctaagtatatcagaaagtacctaacatgcaactatgatgcagattcttagacagagcttcactcaaaacaggaacaaatcataaatggaatctttgtactaccacagaagttgaagaaacaaaacaaatgctgagaatgttaccagtcttgttcataactttcgtcccaagtatgatgcttgcacaaatcaacacattgtttgtgaaacaaggaaccactctagaccgaaaggttaccggatctttcagcatcccaccagcgagtctctccggatttgtcacactctcaatgcttatttccatagtcttgtatgaccgagttttcgtcaagataacccgaaaattcactggtaatccaagaggcattactttgcttcaacgaatgggaattggtcttatctttcatatcctcatcatgatcgtcgcatctgtcactgaaaggtattattcttaacgaaaaagaaatatcaaataattttcttgtgttgcattagtttacttaaacttctttatttggtatttatgtaacaggtatagactcaaagtcgctgctgatcatggtctcatccaccaaaccggagtaaaactaccattaaccatctttgctttgcttccacaattcgtcctaatgggtatggctgattcgttcttagaagttgcaaagcttgagtttttctacgatcaagctcccgagagcatgaaaagcctcgggacatcatattcgacaacgagtttggcgattgggaatttcatgagcagtttcttgttatctacggtatctgagataacaaagaaacgaggaagaggatggattttgaacaaccttaatgagtctaggttggattactattacctgttctttgcggtacttaatctggttaacttcgttttgttcttggtcgtggttaagttttatgtttatagagctgaggttactgattcggttgatgtgaaagaggtggaaatgaaagagactgaataacaaataatgaataatatagatttctctatatcagtaacttttattcatggactttgttaagtaatttatatcttccacaactaggatggaattgttagcagaacatccgaagctgagaattgttggtaattaactcacagtaatgtctagataattaatatagatgagcttgcagataattcgacatggcagcaaccaaacttgttttgcaacacgttgatccaccataaaccgatccaattggacccatactagagataacctttcttccacgcttgccccaaatccttgcaacacgttgatccaccacaaaccgatccaagtcaaacccggatccaagtctgtttgaattaagcaaatgggttggcttttttacacaaacaaaaaggtaaaaaaaggagtcgtttaagcttatcctttttttctttctaattgattcgatttcattagaacggataatttttaaatagattaccaacaacaagtcaaacaacacatgtcgtccaatgttttgttggtaggcacacatgtcgcccaatattaaaaaagattaagaaattcctttccattttatttgaaaattttaccaaaaaagagaaacaaattaagaatttaagaagtatattcttaattcaaaataactaatttagtaagaaactgttacattgccacttgccaccatctgtaaataattctcattttggtattacatgttattgtagaaagaaatattttcatttcatgatgtggcattaaatatgtagaaaactcattttgggatagattttttaatactaaaatttacttttatttaggtacaattcttttctttcttaaggccggaaggatatgcttatgatctatattttattttttaaggataaattttgatattatctatttttcatgtttttatttcatctatcttatataaaacgaattttagataagaaattgtatctttaaccacattttgaactcaaggaaagaatagtaattaatacattaacacttgtaaataattaaacaaaaacaattgatgaaagagtgtttcaagctttcaatttgtgcctgatatacgatttgttttagtttgatatatatgcatgaattatactttaacgtgaattttttcggttttcggtttcggctttcaaataagttaataatacattccattcatatgaaatattacaaaaattgttgaagaggtgtcatttctatgaagcgagcttatcttggtattacagctgtgatgataactataatgataataaattgtatatttgaccagttttgtctacatataaactactataaatcaattatagtaattaattaaaatataaacaatttcaactcttactttttaaatggtgatgaaatggcaagacagctcatttaactagcatatatatagatgtatattattctatatattgtgtgaccaaagtaccaactctcttcaaacaaaagatccgtataaaaactatattgaacaagacagaaaatg

SEQ ID NO: 801 - DNA, 3000 bp, Unknown
  misc_feature (1)..( 3000): cDNA_ID_2045038_gDNA_ID_1620322_Annot_ID_153366 3000 nt of promoter + ATG
ataaaaatagttttgattctgctcctattaaatctttatgaaattgtaaatgttttatggattttgattattggaccaaaaatcttttgtctatgcaagaagtgttactcacttactcataaatcgagatgcaaccaaatttatcttgtcattcgtgttgatcacgacaaaatcattttcctaccttttaaatcgcatattttggtctctctcacaaaaataaacactaaatttgatttctccaaaaataatttctgtgtagtctccattgtagtctcatatgggtttattatgaaaaagtcagcgactcggcgctaattttaatttataattcattattagatattagggatttttaaatggaaatcatataaatttatatgatcaagaaaaaggatgtgtttcaaattttgatatagtttaagatatttatttgtaaaatttgtatttgaataaaaaggataaactttttggtagaccggttcgaaataaaaatttgtgtagaattaagggattaatgattcttctttaatgttttaaataggccaagcccgtttctattagcctcgttgtcttggcccatatccaaatctctccacacttcactcttttggtcacaaactcataattggcaacttttataacgttttttttttttttttttttttttgcttctacaatgtttctttgtggcatacgcaacgttactactgaagaacatcctatttcatgcagtttattttaataaagtgttagcgtgtatatataattctcattactattttctattcaaaacagttacatccaaaggcatatctaattatatattaatataagtgaaattaatatataaaagtcgactcagattaaatgaagcaaagtggattattctatacgtctaagattcctctaaatctttatatccatctcagttccttactctttattttatacgcaaaaaaataaaaacgtatccatatatataacatttatgtgtgtgtaagaatatatattataaatcaagacagacattttagcacagaagtagagaaacaaaggaagaagatggagatatttgtgaagaaagagtacttagatttggttcttgtcccatttggattaatcatagttttatcttaccatctatttcttctctatagaatcctttactttccttaccataccattatcggtttcatgaacatcgataaatccatttgggtcgaccgtatcatgcaggcaagttatcatctctctttacgacaatcttttcaaaattatcgatatcgatttctatttaatgttttgtccaacttattacaagataaaaaaaatgatgatttggtaatgccaacatttttctaattattacttttgctatatggatttagatataacggttagctcgaatgattacaggcaagaaaagacgaattgggtggtgctttaactgttctttcgagcagcatatcagcttcaacatttatggcatccattgctttaacattgagttcacttatcggcgcgtggatcggaagctcgccggttagtatgactgtttttaccggacattttatctatggagacacgagttcaatcacaatggtcatcaaatacacatcgctcctcatatgtttcctagttgcattctgctgttttattcaatccacgagatgttttctacatgcgaactatcttatcaccactccgggcgaagatattcccccggacatggtgaagagatttgtcttgagaggcgggaactattggtcgctaggtcttagggctctttatttggctcttgatctattgttgtggcttttcggaccggttccgatgtttattaactcggttttgatggtcatttgtttgtattttctcgactcaaactcggtggctcagcctctttatcaccggacttttgaggcggagcaaattgtcaagaagatgagaggagttttgcctgaacagttgacttttagatgtaattgaaaagaaaattatttgattcttaatcactttgccaacttgggattttccaacgaattatatttgattataataatctttggaaaattcgtaagaagttttagtttatcaattattgcatgagatttgtgaaagccgtacggagcatgttccgggagcgtctcgtcttatgttttataatcatccacacgataaagcattaacggatagagaaaaaaagatgagctgtttaattcatttcttggaagcaactacttagacatattctctaactttgaaaataatgattataaattgggttcactaatatagtattgtaaatctgtaatttaatttccacttgtgctacgaaaacagcatggtcacatcacattttttctcagcaagtatataaatgcatgtctgaatattgatcatgcattttcacgtaagttgacataatttgtttttagataatatgcaatgcaaatatttaaaagagaaggtgaattcaatggtatttttttttgtgtgtctattttcaaaaatagcacaaatacagatttttaaatcatagagcatttaatgtaaaatatttgcaaagttatataaggtttttataagattgtatatataaggttttataaagttcataaattttgataaaacagattataaaatggtattgctacttgctagcacactttgttagcatgacctttaactcaatgcaaactcatgctaccaatcaaagcctttcattagagaaaactggataacaaaataaataaatagaaaccacacatttaggcccataaaggcccataataccttttcttgggcctattattaaaaacttaacccctttaatcgctgttttctctctctcgcgacggatcttcttaggtctctctcttctcctccttttccccactttttcaaaatcagcaaattttggattttcagaatttgagtgaacttaaagtagaagacgaattgtctgaattcgaattttaagaaaaatttgcagag

SEQ ID NO: 802 - DNA, 3000 bp, Unknown
  misc_feature (1)..( 3000): cDNA_ID_2045020_gDNA_ID_1620322_Annot_ID_153371 3000 nt of promoter + ATG
ttgtcttaacatggatgttccaggttaaacgatttggagtaattcctccaagaatcatctcgtcaaggaaattggcagcttcacgaaacttactaatagcacagaacccactgattactttcccatataatccagcatcaggtttcaaaccctgaagattcattctatcaagaagttcaacggcttcttgaatcttctgctccttacagagaccagtgatcaaagtggtatacgttaccatgtttggcctgcagcctctagccatcatcatctcaaatagttccatggcttgcaaagaacgcccatctttgcaaagaccgtccatcaaagaactgtacgtgaaaacattcggctcaatgcctttacttttcatctcttctagatatctcatagcttcatcaacatttttcgatccacacaaaccgttaatcagagaagtataggtaacaacagttggtgcacagtctttctcaaccatctctgtaaacaacttcttcgcctcatctatccttccgaacctacacaaaccactaatcaaggttccatatgtgtaagaatccggatcacaccctctcttaggcatttcaagaaaaatcttaagaccagcatccacagttccgtcatttctgcaaagagctttaatcaaaacattgagagatgccacagtaggaggcaaaccaatctctctcatattcttgtaaaacttaaatgccaaatttaactgattctcttccacgagaatggcaagaacagtgacataagccttctggctaggatcacaatcaaaatccttcattttgtgaaaaacccttaaagaatcaaacggcctatgaacccgaccataccctcgacatatcgaaagcaatatatcttcactaacaacacaattctcaatcttcattctaacaatcagatcttcagctgctttgaacttattagcagagaccaacctcaagaccatataaccaaaagaactctgatcatgtacgtacccatttgcgtattccgccgttgcggaatcaaaaactgccatagacttctccacatctttttcagctcgcatcagtttgataacctgtgaaggcgtgatgttctttgaccacttgaacatcatcactttgctacccattactaaacaatgataccttccaacaatagcaaagaatacacctttttatagagaagaatctcagctacgcattacgtcgaacaggttgtgtgcataaacgatttcgataggctcaaaccaaatgaaagaaacacagaccagaaaaatcatttgatcttcaaaacatacgagttccaaaagtgaaggaagcaacaatgaaactcgttacgaactagaaggttaatcaaattgccggagaagaatcgctcaccagttttggctagggtttatgaaatgggagactttagctgcaaagagaagagtctctggacgatttagagggtgtctctctaacaggcaacaaagtacatattattacagtattaaccaaatttaaacgaattaagtgtcaacaaaagcttatataaaaaatttaaagtttaaaaattataaaatatgtcaacaatattttagtacttaaaattattatgcgaaatatttagatcaatggactactcatctaatatatttgcacctaattttaaagtataaattcaaccaataattagaaaatgatagcttatactcaaattcaacaaattatatataaatgtatagatactacaatatcattaacaaaagtcaccttaaataaatacacatatcttttatgttctctattgttttgcgtacgctaacacaatttctcatatgcaaaaggatgaatgagtaacaaattacctcataagaacaatcatctttgcttacatactaatacaataatcactcaatcaaccaataacatcaatcacataggtttacatacaataatcactcaatcaacttcataagaagaatcatgtttacttaattcatcaattatccccaaaaacactactattaagtataaactataacatatttgtagtgatgggtcaacatttttatcatatttaaactcgggtttcctcaaatcgagaaatagtgaacatgtaatattaattttaaatcgcaattacagaaattaattgaatttggtcaaatggacagaattttataaattgggtggaactagaaaaaaaaaaaaaaagagtatagggtgaattgagtacatgaaagtacatggtaatcctagttaaacgcataatacatgtgggttcatttgtatttttttgtaacttacgagtaaactggctacaacaaaaaaaaattagaagatttttttgttttgtagaaaaccctaattttagttatagttgtataactttgataaaattataaaattgtattacgaaaaaagtaataagatattcaaaaaagcctagaataacgtatatgactatgagcatgaaactgcaagtcaaatgctgacagacaaccataaacaaaagaaattaaatagagatacctttaaaataagtaaaatttcatttataaaaaatctactttcttgtgaatctgtcacgttcaataatttgaagaccactcaacatacaaggtaaataatgaaaaataaaatctaccaaaatttcaattattattatcttccaaaaaaacaaaattatacagatgatgatggtgatatggaacttcgattggctaatattcactgtgtctctaaaaaccatccacttatcaagataagatggaccctacactcatccaatctaaaccagtatctcaagattcttatctaattacatcattctctaccgttagatgaaattgaccattaaccctaccataactccatacaccgcgagatactggattaaccaaatcgagatcatcgtagccgtccgatcaacaagtaccatctcttgaaatactcgaaatcctcataagtccgtccctctttgctctcactatcaaaactctgaatttcgatttca

SEQ ID NO: 803 - DNA, 3000 bp, Unknown
  misc_feature (1)..( 3000): cDNA_ID_2045003_gDNA_ID_1620322_Annot_ID_153376 3000 nt of promoter + ATG
atacactgatttgaagaacagaactgagagggtatagttcagtgatggagttacgccataagaagaagtctggatcataaggttaatctgaagtgggctgcgttgcttcttgttttttctgatatcgacatatataaattagtatatgtaaatatgtatttttaaaacttttaaatcatactttgtataataaaattattattcattattagaagaatcaatagtttatctagtttattgactattcattattatatttaattacaacattatctatgtttttgtttatttgtgactgaccttaaactttagtttattacatatataccctataagtagttaggtaaagctttcaattttagtcctcagtttctgacatttttggttattttctcctttttttatagttcaaactttttttttcctttcaactttttcatgttcatatacttttaattttactgaagagagattaatttacaaattcaaaaaaaaatcttagatcaggtggaatctaccagagagcacgcgattctagatcgatccaccggtgagagacgccggagtttttatccccgcggcggagtaaaccatttcttcttcccgatgtatcagtgaagttaagtagtcgagagaggggataatgatggaagtggaaggatcgatgaatcgtgctcctgatcaatcatccttcttacgatcaagacgatccaaaggttaatcataacactttcttcgaaatcttcaatcaaaagcctttagtttaagctctcacgggtttaagtaagggcaaaaaaaatgctgtgatttggtattcgattttggcaattgtttatagattcatgtaactttttgaactgaacattgaatcatttgattttggcagctctgtatcagtttaagcagcagaaactcccagcttgtaagccagtcttaacaccaatatcggttagtaacattaatctttgtcacctggaaaaaagctaagcttttcttctgattgtctaagaagaagaatcaaatgttttttgcaggttataacagtgtttatgttaatgggttttgttttcattcccattggtctcattactcttcgtgcttctcgtgatgtaagttggagaagttaactcttgaatttgagatgtaagtttctggagcaaactcttaaatcctttaatggcaggctattgaaattatagaccggtatgatgttgagtgcattcctgaagaatatagaaccaacaaactgttgtatataactgattcatctatcccaaagaattgtacgcgctacttgaaggtaattcctttctgctccattgattctcaatcagtgaattaagattctcttcattgttacctattggtgaggttttatacttttcaatatcaggtacaaaagtatatgaaagctcccatttttatctactaccagcttgataactactatcaaaaccatcgccggtaaaatagctagatgccttattgatttacttttcaaatctagtgatgagaaagtcagccatttggtagctgatgattcttttgcaggtatgtaaagagtagaagtgatcagcaactattacatggactggagtatagccacacaagttcttgtgaacccgaggagtcatctaatggtctcccaattgttccttgtgggttaattgcttggagtatgttcaatgatacatttacgttttctcgcgaaagaacaaaactgaatgtgagccggaataacattgcgtggaagagtgaccgcgagcacaagtttggaaagaatgtgtatcctatcaatttccagaacggaactttgattggtggagcaaagttggatccaaaaattccagtatgcattctcaaccactttacaataaaaaaaatttaatcatatattttagcttaggcaatgctgtttactttgtagctaagtgaccaagaggactttatagtgtggatgcgagcagctgctttactaagcttccggaaattatatggaagaatcgaagaggacttggaaccaggaaaagttgttgaagtaaatttgatgaacaattacaacacttatagctttagtgggcagaagaagcttattctctccacatcaaattggttaggaggaagaaatgatttcctgggtatcacctatcttgtcgttggttcctcttccatagtcatatccatcatcttcatgttgctccatttgaaaaatccaaggtaaaaaaggctacattcgcagaaaccctttttctgttcattttcttatatgcatcattctcaatctcaggccatacggtgacaattcttggaacaagaaaagcctttcaagttgagaagctgttacattctttctctaacagattcatattccaggttcatatatattcctacatactcaagagccatactttgtctatatatatatgatcatctaggtttaaggagtatataacgtatgtatgagcctatagttctagaaaactgataaggttcctctgttttctttacgatccttgtgtgttcggattgcgggttctaaagattcaacaaaaagataattgtttgacccttcttttactcttaaacctctaacgtgatgggtttatttgggtatatctgtttttagagccctgtaagtttagaaaatctaacaaaagcattatagagaatgcatcattggctatctgcaaagcgtacatttattttcatccatatcccgaaaaatcctcatgttttctttctcatatttccatatttgtcaccttaagtatctctatttaacctctcccatttgtctcctccacatcatatgcacctctaagttctcccattgaaagatctttcattcatttagtcaaaagcagcacctttcaatcttcctctgccctcctcacccgtagaagatccgtttttttatttctcaaactaaacccgtgttttccttctgctgcattgcattgttgtcggggaaaagaaaactgggtgtaagaaaaaaaaatg

SEQ ID NO: 804 - DNA, 3000 bp, Unknown
  misc_feature (1)..( 3000): cDNA_ID_3059016_gDNA_ID_1620322_Annot_ID_153364 3000 nt of promoter + ATG
gtgattgaactcgtgtctccatagataaaatgtccggtaaaaacagtcatactaaccggcgagcttccgatccacgcgccgataagtgaactcaatgttaaagcaatggatgccataaatgttgaagctgatatgctgctcgaaagaacagttaaagcaccacccaattcgtcttttcttgcctgtaatcattcgagctaaccgttatatctaaatccatatagcaaaagtaataattagaaaaatgttggcattaccaaatcatcattttttttatcttgtaataagttggacaaaacattaaatagaaatcgatatcgataattttgaaaagattgtcgtaaagagagatgataacttgcctgcatgatacggtcgacccaaatggatttatcgatgttcatgaaaccgataatggtatggtaaggaaagtaaaggattctatagagaagaaatagatggtaagataaaactatgattaatccaaatgggacaagaaccaaatctaagtactctttcttcacaaatatctccatcttcttcctttgtttctctacttctgtgctaaaatgtctgtcttgatttataatatatattcttacacacacataaatgttatatatatggatacgtttttatttttttgcgtataaaataaagagtaaggaactgagatggatataaagatttagaggaatcttagacgtatagaataatccactttgcttcatttaatctgagtcgacttttatatattaatttcacttatattaatatataattagatatgcctttggatgtaactgttttgaatagaaaatagtaatgagaattatatatacacgctaacactttattaaaataaactgcatgaaataggatgttcttcagtagtaacgttgcgtatgccacaaagaaacattgtagaagcaaaaaaaaaaaaaaaaaaaaaaaacgttataaaagttgccaattatgagtttgtgaccaaaagagtgaagtgtggagagatttggatatgggccaagacaacgaggctaatagaaacgggcttggcctatttaaaacattaaagaagaatcattaatcccttaattctacacaaatttttatttcgaaccggtctaccaaaaagtttatcctttttattcaaatacaaattttacaaataaatatcttaaactatatcaaaatttgaaacacatcctttttcttgatcatataaatttatatgatttccatttaaaaatccctaatatctaataatgaattataaattaaaattagcgccgagtcgctgactttttcataataaacccatatgagactacaatggagactacacagaaattatttttggagaaatcaaatttagtgtttatttttgtgagagagaccaaaatatgcgatttaaaaggtaggaaaatgattttgtcgtgatcaacacgaatgacaagataaatttggttgcatctcgatttatgagtaagtgagtaacacttcttgcatagacaaaagatttttggtccaataatcaaaatccataaaacatttacaatttcataaagatttaataggagcagaatcaaaactatttttattggagattatcggacataaaggaagaaatttattatagtagctagatttcatcgaagtcaaagattcgtaatgtatctctttgttcacgtcaaatatgatagtgtgaaaatatctctttgccttatatatccaacaatgacaatgacacaaagtaattaaatacacaaaaaaatacataaaataaaacaaactacaggcaggcaaatttgtaagaagatgcagtactattaaaaatattcaaactcatttgtcatgtatatatataattgcttctcaagcaatgtttttggaataatttgtacgcacgttacgacgaaacatagtataaaaatgtcaacatggctaattaagtttcgaaaatattttaataataaatataattaaaaattgaaacctaatcaatttacaagtggacattttaataaggagtttagcatcactcgtgagatttttacttccccaaccaaaaataatggaaacataattatgcaaattatgtaatgacacttatttctttctttaaagaattatgagttattattgtccatctactacaaaatttaaaagtagatgtactgataatttttttttttttttttttgtcgtcgtactgataattaaaaatatcatgccaaaactcataccaatgtccaaaacctgaataaagttgaatattattgccactcaaaatatcaattagaagactcatatttttagtccataattctatagtgaatcttttatctatttgtctttcgttttcatctgaattataaatgagttttggaaataattaccagttaaaattatttcttaatgtccaaaatgttaatagtaagtcctgcattttgtgactctgaatcaacaatttgatgtgtttttcttgtgtatttttctaaaccagtgtttatatatagatgtaggaggatccgtttggaaagtaagacatatgttcatctgcaaataattttccatgtgaaaacacatagataaaagggttgatctttgaatacatatagcgagcgaggtgtatgaaagacaaatgatgacgataagctagcacaacaatcattttatagtctctaataagtcaaaaataaacttacttcgtaataacatttctgcatattttagttatgttattattatgtacataaaggttagtataattttgtaaactcctggacgattaattactaatttaataactttcactttcagacagtaattataagtgttacgttgaaagattcgcattattcatgtgacccatcatctacttaatatgtatatatatgagacaaaagtgccgactctcttgacattaaaaaaaaaacagaaactaccaaacaaattagagagagaaaagaaagaaagaaagaaggtagagaggaaatg

SEQ ID NO: 805 - DNA, 3000 bp, Unknown
  misc_feature (1)..( 3000): cDNA_ID_1385376_gDNA_ID_1620322_Annot_ID_153362 3000 nt of promoter + ATG
aaacaattaaaaaaacaaaagaatttagatacgtagttattaatatagaccattagattgaaaagtaaaaattaagatctatggctgagattaaagacaataaatggattaattttttgatgttataaatctgattagaaaaaggtatctctcttcgtctctagaactaaatctctctctttaaaaaaacaatcgtttctccctttctccttcctgaagatcgatttttcataaatccatagtagtttaaaaaagaagcagagagatgttgaaaatcgtttctcatggaatcaatcgattattctctatgaagttctttaatccacacaactttcctcaggaacatgataatagtagtaaatggaggtttttcctatggttactctagacgaaggaggatctccttgtgttggacaggtttgtgatttctttccagggataaaaaaaatttgattgtttgtttatgatgaacgattttttggctacggaagagtgtcatggagttctggtgaattttttggctatgtttggtgatttcatttttaatcaagttgggaatcaataggaaacaactaagcatacaacatagattagaagagatatcaagatggatctgatttaagtaagatttggcgactaattctagatgattagggttatttgtgatttattacaaggaatttgtgttctcattgatttggcgagtaattctgtatgactagggttatttgtgttttcttaaaaagaatttgtgttcttgttgaaatcttgttcattggaattatttgtgtttggtaaatcttcattggtggctaaggatgtgtttgtagctcttacggcgtttgttattggtgatgtccattatgaatggcaaattatggatggcacattatggatgatgaatcatggatggcatattatggatgacgcatcatggattgtacattatggattgatatggtgagatttgtaaatcttttggtcttacatgttaagagtaaaagatgaagaattggagaagcatgtctaacatcctaaaaacaagctatatccggttgatttgctacgattttgtttttgtgaaacggtggctgtaaagcggtgaaaaactttgctgttctcctctagtataaacattgacctttatgatggttctacgacttagatcgagttggtctccaatgttaatgttcatcgtactattaaaggccacaaaatgttgatcatcgtgagattataccgtgtatcactttcttctataattccagaaattcttatacaaacacatatttaatgtccacgcgctaatgaccatatggtaatattctcgtggcatcaatatattgtcttaaaggtagagatctctgcaaattgaaagaaaaatcaacaaataatttatccagtatagattgtccatttaaacttgtccaaacggttcacttttatatttgcccttaaagtaatgaaaagaaattgtaccaatttgcccttaaagtaatgcagacgcaaataacttataaatgaagctctccttttttagtcatggccgttcactccagatgagatcgtgtctgagaaactatcattttttatcttctctgtcttccatgttttttttttttcatcattttcatttcctttttcaaaatcatcaatcatggtggttctctataattcttacaaatcatagaaattctgagattatctcaaaattctctatcataacttaaaaacgaaggatatattaagaatcaacaacagaacattgctgctacaattgatcttcttacacgctttatatacttaaacttgagtacttggacactcatcaatggacaactatgcttcagatgtgagttactagatgaccacttggactagagtgcttggacacttatcaatggacaactatgcctcaaatgtgagttattagatgaccatttggacttgaatgcttggacactcatcaatggacaactatgcctcagatgaagttacatcgacaatggcctttttgctgctactcgcgttctcaacatcacgaaccgtttcaagcccagattgcttagaaggtaactgatcatggttaacatcctcacttttcattgtaatcgatgacagagattccttaatcaaggagagaaataaatggaaccaaatcaaataattgttgagagacagggaagatgatgataaatcatatgaaattgggcttttagttttgatttggaatattgagattcccgtaaaaaattggttttgattttggaaagagagagaaataaagacgatggagaaaagagttgagagagaaaatgaggagaaagcgttgtggttcagagggcaatttgggaattttgatttggtaaagtgccttctcctttcaaagtgcctaaacgggtaaatagttttctaaaagtgtcttataatgtaataatctcaataaacaattcaaagctgtataccattcaagcccattattcaaaattttgtttgactaatactattcaatcgggtctatgggcctcagaaaataataaatgggccttaaatacttggaaacaatggatagatcgatctcaactttaaaatgcgtccaaaaatataaacaaacaaacatctctcgccgtcaggttacatctatcgccaccgcaaagagaccaccgtctcctccgcaatcttcataacctaaacaacactcatcccctggtaagctcaattctctaatcaattcaatctcctgtgatgtcgatctgtttctactcaagttcaatctcacgaatcccttctttgttctgtaaattagggtttcacgatttgtgtgtctagggattcaagatccctaatatctgatcatctagtaattgtgaaagtattgatttttgttcttttgatttgagtttagcaattattgagatttctttgaagttgaataccttttctcaatcattataaaagtattgatttttatgtgtgttttgtggcaaaggtacttaaaca

SEQ ID NO: 806 - DNA, 827 bp, Unknown
  misc_feature (1)..( 827): cDNA_ID_3059072_gDNA_ID_1620323_Annot_ID_153396 3000 nt of promoter + ATG
gatctaaactattaactaaagtattaattgaaaatggatgacaacattttgaccaaactatttaagccgttttcgcttatacataataaacttcagagtccaaatccagccaaagactcctcatactacatttgtgtttacttacttacactttcaacttaacaaaaaatagatgtaaatggaaatatcattagcattattaacaaacaaaacaaaaattacaaacgacgtcgcattcaaatcctttttcctttcttttttcattaacccttaaataacggacaattgataaatctttgaatcagagaagttgcgcccaaacaaaaagagaatttattgttcagttagtctagtttgcatcgcatgcgatttttggttcatcagatcttcccaacacacaacaaagccctaagctttcttcgatttttagagcatctccattagacaaatctttaaagtgtcttccccaaataaacaaatatgttttagtcaaaaataataatattgtaattgagagtgtctttagatcttgagattttatctcaaaatgtctctgagaagacattttaggaggagtgtctcaaattttgtaaacattctcaattataatattattctttctaacaatatatttcttttatttgaggaagacacccaacaatatatgtgtgatggagatgctcttattgattttctcggtctttgtgtgcgcaaaatcgagacttagatgaaattcggaagaattcgaggttttcactgctagtaagtttgatggaggaaagggaagcgaaaggatatgttagagattaaagattatcgggcccatg

SEQ ID NO: 807 - DNA, 3000 bp, Unknown
  misc_feature (1)..( 3000): cDNA_ID_3059039_gDNA_ID_1620323_Annot_ID_153417 3000 nt of promoter + ATG
ctttgacggataaccaaactatagtgtgcacgtgcattaagcatggaataccttccactgtcctaaaagtgtcatcggacatacaatcaggttaccaccattttgaagtacacttttttgttcaagaagcctcttatcaaagcctagaaatttggttgccttcaccgggggactagtgagatcatctacagaactgctgatcactttgtctccttcatagttggggcatagaaacccagttgatgcagctttccaagaatgggcaagcaaaagggatatggtcattacagtctttccaagacccattgcgtctgctaatatctacaaaagttttaggatataatattattacaaaacagctatataataaagtgacaaaatctaaacaataaatgaaagaaatttttataggtggggtattgagatcatactcctcctcttgccatttgaagtgtgctagggaagtgtattgtagcatcaccagtaaaagaattcaggtagacaaccagttccctcctattgacataaaacagatagtaaatatcttatctgactcgcactaaagttcgaaggcaatagaaatatcactcacttgtctgctaaacagtatgcttcccaacacgggtgaagcattgttgctgcctcatcagtgcaatttcctttctccagttgggtcatccaatgaagtgcctgcttttggtatggacgaagctcacacagaagtgtatgtggagtttccatttcctgttgcaaaaattttcatgcaattttccaaaggaaatttccagtgttggatataagtaagcaagaagtcttgaaaatgagaatacctttaatccagaactgtccccaacaccaacaatgttatcaagatcaccatcgctgatacactgctcattttcatctccgtttgcatcttgattcatattcttgaccttgtttaattgaagcaacgaagtaggaatagcagaaccatcctatttccatagggcagagagcaaatgacaaattttacaggcaagaagtcaaattttaagatgctaatataataagtaatatttaccttggaactcaaaggtcgcttcttagagtaaaaatcctctggagtaaactctgcctaaatatgatgaagaatggaaaaatttcttcgtcatctcaagattattcagtcacatcatatgagaagtatatgggaactacaaactgcaatctataaaagaatccgcatatcaagttataggcaaggaataaccattaccttcttaaaggggatcaaaccgagtaaccgaaagagatttgggagaggatggaacattgattcctctgccgtattactagctgtcttaaatgaagtcgcactatgcttttgaaacatggaactattaatgtacacgctgtttcaaaaacaaactcacaccacttcaaacactaatgcatctatcctgaaattgtaaacgggaacacaaaagttttgtatgcataccttacagacagaagaattgtatccatgatgctcaaagcttcaggcgccgacttgcaactgccttctatcctaattttcttgtctctcacaagtggtagaagacaccgagcccactcgtttggtattctaccaatctaccacaagagcccatcatagttagttaacaattcccatctaacaaacttaacatagcaaataaaaaagatgtgaaacacacctctcctgaatcctttgtagagaacctaacgatatcagaagcaccacgcaaagctggccttccccgcccaaaaccgcgcttcccaggcgtagtctcaggctttaatcctttactatgcggaaacgtgaacaccaattcatcaccagacttcaatttccttcctttacatgtcgataacccagccaattcagaacaaccaacaaaccaccactcattccctgaaacactctcttctcctccaccattaacactctcattttcttcctccacgcgatgattcgctccaacacttccgctgtcaccaaaagtacagccctttaatccactatcaactcgcttccctccattagagccgctcggggtaggagtggctacatcaggtttggcgaaacttggagtgtcgaagattatattgatagcagccgttggatcatgattcgccatgtgtaaagccctgattatatccatatctgagtaatcggaacccacgactgatctgacggtggaaacaagatcgtctgagactttcgttcccatttccaaaaccctaatcctacaattttccagggaaattttgaaactttactgaaaattcagtgagcttgtggctaaagaacgccggaaaaagaaaaccccaatgtagtacagtggcgaattatagaaattgaagtagatcgacgacgacggcgtacgaaatctgccggacccgagaaacgcgcgtaaattagcgacgagtctctcaaattcccgccattatattgttttttttattcaagtgatgaaaatagaaaggtaaattcaaaaacggtgacgttttaaaatccctaacgggtctagatccgggtaacccgcatcccgagttgaactcagtttaacaattagaccacaaaaatctgccattaactcagaagtgagaagtgtagtagaaccattcgacacgattgaaaaagctcatcttttttatttctatgtctctctcttttggttacgtaagctctctgtccatatgcttcattgatggtggtggttatcaaaatctagcaaggttttagcttcaattctgtccatatgtttatccatttccaagctcagacgtgaaaagatttcagatttatcgctggatcacggctttgatttcttttgcttcagctttgaatttgatttcttttgcttcagatttatcggtggatcttagattttgatgtgggtatatggttcgattttataaaaagaagttagatttttggaatcatagaaagggataaacgagaattgaaatctggggattgatttggatctg

SEQ ID NO: 808 - DNA, 3000 bp, Unknown
  misc_feature (1)..( 3000): cDNA_ID_3059043_gDNA_ID_1620323_Annot_ID_153416 3000 nt of promoter + ATG
cacctccaggcagatcccagtattgtgagatcgctttgcatatatacagatattccagtctatggttcgttgcagacaaaagtaccaggacaacttttggaatgtcggtgacattgtaatatttgatatctgcatccgcatggacattaattttaagcctgtgatataagcgaaatattcatcagcatccacacaaaaaataatacatgcaatataagtaaaatctagacaagctgatgagtgagaattattaaagtataaagtgcaaaaacaactttccgtgagatatagaactgagagatcaactctatttccataaatttgaaaagcaaagtatctgaaatgaaataaggcgtcgaaaacatacaccagtaagagattgcatgtacccaaaaagagtcgcccatgtggatccactccaaaatacactgctcccctgagtgacgttttataaacaacagttggccccattttttttatagtgcattctggacaataccacggcccatctggtatatacattttgaccacaccaatgcatcttgaatgatatgctaaagggcatccatcacaacacagcaacgttccatccatgccacagagcctacattcatcactgtttgcatccagatctgggctatctccattaggaccaccatcagtgtatcttgaactccaattttttgagtcgctcaatgaacttatcccatggttcactgcaacaaattcactaagctctttctccttggaagctgaggttttagcaaatctggggtggacccttctaggtccattttcaggaagttcagcagttactccatcagtatcaaatccaacttcagattcttctctgttatcaatttcagctcttaaatctgctacatcaaagacgtcatcacacagaatttgcaggatcttcaacttcattactacaggtgacgagcaatattctttctccacaacaaattcattaaaaaatctccagagaggcccacttgcatgtcccatggcagcaaagtactgaaccaaataaacaggccaagttagcgcatcgagcaagctccaatcaatgcacctgcagatggcaatgcaacaaaacccccgaattgttatccactaaaatatgggataatgggagacctaaaacaagtttcacctaaactatgaataagaggcttatattgcagtccctgtacagccataggcctttttctcccagctgttataaaaggtttgttgcatgtatgcatacataagataacaatgtatatttttactagcttgaaaaataatgtcagcagttctgcttccttgaaattcagatatccaacaaattaattttactgtttcacagaaataactcggaatatatgaaagttaactagaaacatctccaagaagaaacaaagaaatatctgttgaaaactgtaaatgacaagagttgtatgtgcttacctcaagcattttgaagccacttcagacccttctgaggagagtctctcaagatgacctttcagtgcccgcatcaaggcaacatgaacggcatccaacaaagaattaggtcctaaaaaatttaaagctcccacaaaatcatccaatccaaatgggcagatatataactgaacactgaatgatcttaagaacccatatacagataatagatacaccacagcctcctcagggataccaattgttcctgatgaagaaggcaactccactggtggaacaagaggagacatactttcgaaatctggatctatgtcatcttcacactcaggcaaaccacaagatgaataaccactttcaacttctgccacagaacttgggctattacatgtgggcacctcaactcctttgttcttcaggcaatctgttttcttcttttcgtccttcttcagaataaagtcgtctaatttactccttctagcacgtaattcatcatcaaagtaactatccccaataattaactggcgaagataacaagtttccaaatcctcaaaatcaccatcctcatattcaactctgtacaacccagtattgtaagaaactatcttcccaagaaaaactccactgtcatcaacatctttcaacacataacgaccaagaagagatctaggtacagccactttcacctcgaaaaccggcctcttccctcgattagataccccattaagatcctctggtctggggcgtttccttggtctacctctaggtttagccacctttccttccatcagatccaaatcaatccccagatttcaattctcgtttatccctttctatgattccaaaaatctaacttctttttataaaatcgaaccatatacccacatcaaaatctaagatccaccgataaatctgaagcaaaagaaatcaaattcaaagctgaagcaaaagaaatcaaagccgtgatccagcgataaatctgaaatcttttcacgtctgagcttggaaatggataaacatatggacagaattgaagctaaaaccttgctagattttgataaccaccaccatcaatgaagcatatggacagagagcttacgtaaccaaaagagagagacatagaaataaaaaagatgagctttttcaatcgtgtcgaatggttctactacacttctcacttctgagttaatggcagatttttgtggtctaattgttaaactgagttcaactcgggatgcgggttacccggatctagacccgttagggattttaaaacgtcaccgtttttgaatttacctttctattttcatcacttgaataaaaaaaacaatataatggcgggaatttgagagactcgtcgctaatttacgcgcgtttctcgggtccggcagatttcgtacgccgtcgtcgtcgatctacttcaatttctataattcgccactgtactacattggggttttctttttccggcgttctttagccacaagctcactgaattttcagtaaagtttcaaaatttccctggaaaattgtaggattagggttttggaaatg

SEQ ID NO: 809 - DNA, 3000 bp, Unknown
  misc_feature (1)..( 3000): cDNA_ID_3059061_gDNA_ID_1620323_Annot_ID_153401 3000 nt of promoter + ATG
tatataccttttttgtttatcttcatacattaatcaataattaattagtcgcctaacaataaataaataattgtatggctcaaaaaaatttaaaacataaagtgggtttttccttaagaagctagattatactagcctcagaaatcagaataaacctgatttgcaccattgaaggaaacctagtacagcaacccactcgaacaaacctgatcgatctgcaccattgaaggaaacctagtacagtggcccaactcgaacaaccacatacacacaaagaactagagagacatatatgtaggtaatacatctaatttagtgttttatcatatgacaacacataagacatacaaaaatctagtgagacatatttgtggatgtagattatcctaagatatatataatctatatctctaactctaatagaatgtatattgattgcataccctactttttaacccattgattaagccatttatcaatgagaaaaagagattctcatgtgatgcagtgatgctaacaaaaagtttacatactaatttatactaaaaaattatgacgctaatataagtttatgtactaaattataccgaaatattatgtataataaattattagaatgcaggaaataaaagaatcactgacaacttaacaagtaacaacagctccaatatgccacgattatgtaattcgtgtgtcatatatatgtttcttctcgttaaagttaaagatatataggtgtgacctcaggtctcaaaagtgaagcccagcttctaatataaatatttctagtttattttcttcgttttgaaaaaagaaaacacatattcataatatattgaaaataatatcgttttataacataagtaaacaatcaacaagcaattgttggccgtaaaagatttatcgatggggttgttgaaaccttttttaattcataaacttgtaaaggtttaatatggcaaagttggtgaaacccaagtgggactatctaacattgcacctaagcatgctgaattgatcctttctacatttcttttcatctgtcttgactcttgattaacgtttgaaaatctttttttaactttgttgtcaaatatgattagcgactttatttttaccttttttttttatcatgacctatatctcgttctaaattacacctttaattagcaaaatggtaggaatatgcgaaaaaatacataactaaaaaatggcaaatttctttctaccagtttcatgccatatcgaaaagagaatggcatgtttgtctaaattcacctatcagatcaattgtttctcaaacctttacgtacaatttgttttcctaacgttaacatagctagcatgcgcagtgcgcacgatgatctgagaaaacaaaaaagatttggtgggattttaactttgattaatggataagatatatcgttcaattttataaaataaaattataagaaattcaaccatttgtagcatatgattaacgtatatggaaatctctaaaatggaagaactaattaaggggttcgatttcaaattttcggtagtgcttttctcttaccaccaggtttaggttcgcttttgtttcaaaccaaaacaactcattttatcttgaaaagaattaacatttttctacaattctttttctaagtctatagttgatagttttttttcaccacagaccaacccaaagagtaccaaagtacgataggaaaaataaagtcatagttaattacttagattggtaagaatatttccaaacctaaacaaatcaaaccgagaccaaaccagtgaaaatggattataaaaatatttgtactattgactttatttcttgttgacaaaattgacttcatattaacttagaagatgcacgtgttacatgttcacgttagtattgaaggttctacgtctttgcaaaatgtgaataaagtaaccaagtcccactaatacggcacgtgaaccttgttattttcaattatctcgtttgcttctcttttggctacaagagtctctgatggtaagcttcgtttcgtaatacgtaaaaaggtaaaattgtattaccatttgtgggggtttttgtttgttggtcaaggaaaattgtggtttttatgttttagttttttgtcctcaccacaaatgataatatttttatactgagtggtactttatcgaaaaatgataatagacatgttcgtttccatcaaccacaattaaatgttgtttatatgtgtcgataaattgtacgagtctgtgaccaaaattttcatgtcaacccatttaaaatctgacaacatataacaagaagtacaaaacgaacaaaactaatatgcaagatcagcttttggttgcaatcgacaataaatgccaaacgaatatgtttaattgcgtttgataaatgatcgtacaaattcagaaaggggtgatctaaccaaaattcaagaaacaaaacatacaatattacaacaaaatttacctgaatctttaacaagtgttcagaatttagttttaaatcttgatgagattatgaaactatgaacatttcggaataattccagttaaaaatcatatataaaggcaaacaaaaattcacgattttccccaaatgttttccgaattcgtgcaaaattgtgctatttccttttaataacatagtatcattgtattttttttaataacataacatatgataaataacattatttgtttgtttcaccttaatttggtatagttttttgggagtctccatgtactttccctcggcccttgccagtgttttgtatttcaaagtgaattatatcagtgagaagtgaaaaccaaatcattagtgaacaaaaaaaagaaagataaaaaaacttgattaagcatgataaaaattgggtctattgggcctgcctttacggcccaaataaaacccacgataaaatcgaacttcccgctaaatgaaaaaataagaatcacttcttatttctaaaaacataaaacaaaaaataaaataaaatg

SEQ ID NO: 810 - DNA, 3000 bp, Unknown
  misc_feature (1)..( 3000): cDNA_ID_3059055_gDNA_ID_1620323_Annot_ID_153411 3000 nt of promoter + ATG
gctttcagttgtagatttgttcggctttctatttggcaccgttttcgtctttatggcggcgtgtggctaacttcttatccttgtgaatttgttttaatttcattagatgacttcttgtttgtgaatttgatttaattttgtttagttggtaatttacaaaaataagagtaggttttctctaaagctattcacataaccgaaacttcgattgttagcaatcatctgtggtatcatatattcaatccattttatccgatattgccaaatctcaatttttcgacaaacaacaggaatgaatgtaaccccacggctacaaacgaatgaatagaggggttgaagattttggcaatatgtgagtttgatgtattggatatccacttctaactaaatctggagttccttgttaaaaaaaaaaatgccaaatgttttctgacaacgcatgtctatgtgacttctccttgtgtgacacgtgtatgtgggagataaagtttcttttccttcaaggtttaatcagttgggctctatttgggcttcatatgattgtaaacccattatgtaatttttgttgcggtttggttatgaataaaaataaaattcaggggaaaaaaaaacatctctctcattaacggtttaagtttaaaccgactataaaccggaaaatgataagcaaaaatccgaaagaattgatctgaccctgcaaatccatagacctcctccggtcctccctctcgctttacctctggagaacttgacggcgactgcgtcttcctcccccgtcgaaacacaaaaacccgtcaggtgacttcatctacttcgctactctccgattttagaagccttaacactggaatgtgatgatttgtgtctgaattcgtgcgaattgcgtccttgttgtatacttagtattcgaggttgtctctgtggaatcttcggttcaattttgtgagcaaatatgctttacgaaggctatttaaaatatatgaaagcgaaatacggcgaacggtcgcagggaacttacttcatggctggagaggatctgataagcaaattacctgattctctgataactcagatactcttgtatctcccaataaaggatattgttaggactagttctttgtccagtaggtggaaaagtctctggcttttgattcctcggttggatttggactctgaagagttccaagattacaatgcctttgtgggttttatgaacaagttcatagatttctctggggaagaaaaaatatgcttggacaagcttaagctaagtagtcggaagactgtgaatgatctgccttgtgtcacgcggtggatagactttgtggttaggcgtaaacttaaacatcttgatgttgagtgtcttgtgaatcgtaagtttttagaggagatgcctttaagtctttatgtttgtgacacactggtaaatctaagactccatcgggtattgttgggtaagtttgaggctgtgtctttaccttgtttaaagactatgcgtttagaagaaaatgtatatgccaatgatgtggttctagagtcacttatctcgtcttgcccagttctcaaagatttgatcattcttagaatgtttgaagataacgtaaaggtcctacgagtgcactctctgacactaaccagtcttaatatagattttaattttggggagggtgatgacttcgttgatggttttgataaaaaagtctcaggggttttgattgatgcacctcgactcaagtatttgaaattccaagatgatctatcggggagtaaaatcataaccaattcgggctccttagccaaggtcaatgttgtttatgtcttcaatgagaatgattgtgctgatgttgttgacataccaagacgaaatatggtccgtaatttcttaaccagtatctcgggagttagcgatatgaagatctctcagcattttgtggaggtatacatatacatatcatgtagctagcgttcttcatgaaagttttgcttaactcatgtttcttttttttggtgtgcagtttctctattattacaaggacttcgacccactgccacagttttgcaacctttcccgtttaaaagccgagatttctttatactttctggaaattctgccaaccattcttgagagctgtcccaatctgaaatcactcgtcatggtgttggtgatgactcgcacaacccttgagcttttactcaaaatactttgaggaatgtgttatcttatattcattcctttttgtttgtttgtttggaatgttgtctatatgtaggaattttatctgcaggaggaggatgagccaataatattctcatccgtacctcggtgtttggtttcgtcactcgagtctgtagagataaaaaaattcaacggaaggcctgctaaaatggaagtagcaaggtactttttagaaaactctggagttctccaaaaacttgttctgcatttgaggtgttccacgcatgaagatggattttacattttaaaggatctccttgcattgcccagaggatctagcacatgtcgaatcgtagtttgttgacggcttgaaaggttttaggtggggctgtgatcagattaagactagcaatctagcattcccagctgattacttaaattgtacttggatttctcattttgttgcactctattatgatgtctttgtgagcttttggctactagttctggatgatgttgagaattctttgtgtctcttcccttctctgaagccatctttcttgtcttatctgttgtcgtgaatgactaatgggctttgagatgaaacttttgctcttgggccttgacccatctcaatctcttgtcttgacatctctatcttcttaaaacgctctcaaaacgtcaaaacccttaaaagagtcatccctatcagttctgctcatcttctccgctagaaaactgagatcatcgtgatctgtttctgactttcgtgctacatgcgtacttacacttaagtattcgaagctgtcactgcggattcaatg

SEQ ID NO: 811 - DNA, 3000 bp, Unknown
  misc_feature (1)..( 3000): cDNA_ID_3059051_gDNA_ID_1620323_Annot_ID_153412 3000 nt of promoter + ATG
ctggcgcagaaagtgagattctggaagaaagtgtacgtgatatacagcttcttctttgtgaggaaaatcattgcacattgggtcacattttgtttctactgcgttgttcttcctctcacaattctcgtcccggaggttaaagttccgatttggggttcggtttatatcccatccatcatcactatcctcaattccgtcggtactccaaggtatattctgttccttgtatctcaagtcattatctctgtttctttcatagggttgcttatatgtcacgtaactgagtttaaatccttttctatttctgattttgttcaaaaggtcaattcatctgctgttctattggattctattcgagaatgtgatgtcgctgcaccggacaaaggccactctcattggtctgtttgaggcaggaagggctaacgagtgggtagtgactgctaagcttggaagcggtcagagcgctaaaggaaacactaaagggatcaaaaggttcccaagaatcttcaaattgcctgatcggtatgtttacttcctatatagaaaattctatatttgttattagaaactagggatacacactaaatgattatgagttatttgtgtcagattgaatacattggagcttggatttgcggctttcttgttcgtgtgcggatgctatgactttgtgcacgggaagaacaattacttcatctacctgtttcttcagacaatgtctttcttcatcagtgggctgggctggatcgggacttatgtcccgagttagtagttgtgttgtttcagagagaaaagagaatgttattaattttcttgagaaataaagacaattttcattgaaatgacaaaggaaaattgataggggagatagagacgtaccggtaacaacaagtaggaagaaaggagaagacttttatcaaagaccaggaaagaggagaagctccaagggttcttttgatttatttttaatttttctgtgttttatttatatagctatgggatttgtgattcagttgttgtgagattttaattttcgttctttgttttttattttggtttttgggtattttttcgttttgaaagtgttagtctttttgttttgtttttatgatttagaattcaagattctgcgtgagctacaagtgttagattgatgcaaaggttcaaaattccttgttgtcatcaacaattatccattttatagtaattaatttacagtcagtgaatgtatttaccacacttggagctccaagtgttcatttgattttttttattttttcataaatacttagctatgggatttgagactcagtaattgtgagattttaatttctgttgttgttgtgtgtgtttttttggttcttgagggagaatattagattgatgcaagggttcaaaattgctagatgtaatcaacaattacccattttatagtaattaatatacacagtcagtgaatgtatttaccacaattgtacttgcctatcccggtttgtgtttagatgtttgattgatattcttttttttttatcgtagtaaaggatatactgttctattagttactaggtataaaatatttaaaatagtaataattagctgtatagaaaacattttttttttagagtaggtttttgtatcatcatgttggtagctactagctagagggaaaattcaaaaacctctaaaaattaaattccaagtaaaaattataaatagaaaactaacaatatgccaaaggatttttaggttttttttgtcatgatctaagggaaggaggtatacaatttttttcataattatattcgagtaaaagagttttttagtttaaattcttcatacacattcatacttcttttgacattttctctctcttcactttttaggtttttagagagaaaaagcggtgagcaaaactttccggcaacaacgatttcaaattagcgtctttttggctggctaaccgtccgaaatcgtctgctttcagttgtagatttgttcggctttctatttggcaccgttttcgtctttatggcggcgtgtggctaacttcttatccttgtgaatttgttttaatttcattagatgacttcttgtttgtgaatttgatttaattttgtttagttggtaatttacaaaaataagagtaggttttctctaaagctattcacataaccgaaacttcgattgttagcaatcatctgtggtatcatatattcaatccattttatccgatattgccaaatctcaatttttcgacaaacaacaggaatgaatgtaaccccacggctacaaacgaatgaatagaggggttgaagattttggcaatatgtgagtttgatgtattggatatccacttctaactaaatctggagttccttgttaaaaaaaaaaatgccaaatgttttctgacaacgcatgtctatgtgacttctccttgtgtgacacgtgtatgtgggagataaagtttcttttccttcaaggtttaatcagttgggctctatttgggcttcatatgattgtaaacccattatgtaatttttgttgcggtttggttatgaataaaaataaaattcaggggaaaaaaaaacatctctctcattaacggtttaagtttaaaccgactataaaccggaaaatgataagcaaaaatccgaaagaattgatctgaccctgcaaatccatagacctcctccggtcctccctctcgctttacctctggagaacttgacggcgactgcgtcttcctcccccgtcgaaacacaaaaacccgtcaggtgacttcatctacttcgctactctccgattttagaagccttaacactggaatgtgatgatttgtgtctgaattcgtgcgaattgcgtccttgttgtatacttagtattcgaggttgtctctgtggaatcttcggttcaattttgtgagcaaatatgctttacgaaggctatttaaaatatatgaaagcgaaatacggcgaacggtcgcagggaacttacttcatg

SEQ ID NO: 812 - DNA, 3000 bp, Unknown
  misc_feature (1)..( 3000): cDNA_ID_3059047_gDNA_ID_1620323_Annot_ID_153413 3000 nt of promoter + ATG
tttttacatccaggagttagtaacttcgaaccaaaatatccatgaacaaattataggttttaaaggcttggtcaaattcaaggtcgaaaggtcaagatcaagatataatgtaaggtgaatttttatggtgcatatggctgacactgttaaatttttgtagtatagtatgtagtgttgaatattaaattcgcgtaactagaaatggtcaaaagtcatgtaaaagaaagtcagttacgcatgctaatttccaaaatttcatacataaaactaaagaatcatttagctaattaacgtagacatgaccttacttctaagattatatctacagaaaagaaatgaaaattttaagaaccaacttatcctagtcatcactcaaacacgagattgttgccttgctgagccacttttaaaatcatcctatcgaacaaatttcgtgttatatgtcttttctgagataaaagaagcaaaaaaaattaatgacacaactttatcgtgaaaacagttgaagcatcacctgaaaaagtggagtaatagtccgattaaaagacacaaggtaactatagtgaggctacttatgtaattacgaaccatgataccactttggacgaacctaacccttcataattgctcgtagttgtggcagcgcaaggccttctagtcaaagcaatgtcttattattatttatagaaatataactctcacttaaacattaaatatcatagacgaattctcaatgtatatattatttttaatgtatgtaaagctagattggttgcactcaaaaaaaaaaaaaaacagattggtttctcttttacagaaacgtttttgtattgttttctaaactctttcgaaaacttgttcaatattaaaagaacgagcattttttgtatcttttaaagttgtaaatcgctctaaatgaatagagaaaatgtaactttatattcatggtttttctctgaataaccaagaagtcttaacttttaattgaatctcggatttttttttcacataaaagaccactccatgttaatacgtcaacattatgtcggtacttaaaccagtgacattaaagacttcctcaacattgtatttttttcattatgggtactgaaaattcgtcaattcaacaacggtatataatcaagtaggattattttggtagataaaatatcataacagcaaataactctatactcaaatgcatacaaaaaatacacaaacctaagtaaaatatcagaacgctcaaaataatactagtatggggtgcaactggcaatatccgatccatggaaactggcaacttggtctgcagtctgcactcatgcatgttatgataaacactatacgtatatagattttttttttcttttattgcgaatttgggcttcgaccttattcttcctaggtccgacgccactatttagtccttttcttttagaaatacttctcctcccaaaagggtttgaaccactaccattccatctcctaaacacatttatcattgctaaagagtatattagattgtgttctgccttagagcatccacaacaatagatccaaaaataaggatccaaacaagctttatcattttaataaaaataaatttacaatttagacatttgaaagagatctatatttaaagtatgtccaatggtagatccaaaatagagagtctaaaaattcaaatgtttgaaaaaatgtgtcaaattgttttataaagaaattaattatgtctaatacaaagacattcaccaaccaaattgtgccacatatgggatccaaatcagttataaagtatacaaatttggataagtctaatgtttttctcccgttgaggttgatctttctctcatcaaacatatgtattttcctaattaaagtattgaaatattaagaaaagataccacaccaatattctaataacaatgtattgtgttttgatgattttattaacacctatggataaacggcattttatatatatatatatatgaatttttatgtctaagatgaaaatctatatctatatgtaagatatagatttatatgatagatctagtaacatgttgtttcatatgatgttaattcttttttttttataggtacaaatcaaacttaaaattactttcatttatttttgtaagaaaaacaatgatctaaacttaaccaaaaaaagttgactaatcccaaaaaaaggatgatcaaacttaaaattattttcatgagagtaaattgactaatcccaaaaaaaaaaaaggagttaaagtgaattcacaaggttgacaaaatgagttctagaaagttgacctataataagtaaattgttataaaaagctgcaaaatccaaaatcccataaatggtaaaaagttaaaaaaaaacgcataaaatcactaatcactaatcattattcaactgtgtataaaaggatatcattaggataataaattcattagaaatctatatctctctcccttctcttcccattgggcaggcacagattctgaaataacaaaacacagaaactgaaaaaccaaaatctcctctgttgttttttaccagaaatttcattaactgaaaaaatagaatctcataaagacacaaacaaaccaaatgtattttttctttctttcttccttttatttccttttaacctttattactctctaaaaaatctaaataaaaaatcaatcaaaaaaaggaaaacaatcttacaaataaataaaataaagtaaaaaaacaaaattatcaccatttatattcctcgtttatccttctcttcctcttctcccttaaaccacatttctccttctggctctctctcttcctaagtttcctctctctttagaactgtagagagagaaaagcctccatttttctcaaggcaatctctctctctctgcctcatctcataaacccattacaccaaaacctcatcgtagagagagaaacacaccaaccattgttacactctaagagaagagaagagagaaggaaaaatg

SEQ ID NO: 813 - DNA, 3000 bp, Unknown
  misc_feature (1)..( 3000): cDNA_ID_2126569_gDNA_ID_1620323_Annot_ID_153407 3000 nt of promoter + ATG
aaaagtataatcatccatctggtcgtgtatatacgtactatgccaacttccatgaattttcactgattagtttattaaagttctcaactatcttcaggaaattcagttcgagttgctaaagaattgggcatataatttccacgaaactttgcatttgatagataatttaacatgacttgactatttatactagatatgtgtaatttcccacctatcttttagggtctaaacatttttgcatgccaaaagagttaggtgtggtggaagctaccatatgctcttaacatccatcttctagaattataatcttcgattgtaagcctgaacattttcatttttatgagatatttaaatttttagcaaaacaaaaaattggcatatgagtttctttgtacatgtttcttaagctgtacttttaaagttgtagacaatgttacaatatttcatgtacagtttctttatcttcatgccgtggagttatgtttttactttttaggttgtgcaacactgaaaaataagggttctaatataaatggattcatattttaaaatcaatttttgtagcatgtagagcggtaagaactattaatcaagctcaaaattatgaaaatttgtatttgctgcaatgttgaaaatatgatcatcatattaaaatattattattaagaggttcttattaattcacatttccacaagtaatgtttattgttttggcacaatggtgtcagatcttgcgtggtgtcctggtgtcctaatatcgtacatgtataaactataaaagtcttccaccgtactaattaattaatgtttaacttgttaatgagaagacaaagttgccaactaaaaggtaaccaataactaatttaaaagagagtagtcttggtcataagtcataactcataaaaatgaagatcacgaactgatttgagcatttagtgggtccttgatggttatcatcgagatgaagtgaatcttgtcatggcgggttattatactcataaacactaatgatatatttgaaatagtagttaaattacatttcatgagggacaaatatgatgacggtataattatgtcaattgaccgtaaagagtttggtggcagatagaactggtcggaaatctaacataccaaaggattattacaacctcgtcatgtttttgttacaaccttttaattaatgttcttagtttataccctaagttattacaacctcgtcatgtttttagtggtcgtatagactttgttcttagcattttaggtttcatattagtttgatgtaagcttgcattatcatttctcaactacaactcgaaattagatctagttacattggggaaacaaaattctacctgtaaattatttaaacctattcttggattttgacgaaaccagcattaatgttgtcgtctcttaagatattagaaataggattaaacacttccatcgtcatattgtttgaaagcaacttgataatgatcacagacaaagatgattaaaaacacttacattatcacatatactaaattgatgttattataattaattatagaagggttgattaattaagagaaatggcgaaatcaggagtggggtggtaggtgggagaaagagaggtcgagcacactgtggtagttggtgagtgtgtgggggagccttgtacttaggttttgccgacttctttagattccggttaagcttttggttttggttccggtttaagttagagatcttaaattagtgattatacaagaaatctcatgtagtaatattattctatttgtggtccaagatatggcataagatttaacgaaagaattgaatgttataatgtgttgcaagtagaagctttttacgcttttaattaatgttcttagtttataccctaaagttatgaagacaaatagcagcctagccctcgatggctcgatcaatttttatcttatatttctcattgttcattgttattccgttatatttctagtatcgcgaaactggtttcaggtgacaaattgaaagtcaagtgatcaatgaagaaatatttggcttcaatatgtattttctacgattttattttcttaagatgtagcttatctaactactgcagaaaaatgtatacacgtaaatcatgtgatgagctttgttttcaacgtgaaatatctcgttccaaaaaataagaattttatttttccattatgttgtagttgttttcagacagcattttccactccacttaaagagttctcgaacttattcaatgattggtcatgtgaggctgtggcatatggtgattgaccaattaatttaagcagtcaggtcaagtaaaataagtaaattaagcactcctaaacacactaatattgaatcatttgcgttagtttttgtcgtaaattgtgtacatttaaaatatgtttagataaattattaattgatatcatccaagtggtaaatctttcagatagaaatgctgagttcgacgataattgagacggatcttttcttcaaacgagataatcaatctaatactattgatttttgtttatgagacatctaaatctttcagacttgaattttcaaatattatttataaaaaataataattggttggtgatcaattggatccagtataaagctgaagcctgaaagtagacttttgtaacgcaattactaaatatcaaacattgtatgcattggtttcttgaaacggcccatgttcttcaaagtatttgatgttcggcccatataagatttgaaaggtatgggccaatgataattcagataatctacaagacgcatttttaagccttcttaaacttacggggcaaaaataagaaaaaccaaaacaacaggggcgaaatacaaattatctgcaaatgtttttgtttcttctcagtgtctctagtttacacaaaaaccccaaaacctctctcacaacgcttatctgctcaacaacactcttcacctatccacttctcatctcttcgttatcccctctctcta

SEQ ID NO: 814 - DNA, 3000 bp, Unknown
  misc_feature (1)..( 3000): cDNA_ID_2126541_gDNA_ID_1620323_Annot_ID_153398 3000 nt of promoter + ATG
gtttgtgaacgtatatcagattccattggttggtgaacacgtcgtcgatctgctttacaataaccattgattttaacgacattaatgatctccatggcacataaacacaatatcaagacccaagtcaactgacccgcacatacgtattttaagaaatgtattggaatacatttttagtgaaagatattgtaatatataaattataatgtgcatagaaaagtgtatagtgttatttatgatacaatcactaaactttttaataatttatattatttatatttcatttgtattttgcatagtaaatcaaatgttagatttgtttcgaactgcgaaataatttagagatatttggaaaatctgtgtatttttgttagtttgatgtatatacaaattaattatttttgtttaaaatttgatcaattagatgatataatgtgaaatttactccgcggtacaccgttggtcaatttttttgtaactaaaaatttgaattttaagttatagttgttttgtaaatattttttttttttgtttagtgtttaagatttgataattgtgttaaaattgttaattctaagatttcactcgtagattatcgttccgtatgaatatcaatctaaactcgttccaccagataatttcattccgtaaaattaaatattattatgttatttttaaatattctgattgtaatatattaaaaaatattgagggattgacctgtggtagatcttggatttatatatttaagatattgtagtatataaaaccgatttttagtgtatacctttcaataattgtataaagtatattttaaaagtcaaaatttgtataaattgatattgcaacctcatgaaatcgtagtgatttacttgtagggtatcccggactaatttttgctttttataaactgataaatttgttgattttatttaaaaataaaaaaataaattaagttatatttgttttgtttattgtttcagattgtataactatatctatggctagttttttgtaatctagtgttgacccttaaagaaaaatccataagaatacgcataaattgatagtaaaattagaaaataaacatcattagaacatgaagtaatttacttatgaatctctatctagtttttttaaagaatcaatattctagatagattgtacacaaaattagattttaatttggattcaattttagattttctgtaaaaaactaatctgaattacatattttaaatttaggatgacgaaaatattttttttttaaagctaaaatttactatgatctcaacaattttggtatttttaaaattaaacttatcctcttgcattatcgcaaatatgatagtcattattgttcgaatacaattaatgttctgtcaaaaaaatcatattactgtttgttccaaagaaaagtcattcaaatttcaaagaaaaaaaaagaatattgttgtgaatcaatattttctcattttgaatatttgcattaaaaatttaaaacattggtagttaaactttgttttactgtttaaaaaaagaaataatcgaatctagaagaatgaatattccaaaagcttgtaactattataatacgtttaaaaatatattttctattatataattcaaatttagattagtgatatattttaaaaataatgaaaatttcctgttttttaaaaatattttaaaactttatatcatttaaattctaattaaaatgttaaatattttaatctatacagaaacgaattttctagataaatacaaatctaaaatccaaaaattctcttttgaatatgctaaatcataatgtaaaattattttttatatgtactaatcagaaacaattaacatagattgaagttgtaaacaatcaattaacatagattgaagttgtaatcataatgttaagggaattgtataaaatttaaactaaattataatttgttattaaattagattgaagtttccgaattatctaataacatcttatcaaaataaataagtttacatatatacaattcaaattaaaatagcgtgatatgttacggaaacatttttaaatgattttttaaaaaattggatagttattaatttattgatttaattcgatttttctttttaaacaaaatccaagatatttatttagttgtagtagttgttaatttactaaattacaaaaattcatttagttagttttaaattacccttacaatgttgtacttcacacgatgcttcccaattaataatatagatttaaagttgggaaaaaagtattttttgggcttttggcccaagtagaaaaaaaactaaaatgaccgttaccaactagcgagggaaacaagcgagtacgaaaaaaagaaagtaacggatttgataatgcattagcgagtaaagtttgtcataaaaacgaaagactggtttgctttcacatttctactgttcttatttgtagtttataatactttaaattagataaacttttaatcatgtttgtatgatctctttgtaaattatgtttgtctttttttttttttgctataactgttaatatcatagaaaatgaaaatgtttggctattacaaagtaaagttcttagctttgaaatcttggcaaaaatgaataaaaaacaagatttcaagatttgtaaattatgtttcaaaaaagtaataaatgaaaaatgttaaaaaaaaattaacgaaacgtaaagctctttaagtgttatttgacaactgtaatcggtgcccatattgtttgcccataatatctgcatcaaaactctaatatcattatcttgttacatcgcacgcgatcggctctccggatcttccaaagtacaaaaccctagatccatccggtaatatcaccttcttcttcctcactcgtttctggattttctttacgtttattctcggttctgaattctgatgattcgtttgcgtaagatttctaggttttgtgagagaattcgatggaggcaaggaaagagaaaagaat

SEQ ID NO: 815 - DNA, 3000 bp, Unknown
  misc_feature (1)..( 3000): cDNA_ID_3059127_gDNA_ID_1620325_Annot_ID_153463 3000 nt of promoter + ATG
tattcacatctcttgatgatataataaatgttcatttttctttttctttctttgggaatttggtgaataaacaaaattggtaaagcaattacgaatatagctatgtaatgtagaaaacaaaagcaaataatgatttgcatttttctttgtcagtcgtcacgtcgatggcgtcatacactgatacaagagtacgtgaccatagaaaagatagaactccatacaaggaagaaagttatatccacttagccatgtttctttcatcatttatcattttcattcagacgatccacttacataattcatttgaatgatgtttctttcattatttgcaatttaatctaaataatgcatttaaataaatctttatttgtttgattattttgtaattcatctacattctcatttagataaaaatgattaaaatacccatgctttcattttgacaaatgacaaatattcaaaatcattacctatcatcaatacaaaacatattggcaggaaacatgattttacggttttgacggaaaagcgtttttggcgggaaaaacatgattttgcggttttgacgtaaaaataagatttttgcggttttggcgggaaaatatgatttttgcggttttagtggaaaatataatttttggcgaaaaatataattttatagttttggcgggaaaacatgattttgcggttatagtgggaaaatatgattttgcaattttggcgggaaaacataattttgcagttttggcgggaaacataatattgccaatggcgagaaaatataatttagtggtttcggcgtaaaaatatagttttatgattttaggtggaatagcggtttttggcaaaaaaaacgcaattccatgattttacgattttgacagaaaataataatccatgatttcatgattttagaatttttttttgtttcaatatgtaatttgaaaaatataaaataagaaatctataaaaaataatattatttaaaatatgattataaatgaggatatatttgtcttttgactgaaccatatccatctaaatggttcaatcaaattcatccaaataagttttataaatttgtctaaatttaaaaaatcattcagatgtattatccagatgaaccatccaaatatttgttaaatttaacaaacatcatttttcatttccatttggatggatcatttggatgaagaaacaaacagaactacttcctaaaaatctctcgctatcatacagacccttctagaaaacatgcatgcaccggactttgtgttgcaacttgcaatgataatacatattatttttgaatagatttctaatgataatttatatatccttctacaaaaagcaaaaccatatattttttcctctccttttgtaagtcgaattcattgtccacttggaaaaaattattaaaatcatattatgcaaaccaacccttgtggtcccataatgagacgtgcacatctctcgtatttactatgaataacaaaaaacaaaaatagaagaaaatcaaatcagtaatggagtttattgatttatattggttcagtaatttaaagcaaaattatgttttattagatcattgatttaaaaattttgtcaaaataatgtattatccattaattgatttctaaataccagttcaaatcatgatttaatgctggatttcaaaatctacattagatattaaaaggagaaaatagagtgatttaatttatggataaaccatgttatcttaaaatcaatatgtctaatttcaaaattaataaaaattcacaaatcaataggatttttttattattattaataggaattttaaaaactcagtattttggataaggataagagaaagttgtgttcctgggttatctacgaccgggggactttcattggttgtaaaatattatcatttatcaaacataattatcatatgaaatcttaacttgaattttatttatagccaaaattatttttactctttgttcataaaattttaatactaacttatactattgaatattataaaaggacaaacgttcatttgaaatgtgctatcgtaaatgtttcgaagaattggttaggagtgcactgaaacttgaaagtaagatatttttacagttttatattttaatttatcataacgtacggacactcatgtcaaatacgaaacaagatatttgaataatcctttctactaatacggttaataaatttacgtaaaacaaaattaattttaataattttatttacaaaccaaaccaatatcatcaatattatgtcttttattgagttgttgactacttgacatataaggtcttctaagaaaattccacaatttgaaacttcctcacaccttcctcaaaccaaaactagtattacctatttatgacatcacttttatgcttacacgatagctactcagatatataagtgtgtactctatttcttgtttgatggaaatacctttctagagtactcatcagacccagttacatgcgattatgatcgaacttcaagaatccagaccatgaaaaaggtacgtatgatcccattaaattcaattttactttaaatttttgggtactattttaaaacttcatctactctacatattctattattttaaaatatgttgttttaaagttttttcttttcttttcccagctatgtttgaagttagagaacattaaaagtaatgtcattcacggtagcaaaactaccaaaaatgctacaaaacataaatctttccaaatgtgtcataatggtggacaacaattttgtctaccaaaatttttttatgtcgtttcgaatttttgtccaccaaaaatctgttgtttcaaaagtggacaagtttttttcatcccattttttcgtttcaaaagtaatctttattaattacatcccaattttttcgtatgtaatgcggcaggtgattacaattcttacatataagcgataagaagaattgaagacgaaaattggaaggaggagctg

SEQ ID NO: 816 - DNA, 3000 bp, Unknown
  misc_feature (1)..( 3000): cDNA_ID_3059133_gDNA_ID_1620325_Annot_ID_153476 3000 nt of promoter + ATG
aaaatttatatataaaaaatgatattgttgctaacgatccactctcattttgtggcctaggagtctatttttgttatcgtaattacccgaaaaaaatactaaagaaacttcttagaaaatagaaatgaaattctggaggagttgtgtcgggctccaatatatggagacaaaaactaattttactaatatagtaatatggacaaaatttgtgagctcatcttgcatcaaattaataattatattggttatgtttcgctccaaattctcatatttgtctcttacctaatctgtaaaacacacacacgtaacgcgtaaataattaatatctaaaaataatcagttcaagtagtgatattcaaagactttagaccagtaattatagtaagaaaatttgattggtctttaagctttctttataaaaatagcttataaaatatacaatttgcagacttatatatatatatatatatatatattatataaccatttaattttaaaatcaataaattttaaaacaaatcatcccacagtatattgtggattaaaatttagtatacaataaattgtctacatagtaacaaagcttatatgtatctaattctagtaagcacttttgattagattcttcttttgattagttgttttttgttttttgttttgtataagcttggaaaaaacgcattatagataaatcgtatatgcaagcttgaagtacctaacccaccatgatttcattttcctatgaacttttcttatttgattttggttttcaattatttaaccatatatgctatatgcttgaccgttctcaaattctcactaacgttaaccaatatattttttctaaacctaaaagatggctaaataaaactttggcatcataaaaatgtcaactatgagcatatctctctatttgagagtttgcttaatccaatcttaagcttatagctcatgtaagatgttactatcatttgacaagtttgtgcaacatttgatgagtattttttttttttgttttttaatatacttcacataaatgaatacattcagttgataatcagaaaaaggttactagaatcattttaaagattactcttctaactgccgcacatttacttttgtaatttggaaacaacactaatcatctgtctactaccgctagataagcaagtattttcttgtttccccaaatggtttgtatccttagacataaatggtctttttgagagtttactaacatgtgggcagttttttgggatttcttgaaaagtgattgcaaaatgaaatcatccatgtgacatgtgagcaatgaagatgagaaagagagttggttagagattaattatttatcaattctctttgtggagcttgctaacgtattgaataaagcctaatactgtatacaaaccaaactgtagaaatggactttgtaattgtggttagtcaaagttctcttttactatacttctttgaaatttatgcagtgtctctttatctctatacatagatatattgattataacgaaaaatttaaattctataaatcaaacaatcatttttctatttattatgatgcgtaagttgatttggtcaccaaaatcatgttttgagttattttatagcatattagaatgacagatcttaggtaagagcatgtattacaaatttaaattaatttgacctatctaacacctctgaaagtcaattttataagcaaaatattctattgttctttatcgaatgttaagcaaacattctacaaaactcttacaaaatcagtttgatagtagagcgagtaatcatctaataatcaataataaaaactcaaaaaaatactatgacacatcttaaaatttattttactaatagcaattcaagctgtttaaataattatattggtttaacgaatttaaacaaatttaatagtataacattctagtgttaatctaaggaagtacttgcataaccataattcttttctctttaaattaatattcagaagatgtgaattatggtgttttttattaggatacaaataaacaaactcattatagtatttgataattcaacagtctctctctcgtgtgctagatttgttgtttcttgtttgactagattagtaatacaatacctttaaatatagtattcttataatacattccacatttccgtctatatattatatgcttttattgggaaaaataataaaacaaaaaagtagagttgaaataaaatataattaaaatgacggtagagatgataaaaattagaaaaaaggaagataatataattaatgtgtccgcacaaaaaattaaatgtccttcccaaatcagattcggacaatcttcttctaaactataattattatttctcttccttcttcttcttcctctgtgccacagattctctctttttccttcatcaaatctacgcttctttctttgtctgacaaaaaaatatatatcaaaatcaactctttttttttttctcttgtttattccagaatctgtatacataaccagaaaaataaaataaaataagagacaagagtgaaaagaacaagttcttctagatgttgttgttgttgttgtctcatgggttcttcgttttctgagctcttcgacatcataaatctccacatgtaagaaaaattaatacttatgaaagaaaaataacctttttattcatcacgaaatctgcatgtgttttttttttttttttttttgattgatggagctttggtttctggttttaatggcttcgattttgcaaaacgaaaaaaaaaactcaattttttcgattcagattttgatcgggatctatgtttgttcgattgattataatttctaggtttatttttgtaaattccatttttcaatgttcttatcttcttcctctgattattttactaattttctcgggaaaattaattttgaaaattttctcggtttggtttttttctccaggcagctttgagaattgaggacgaaaggagaaatg

SEQ ID NO: 817 - DNA, 3000 bp, Unknown
  misc_feature (1)..( 3000): cDNA_ID_2126715_gDNA_ID_1620325_Annot_ID_153467 3000 nt of promoter + ATG
ctatgtatttattatgtaaaaaaaaaaatgtataaaccaatgacataatcgttcgtatagccgtcgacttctattgtatatttgctcaaacgtcgaccctttcaaaattttaatatcgatgtttgtcaaactcttgcagattttgatgaattcgacgctagattgcctttaacgaaattcaaatgttacatatacatagacgatatatatatacatgcattagatgtacatgattagtgctcatctacattaatatttcatgtatgtatatgtaattaaatattgaatttcattagaaacattttggtaatctcgtgagtttgccaaaatatgtttactttgtttgagtttgaccacaaaaaaaacactagaaaagtcaataacgtgacaaactaaacaagttgcctattattaattgcactcgatcttaattggtttgttctaggaccatttttagtagaagtaaaaccagcgaaaacgaatgtaggattcagtcgaagggtgttttataaaatcatcaaattattaggaacaatgaaatatctgtaaattaaccaagattatttgcgtttggttgtagcgtgagaaaagcaaaggctaataacagttgagagaagggtgtgtttgtatgggctgctctgtatcgaagaagaagaagaagaatgcaatgcgaccaccgggatatgaggatcccgagcttcttgcatccgtcacgccatgttagtttttagtttaaaatcttattagtaagacaatctttaaatgttacaatagcatgttgtagagtttggtaaactttttcaaattttattttacttgtaatgggagggacaatagtcacggtagaagaagtggaggctttgtatgaactgttcaagaagctaagcagctcaattatcgatgatggtcttattcataaggtttcttctttcactctaaaaggtccatatgtagacagcaattaggtaatctatatagcttaattagagtttaaaagtttgatgttgcaggaagaatttcagctggctttattcagaaataggaaccggaggaatctcttcgctgatcgggtacatatagtaactacctagctagaacaagtgacattattgaaaacatatgtaaatttaaacaaagttctgttttataatatgcagatatttgatgtatttgatgtgaagcgaaatggagtgatcgagtttggtgaatttgtccggtccttaggtgtcttccatccaagcgcgccggtccatgaaaaagtcaaatgtcattcttctagccccaaaaattgtttcatattcattctatgtgaatttacttgatattcttttcttaattggctaactaacaaagaattttctcatgaatttgcagttgctttcaagttgtacgatttacgacaaactggattcatcgagcgagaagaagtgagtccatttacggatactttgttttggtaccctccagattaaacagttttactccactaacgtttatgtgtgttgatctaacatgtatataccataatgaattacattttgattagttgaaagagatggtagtagcgcttcttcacgaatccgaactagttctttccgaagatatgattgaagtaatggtggataaggtaatcactcccacaccgatgcacatttgtttactagatattaattccaatactgaagatgatatgataaagaatttataaggaaatggtggtatatatttgcaggctttcgtgcaagcagaccgcaaaaacgacggaaaaatcgatatagatgaatggaaagactttgtatccttgaatccatcgctcatcaagaacatgactttgccatatctaaagtgagttcataatttacaccgtgaccaactttgatccaaaccaactgctttgattgttgcattgaatcaaattgactaatcagaagattcttggtaaatgtagggacataaataggacgtttccaagtttcgtttcatcttgtgaagaggaagaaatggaattgcaaaacgtatcttcctaatataagccatgcaaggaaagataaatatacataaaacgaatatttttgtacaatatcttaaaagaggaagatagagatgtaagctaggatttggaaataaaccgatcttgataacgatattggacttgccttgtgtactgtatatatttagttatttacatagcgactctccatctcacatacataattactaattaaatatttacaaatctagtctattattgcttcattgttgtatataccaaaatatatgatccaccttttgcggatattcatatttttgttacatgaaaatattcgtgttttttttagaataacaataaaaaatttgtacacacatggtttattattgtagataatattaatatatatcaaacgaaattttaaaagtagatgatttatgaaaataatttttgcttattttaattagttcttgagtaaaattatttatacattctagatattaaataatgttgaatttttaattgaataaacactttattatatataaaaattgaaaaacaaagcaagccgaggaatctctctctaatctatctccaagacggaccaaaccagttttagttctatctctcaatctctctgatcagctccatttccaatgtaagcccaccaacttcaactctaatctccatcttcctcttcctcttcaaattcgtttagttcaacaagttcccatctttccagtgtcaatcgacgattcctttttccgttaatacgcatgtatttgattcttattgctgaggaattgaagaaccattttgatcattgttgtacccattgatgtcaaattcaagatataattgattactgtttgttaatcttcgttgacgtgataaagttgactcctttttgtgtagtgcaattcaaaggtaatgaagattcttgttgatggttattttgcagtttgttggaaagtagatacctttgagaatctaaaggatctccctttatg

SEQ ID NO: 818 - DNA, 3000 bp, Unknown
  misc_feature (1)..( 3000): cDNA_ID_2990217_gDNA_ID_1620325_Annot_ID_153471 3000 nt of promoter + ATG
tactatttataacaaggaccaatctgatgattagatagccgataaactaatctcgcatttgtttgctaactaaaaggaaaatggagtctagagacttactggtggaggaaccagaggcagaagcagatgatacaacgccgaggctggtgatggtctcagtgagaccgccgtagacggtgctctttaacaactcaatggcgaatctttctccgtccggttgaatttgtggtggtgattgtgtggtgtttatactcttcctcacatctatatattcttcaactgcatatagtttgcaaattttctttgggtacaaaatatatgtagttctatcgaatattcaaataccaaagataagcctataaacattttttatgatcaaagaaaccgttgttgattttttcccaaattgaaatcaatttgtctagtccggtttaggtgagaggagtaatatttttgtttcaattcacgataacatacctgatttctcaaccggttttcccctgatataatcaagttgtaagaactttgttcctgaaatttaaaatataaaaccagggttgatccatcaagtttacaaaaccaagaaaacctggaaagaattgactcagaaccggtttaattaaggtttgatttacctaaccggatgaagtactttagatcacaaaccaagcaagtaaagatagttccctctttatcttcttgatcatcctcaatccgagtctcagggacataaaccttaactggtgattccatctcctcaatgtcgcttggttcgtccggttcaacaaccggtatatcgggtttcagatccagagatgaattaacgtgcttccctcgttttcttttcttgagaaccacatttctggtgatacatgtgctacagctaggacagtaaagctcgtagttttcttgtgtcgcaagcaaattctctaggtttgacttctcttctgaatctgacgatgatctctcgttcttttcttcatcctcatttccaagctcatagttttcttgtgtcccaagcaacttctctaggtttgacttctcttctgaatccgataatgatctctcgttattttcttcttcctcttctatctcacaatcttctccattccgttgccttttgttctctacatttggcaagtttgtggagctcgactctaaccaattattaccattttcttcgtttgaaccggtttcagattcttcgtttgaaccggtttcgctcacagtactctcaagtactattggatctgaatcggaaaatagcgatgatgtactttcactaacagaattgttacctacgatggcaattaataccaaaaataaacgagagattgatctaccggttaagcaggtttgtgtccggttaaaaattaggatcctaaccaattagtagaggtaccaaaaattaaaagacaaaaaaacatgtaagaaactgacaagttgactaatgtaccttgagcttgagatccatcattatcctcttccaactctatctcggtggtgttgaccggcgccggagccgtcgctgccgccttggatcgaaattctcgggcgggaacattatctttaccaaatctatagctctcaagaagatcaaccaaaaattcagcatcaacgatttctttatctccgtccttcaattcggacaaggttacatgaactggttggtttgacttttccatatcaatccctatgtaatgaatctgattccaatgttctttaaagtgattatgagttaatgaaggagatattatgatttgtgagtctctctctctcttttcttcttttttcttttttaaatttaaaaaaaaaacacagttgttcctaattatcgtgtccaatcatatgatcttttatatatatacataaataatacccacgagggaagcacgaggggttaaatattcgtaacgaggattacttttggattttggtaattagggaaggtgtcatagttaattagcactctatttaaacatgttaatatatgtcagtttcaaaacaaaaaaaaaaaattgtgtggtatagtatatgtcttctttttgtcatcagtatatgtcatgaaattgatccataaggttttagaaaaatgattttaaatgattaaaaaatattagaagtaatacgaaaggtgcaatattgattaaataaatacaaactgtgatagtatgataccacgtaaaataaattactacagaaaatgaatatcacatgataaaaatactagtagtcaactctttaataactcataatgacgaggaaagtgggaaacgttacagttagttggaaacaacgaaccatattcaaaacgtgtatagttaatgacttcttatttattatgaagcccattagacatttgtttcttgggcctatatatttcattcacaataatcggcccataaaattaaccaaaagcccaatccaagtaaatcaccataaagctggaacacataaactggagcccactaatttacacgtggcacaatatgaggctccaatttcggcaagaagtgtgtgatcttttttttactcgttcttgatcttcgcgcttttctgatagatcctcttgggacaataaaaccattaaaatatcggagagtaaattttataaaaccaaaggcaaaaattgcatagatcagaaaatatttgttgcaactattgaaattatttttgttggttcgaaatttttacatatttatgttggttatgactcttatggaaatgataatgtgttttaaggaataaaattaaaattgattctgtttcatactaaaatatcaaacaaaaaaaaaaaatttgttttggcaaagaataaaggttttagtgtactctttctctgtggttaactttaaagttttggaagcatgtcggcgaagctggaaggagattctttacgtagtagataggccacaggtggtttcaatcttccccaacaaccagacgaaatcaaacataaatctgtaacagtcgaagaaactctcactctttaattgatca

SEQ ID NO: 819 - DNA, 3000 bp, Unknown
  misc_feature (1)..( 3000): cDNA_ID_2126738_gDNA_ID_1620325_Annot_ID_153472 3000 nt of promoter + ATG
aattaaattaaagttttaatgaattcagtctagaagcaatacaagtttctgaatttgtgaaattatatatatatttgtttagcagatcacatcctaaaataactaaccattttaaaaaaacttaaaaagttcagaattacagtagagatgattaaaacaatgtgactgcaagtttccaacctactggctgggttataaataatatttacttataatggattcttaatatacatagttttgatatgtttatgtagtttaacgacaatgcgacacatattaatattataatttaacttcttacatatgtttgaaatcagtaaaaccaaaacatgtcttaaaaaaaaaaagagatatatatatatataaaaggttaccaagaacataaagagaaaataaaatataagaaatttaatagtaagtacggaaccctatataaaaataatgaaggaagtctctttagcgatgacgcatcaatatctcttgattaattaattttattctcttcatagaaaaataaatactaagataatacagttttacaaggataacacatcattatctcttagttaattaattttatttctcttgataaataaataaataaataccaaaataataaagtttaaaaattcctttcatcttttatatattggatttgatagccattatgagaaaagtaccaatcagaaatggtgaattaataagttaataatgatgatttcatttcataccagaattggtgggcttaattccttaaaaacaaataatttgatcaagattaatgatagatgtgaatgagtaggagagcagtaacacacaaatgaatgaaacgtgaaatataattaagtccattagacgtgcttaccatattcatatgaatcatacaaactaatctgtcatcgataaaaagaataaataattattctctttttgtttatttttataataatgtttagttgaaatgaaaacgttatcgttagagccacgcacgatcctaaattctctactataagaatatgtatgaatactatatttgtagttcacattcgctttcctaaggtttaccaaccagtttacactgaaaatgtgtacatgacaaattgacaatgattgtttcgttttgtttacgctgtttttttttattattgaaattcaggaggttctaggccgaaaacgtaatccccaaaaacccgaaattatattatgtaatattagtttcgtctcaaacatcactcgaaccgacgacctttaaacttctcctagagtttttaccaattgaattaacgacattataatttatttttcttagaagataaaagtaataatcaataccaaaagccaaataattattcttcgataaaaaaattaatttgaaatgaaaacaacaccaaacgcctaataattattggatgaaaaaacagtattcatacattaattaataagtgaatcatcttacatgtcaaaaaatgttaatggtgtttgtatctatctattcttttcggtgattgattacatcaacaaccatttgaaaattttgacatctttttttctgacatattggatactgccctatttattttgtccaaaacaaaaaaaaaggatactgcccttttttcttctcatagacaaaattaagtatataatttatcaaattttgttagatgattttttttgaataaaagatgatttggttttgaaaaaaaattcaactccatgttaactaacaattcatacaagatgaccaaaaaaaaaaaaaaaatcaaatgaggatttttttttttttttttctgttttttcttggtctttttttatgtcagcactcaattatgtttagagttgacatgtttgaatatatatatttaaaaaatctaaaatagtttaatttgagaaaaagaaagaaataatgaacaaaaaaaaaagagcgagcgttcgttgctccggaaatgatgggcaaaagtgggtaagtgagtgggaaatagaggtctgtgaataccaaacgcttccctttttcttcactttcttccctctaattactctcttgtctctctccctttcctctttcgtctcctacgtgtttaaaccttgcaaaaaatcaagtcttttttggtgtttaaatcacccatttttgtcaatctgtttttcgagcaaaacaccaggaggaaaccaaaaagctagaggctttgtggagtgagaagaagagtctcaggttagtttcttgtattcttctgtgtattctcattatctgtttttttgttctcattcgtcttgtctgcaaaattcagttcacaaaggttgagactttacacgacttggttctctttaaaaccgttttgaggtcataattggtaaacatttgaattgggttttaagagctctgtttatatagtagaagaagttggaacctttcaatgttcttgattaagggttttaggttgaatgtttatagggtttgattttggatgactagtccctttttagattatttacttgaaatggccctttgtctctgtttatatgctatggaacaaaatttgcaattcttgatctcggttggttggaaaatgctaattctttaatcttttatttgtagattttgttaattctttgttgtcttaaaaatagtattgttgaagattcagacaaaaatgtgtttttgtttcagatcaaattgtctggtttctttagagctgtggattctacttcttgtctgtttgttattctttattaagatttagttggcgtgttgttgtttaccttaaacatccacagaatcatatactctttggtttaaattccttaaaatggatttaaaacactctagaccaatattagttgctttagtttcattttgctagcagcttgaaattttcgagtattcttacaaataccatcgctgaagatttgactatttgttttcttcattcttgtttgatcatttcatttccacagtgaaaacagaaagcagcatttgagattccactgttaatctttgaattaaaa

SEQ ID NO: 820 - DNA, 3000 bp, Unknown
  misc_feature (1)..( 3000): cDNA_ID_1007695_gDNA_ID_1620325_Annot_ID_153475 3000 nt of promoter + ATG
taccggaactccattgatgccaaatcggacttttgaaacttacattttcgcgctcttcaatgaaaatctcaaatcgggaccaacgtcggagcgtaatttcggcatcttccgatcagatctgacaccgatttacgacatcggaatcctccggccaacggtaatcaatcaccgccgcaattcacaacattatttagtttcatatatgttaacgaatttgtttttgtgaactgacagtttagatcatcggatccggtttacaatcctcgatcaccggttagaggatcgtcgtcgaagcggtggtgcgtgacaaaggccggtgcagagacggtggctttacaaaggaacattgattacgtatgtgggttgggtttggattgtaggcccattaatgaaggtgggctttgttacttgccgaatacagtgaaagcccattcgaagtacgcaatgaacttgtattaccaaactatggagaaacacgagttcgattgcgatttcgacaacactggagagataactacgattgatcccagtatgaatcattaattaaattataatttagggaaattaactaatttcgttgtattgacttttttttttcttacataatgttttgcaggttatggaaattgtgaatatcaggctaattagtaagttttacactgtaatttgcaataatattcagggttgtttggtcaaatcaacaatatgaagtattggaataatcaatcctagcaaactacacatcatttcgagctgcttttttttttttttttttgttgttgttgttgtaaatattgaagtggaatgtcctttacatacatattaaatagtattgtcctttttatatgcatatgattttggattatgctagtagtattggtcgcgtctataaaagtatgagtgaaactttaaaatttgtatatggtttatacaaaacaaacacaaacctccctcttcatttgggtaacaacgtcgtctcatgcatgtagttttagctttatgatggttgttttgtttaatgaaccggaccaaaaatatgcttctcaaatttggtctaaatagttacaagatattccctcagttttgttttatttttcttttagagttaaaattttgttttcatattacttatggatagtgtatttataatgcagatttataataaattttttagtttgtcatatttttagcttattaattatatatatttaactagattttaacccgcggtatatcgcggggctatatctttttcaaaaaataaaaaaataatttgtttagtagattaaatatatataatttatttttatattttctaaatgtacaactcttatatatatatatatatatatatatatattatttagtatataattactatgtttaatttttactgtttaaaaatataaaaagaataacaaacagtttattaagttaaaatttagattataactaaataattcattttttaattatatttgttttaataatataatgatattttgatttataaatatatatatatataatttcacccgtggtatactgtctcgtattattatcgatccaaagtcgtcatatcatctaatctcgttcagtgaaattaaacatatctaatagatttcacacgtgctatactgtctcgtattacctatcgaccaaaactcgtcataccatctcgtatttttgttttaataatactttactttaaaagatatataattcaaatcaatttaaaagttttatttcaaatggttatttaattgttttaaagttcatatattataaatattctaaacccatcttataatctaatctcaaccgttaaaattaaatattatttttttattttttgttcgaataatagttttattaaaagatttataatcacatcaatttaaaagttttatttcaaatgattatttaatttttatagatttcatatattataaatattataaaacatttttcctaaatattttaaatgtttaattaaatataatatttatcttttaatcaagtatatattaattatgtcctaagatttctcattttttaagtaattgaaattgatggaaatataatagataaggaaatgctacaaattaggaatattaattaattgataataattgatagcaatggcatcttttgtaaataagtttaaacttgaggatttatttgctaaaatggctgcaaaaatgtatatatagataacagtgtattaattaggggtaaaacaataaaaaaattttttttcttaatttgtgtgaaatgaactaaaaggataagtaatataaaacagagggaaacgcgttttaaattccttttaatttggtctcaatagttacaaaatatgtttacttggcgtgaaaagattgcaccaaaccgttttatatcacttatataacaacattcatcaggtagttatgtttgccttttttgagttttaattaaaatcggatgaaaaaagaaaagttacaagataacgttttaaaatgttagtctcaatagttacaagatttaacattaattctttttaatttggtctcagtacttaatattaatggctagatgccaaatgtcatttgaacggaatttaatcaaaagttaaataataaagacgaagaaacaaatctcatattgtctaaaataaaatttcttaaaaatttttttaaacagaatctataactttttattattattttaatctttctagatttagctattgaataccccttcctaaattaaaacatatggattctctcaagagaggaaacaataatggtataacttaattatggagaattcacatattcgtttttgctttgactatattgattgtccatattttagttgattacggattcatctagtcaatgtgatgcgttatcttcataattacgattgactactatatatctctgtcttcgtatatatgtgtatctcaacttatactataaaaatcaattcacatatcaccaaaacaaaacaaaaatg

SEQ ID NO: 821 - DNA, 3000 bp, Unknown
  misc_feature (1)..( 3000): cDNA_ID_3059137_gDNA_ID_1620325_Annot_ID_153470 3000 nt of promoter + ATG
caactatataaaaaccagaagaagagatattacatatacaggtctggaaaaatgtttatgaatttacctgatgagcgaggttatggataatgagaatgcttcttgcatccttataaactccatatgggcgatactttgcggccaaaagtctggaataaaagaagatacacgatataagtttcaatgtccacaaatcaaagcaggattctgcacatccgttaaaagataaagcctagagtataaggtaaagagatcaagaaaaggttacatgggaacaaggccggcatgccagtcattgacaaggaagagtgatttctctccataagtgaaccctccaagaggcagcacgagaggggcttcacatgcagcatggcaaagtaacgtgaaccgaaactgtaatcagaaaatgtgtgagacgacgcacttttgttgttttaagtagaccacatgacttaaaacataacatttacacaataaaagaaagttataattataaaccaaagtctttctttggacaatgtcaacagtagtacctgattgtcaccaaaggctcctttactatctccgtagggattaccaggtctatggtaggatttgtgatcaacaaaaacctaaagacagtttacaaaaacaacacaaaatgttaagcaatggcgtttgtcaaaactccacaataatttatgctagaagagattagtggttacccaatcaacaccatctctatactcatgatagaaggaaacttcttgagaaccaccaaagcaatttactgttacacgtatccccaaatccttagcccgggcatagttcttgtctgcagcagttccatttaagtaccgaggagaaatgaccataacacgatgcccacgaccagctaaagctatcggcaaagaaccacaaacatctcctaatcctcctgttttcgagtaaggagccgcctcggatgtaacgaaaacaaggttattgacaacttcagcttttccactcggaatcccaacctctgcagctccttcttcaacagctctatttccaggtacgccaaagtcagccattacaatttgatcaatagcctctttcttctcttcatgatgtgtaatttctcctgtgctagtgctaactgtttgttgatcacctgtacaaggaaaaatcgagttcatcttcgagattctgagcaaaatcgtgctactttatatcagaattttttgaatatgaaagattctgaaatttgaaaaacgtaatagctttgaatctgaggaccacaagcaaaattcaagagaatcattcactttttacaaattgaaatcacattcgataaaccatcacaaaatccctagattatgcacaaatcagagaataaatcactgttcgttgaggaaattggaagaaacactatgaagaactcaatcacgagtttaacgacatttaccaggaggagtgagctgaaagccaagaacggagccagaaccatctctctctgcgtctgtgataaatctctcttcatcagactcacgagagtcaccggagaaggaagaagaacgacgaagcaacaatgaccgtccgatactgaatctccgtcgaaaacgaggaaatccgagactggcgatcggacggaaatggcggatccggttgaatccaacgaacggctcgaatttaacggagccactgatttgaagagacgccattgatcaattaaagagtgagagtttcttcgactgttacagatttatgtttgatttcgtctggttgttggggaagattgaaaccacctgtggcctatctactacgtaaagaatctccttccagcttcgccgacatgcttccaaaactttaaagttaaccacagagaaagagtacactaaaacctttattctttgccaaaacaaattttttttttttgtttgatattttagtatgaaacagaatcaattttaattttattccttaaaacacattatcatttccataagagtcataaccaacataaatatgtaaaaatttcgaaccaacaaaaataatttcaatagttgcaacaaatattttctgatctatgcaatttttgcctttggttttataaaatttactctccgatattttaatggttttattgtcccaagaggatctatcagaaaagcgcgaagatcaagaacgagtaaaaaaaagatcacacacttcttgccgaaattggagcctcatattgtgccacgtgtaaattagtgggctccagtttatgtgttccagctttatggtgatttacttggattgggcttttggttaattttatgggccgattattgtgaatgaaatatataggcccaagaaacaaatgtctaatgggcttcataataaataagaagtcattaactatacacgttttgaatatggttcgttgtttccaactaactgtaacgtttcccactttcctcgtcattatgagttattaaagagttgactactagtatttttatcatgtgatattcattttctgtagtaatttattttacgtggtatcatactatcacagtttgtatttatttaatcaatattgcacctttcgtattacttctaatattttttaatcatttaaaatcatttttctaaaaccttatggatcaatttcatgacatatactgatgacaaaaagaagacatatactataccacacaattttttttttttgttttgaaactgacatatattaacatgtttaaatagagtgctaattaactatgacaccttccctaattaccaaaatccaaaagtaatcctcgttacgaatatttaacccctcgtgcttccctcgtgggtattatttatgtatatatataaaagatcatatgattggacacgataattaggaacaactgtgttttttttttaaatttaaaaaagaaaaaagaagaaaagagagagagagactcacaaatcataatatctccttcattaactcataatcactttaaagaacattggaatcagattcattacatagggattgatatg

SEQ ID NO: 822 - DNA, 3000 bp, Unknown
  misc_feature (1)..( 3000): cDNA_ID_2126711_gDNA_ID_1620325_Annot_ID_153466 3000 nt of promoter + ATG
catgggaaaggaaaacatatcgttgtgctcgatcaccagatgaagaacttcgttgacattcatgattcagttgattcgcctccgcgggtttctctttgctctctgagtgacggaactgtactcaagattctctacgagcagacatctcctatacagatactgaaaagccttaaactagagcctccagagtttgttcaaatacaagcaaatgacggaaagacaacactgtatggcgcggtttacaaacccgacagttcgaaatttggtcctcctccatataaaacaatgattaacgtttatggaggtcccagcgttcagttggtctatgattcttggattaatacagtcgacatgaggacacagtatctgagaagcagaggcatcttagtttggaaggttctacaaattctttttcttctctcttttttactcaggaaaatgttgaataaggtttactcaaagatgatgctttagaattgaaatgttatcactgatttgtgcagcttgataacagaggaactgcacggcgtgggctgaaatttgaatcttggatgaagcataactgtggatatgttgatgcagaagatcaagtaactggggccaaatggctaatcgagcaaggtctggctaaaccagaccacattggagtgtatggttggagttacggtgggtacctttcagctacactcttgacccgataccctgagatctttaactgcgctgtctcgggtgctcctgttacatcttgggatggctatgactcgttctacacggagaagtacatgggtcttcccacggaggaggagcgctacctaaagagctcggtaatgcaccatgtcgggaacttgaccgataagcagaagctgatgttagtacacggaatgatcgatgagaatgtgcatttcagacacacggctaggcttgtgaacgcgcttgttgaagcgggaaagcggtacgagttgttgatatttcccgatgaacggcatatgccacggaagaagaaagaccggatatatatggaacagaggatttgggagtttatagagaagaacttatgaagatactttcacagaacctgttgttgcttttgctttttgtcacattctttttcatttctttacatggtatataaattatatatcatgcctattgaattggttaacactttttattttacaatcatacatggttcttctcggtttaggtttctattcaattatcattatgaggcttcatgagtctgcctatttcgtgttagaatttttcggttatgttcggttatcaggaatcaaaccaaagcaacccaaaattaaaccgatttagcggttttatagatcggttcgtatcactgatcccaccaaaacgccggtgattgacggatttcgatttttccaacgacgccacgttggtcatcgccatttgtctaacattgactttaatggtgaaaatctgcattttatgctaaatattccattgaccaaaaaattgctaactattccatttacaccaattgtaaacaaagaaatttgacaaatgtattaatttgaaaacgatcaatttcaatttttatagaattcactagcaaaaagtgttgttgtttgaatttggtaatttctagattcgtctgataaaagatttgcgtccgttacggaaacggtatctgccctaccgtgtggagaagttcacggcgttaaagatctcaattaaacttccgtcaaaagtcagcgaggtcaaactctataaatacatccccacaaaattcgccgctgttcaaagaagacttagttaccactgtttctctctctcccttttttttttctttcttctgggaacgctaaaattttctgggggaaataaaattgaagagaggggttttcgaattctcggaaacttggcgagtaagttttatcgaataacaccagttccgattagattcttcgcttcacggatttttattccgaggtattaccatttcttaattttattttctaggtttgttttcgatttctctgaagaattgattaatttcttcttttcgattttcgattttcgattttctcgccggtgtctcttccgatcatggatgatgaattgtatcggtttcgatgatcgggaaatgtgtgtagaaattcgaaatcgggttttgattttggagatttatgtagcgattctctggagatatactcgtttgatgatccgagacttatatttagtgattaaggattgaattattggttttacttcttctttgaatttgtaaaagtgtgagaattagtgtttaaatcttaattttctcataaacctaaattaagattagtaatcagataaagtcttaaaaacttaggccagcctgtttggttttgtgatgattaaaatccgattaagacgttgacttaaaactaattttgtggtggctgttgtttggttatgctttttaagctaattttagctttgaagatttctaattatatatagattgagaacaaaagttttaaaggttatatagtttgctcatgttccaacaaaaaaaaaaaaggttatatagttcatcatctatacaaagaggttggtatttttttaaaaatctttttttttgtgtttgatcataatttttaataccctgaggttaattagaaaatagtgattgttgttgttgatgttccatgactgattcctgtgatcattgtttctctcattcaggttctttgggattgatgtgattacgagatacatttcagctacgataattcgtacgaaagcctaatcatagggggtttagggttgtcttaacttcaatatgaacttttggaaaatattgattggcaagatgtgagttagaaagcttttcagttccagagttcctgaacccgtgcagggacttggtcttttctaaagctcacgggagaagaataagggttgattcctgggatttcagcctttattccctgttgagctctcttcattcccaggaatttaggatagaagtgtacagttggaatg

SEQ ID NO: 823 - DNA, 3000 bp, Unknown
  misc_feature (1)..( 3000): cDNA_ID_2126896_gDNA_ID_1620326_Annot_ID_153490 3000 nt of promoter + ATG
tattcataaacatagaaggagtatttaacaacagtaggtaaaatggtaacattctgattcgggtaaactgggtttaccttttttcattctttggtacaagggatggtttggcatcctagttaagagataagaaaataatcatagttatccataattgaaatcgtaatgagaagacttaaattctgatcttttattcaaaatgaatcagtcatccactagaccaccattaattattttgtaagaataaagtttgttacgcatgatttatagtggattcttgggatttcctaacatgatattaggcagttacacttacacatatctactggttaaatcccttatgtaataaaaaaaaatctcgagttcaaaaacttgaggtcttttccaaacattgatttttgggtgatttgcagaaatgatcatgtttgataatctatttaagaatataacactttaatatgtaaaactaagtaaataacagtagaaagggatgaaaagtcaagtaactccttgttaaaatatgagaatacgctcgtgaaaagagaagaaaagtgacgtgatctttcacactcttttcggttaatggacattcataaaaagacaaaagtgttggctagcgtgatggtggcgaagatggcgatgatggtaatagtaacaatgacagtaccgatggtgatggtgacgacaacagtggcggtgccgatggtaatagtgatgataacagtggcggtgccggtgacgatagtgagacaacagtggcggtgccggtggcgatggtgacgacaacagtggcggtgctggtggtgatggtgacggcaacaatggcggtgtcagtggcgatggtgacgacaatggcggtgccggtaacgaaaagataagtacaaatatatattgatctaagaaaactaaaccttaagatactatacatggaactcaaacaaaaatcattaaacgaaatgaaatcatctcaagtttcaattttcaaaaatctagcagcaaaatagaatagtacaatggtgacgatggcttcggtgacgattttccggtgatgatggctccggtgacgatttttcggcggtggtggcttcggatacgattttccggcgacaatggctttaaaggtagtggtggttgtggtggtagtggaagaaaaaaagaaagaagagagaagatgttcatgcagaagaaagaagaagaagatggtataattgtatttattacatataatatacataatatcaccttatggtttttgaagtgttagtttccaaattactaaatttttttaggttatacttacaaatttcccttgattttatccaacgtcggtgccatatacaatcgttgttaccagatgatgtatgttagtaacttactaacgtttgagcacaaaaatatcatctaagaaatatatggatatttaaagataaagttgttatatataattaggggtgtcaaaataggtaacccaactcaactcaactcataatcaaatgagtttagggttaaatgagttatgggttaatccaactcattttgttaaatgggttgggtcaacccataactcatttaatttgataggttgagttgttaaatgggttaacccatttaaataataatttaattaattattattataaaacaataataaaaattatcattattaataattattaattcattatcatcaaacttagaatatttacagattctaccgtttacggatttacgtttttggcggaaaaattacgggtttacgtttttagcgagaaaatcacgggtttacgtttttggcgggaaaatcacaggttttcgtttttggcagaaaaatcacgggttttcgtttttagcgggaaaatcacgggtttacgtttttggcgggaaaatcacgggttttcgtttttggcggaaaaatcacgggttttcgtttttgactggaaaattacatgtttttcgtttttggcgggaaaatcacgggtttacgtttttggcgagaaaataacgggtttttgtttttggctggaaaattacatgtttttcgtttttggcgggaaaatcacaggttttcgtttttggcgggaaaatcacgggttttcatttttggcgggaaaatcacgggttttcgtttttgacggaaaaatcatggttttcatttttggcgggaacatcacgggtttacgttttttgcggaaaaatcaaggatttacgtttttggcgggaaaatcacgggtttatgttttttggtggaaaaattacgagtttactttttctcaattcatcgcttgtatatttaagaaatttggaaaaatattgattttattagattggtttagatgtgttggttaaacttaaattggcattggtttaaagattttagttggtttaattcaattttacaaaacttgataggttaattgggtaaaccattgaaaacattaaccattataactcaactcattttattcatcaaaccaattgatccaataattcatttgacccatcaactcatttgagtcaaaaaatttaactcattagtgttcaggggttaagtaaagttgagttgacccataaattttgatccattttgacacccctatatataatacgtacaattcaaaaatataaagtctagtttttttttttttcgtatatggatacttcaatagtagttttttttttaataattattacttgaatagttttagattttaaatcatttactttatcactatttgtcgaagtgtgtattttcctagctatcttcccaaaaagaattaattaataaattacgagcacaataccaattttttcgcagttctgaaaatactgtaacccaaatattcgaatctacacagtctcaaaaaacgaaaaggttcatataaaatattaattccttaacggctatatttttctccttcttccattttttttctttctcaattgatatatccaacgacaacaaaaacaaccaacaagaattagttcgtcgagttcacaaaa

SEQ ID NO: 824 - DNA, 3000 bp, Unknown
  misc_feature (1)..( 3000): cDNA_ID_2126949_gDNA_ID_1620326_Annot_ID_153508 3000 nt of promoter + ATG
aaggtaatgggtgaacctcaattatttgatgtgccagtgctagaaggtatcaaaaatacaaccaacgaaatcatgaatcaacttgaagatgataagatgaaaaaaacttatgagaataaaaaggaggcgagcacaagcaaatatttgaagaaaagtgacatcaccaaaaaaagatggacagaatctgaggacatgtaagtcttcattttttttttattctcaaataaatttaaaaactattattcaatttcctccttgggaattctcatataacttttttttattgtatgccttttattttattttttgaggatgtgaaaatatattgtaatgtatatagaaaattgaaagagatggtggcacttgaacccaaaaaatggacaaaggtcgcaaaacattttgaaggacgaacaccaaaacaatgcagagagaggtggcataaccatgctcgtcctaacgttaaggtgttcttttctttcatctgcctatattcttattttcataatttaatataaatgatcatcacagcttatatgtgtgtgaaagcaactacgttcttacaatgttcacgcacacatgtatagagtatagattgaaattcatatagttgaatagtagtgtggctaacgatttaatcacaacaattttaaaaatttatatttaggagttacatgtgatacttacaaataatctcatcatggatacaaaatacattggcaaattttgttttctcatagttattacgaggggttattaaaacgtgcatctttatagtttgtatcttgcttccatcaataaaagtgtcatatacatacaataataagagaatgatttacgtatatgtgatttcagaaaactacttggagtgaagaagaagatcaaatactaattgaagtacacaaagtaattggtgccaaatggatccagatctcagagcaacttccggggaggagctataacaatgttaagaaccattggaataccacaaagcgtcgggtgcaaaataaaagtggtcgaactgtcaaccgtgtcggcaataacatccttgaaaactacataaggagtatcacaatcaacaacgatgatgaatctgatggtgaaccgacaaacattgagaattatcatgatgactctgaagatatgttatatggggagatgaatttgagtccagaggctataacgcagaccaccaaaccattgaccgatgcttctacaatatcaccttatattccgatgccaaaagaaaactatactctggaggtttgtgaatcactggaggactatctagagctgctgcgttggtgggattaatttccagtgaaggaaatttctttgataatatgatattttctcactatcgtgtgagatatctatctatctatttctttttaaattaagcaaattttaatttacaccgttttggtgtatatctctatctatctattatacaagaactatataagttatgttacagtggtgtactattttaagtgagtgacatagtattttcttcatatggttaattaatcaacaacaatttcccagcttactatctatatgtgtactttaaacttatattgatagagaactacaaaattatgtttttgtacaagagaatttggtcttcggatcaataatttctctaaatataatttgtaaagccaaccctataatttgtaaaatccatgtattacacaccaaaaaattcaaaagataatcatgatttgttataattttctttttttaattgtgaattgacagacaaaaaaaacattacattgtgatttaaattcaagactttgacttgttaaggaaacaccatgattcattattttttcttcatttgttacattgtcactagaaatatttgatctaattttattatgataatagactacatacaacatatgcgattacgattttgacatgtaatctattttaagagtatttaacatttaagcgtgttgaagttataacaatatcatataaaatgacatatctaaaagtgattttcaatattatgcgatcgattttggctaaaacttataaaaaaactcatgggaatctttaaaattagaaatcaagtctttttaataacccgaagtatagtgaatcaactgcggaacaaaagtggatttacatcaagcatgtgtgtgaaaccacatacaaggttaatagtacgttagccgtgagccgagtccaaacgaatacgaattgctacttctagctagggatgattgttttgatatgcaataagaacgttcctttcggtatacgaaagtgattgtaatactccgagttgaaagaagttttgattaggaaatgaatctgagtttggatgctagaatagaatctgccgcaccgttagtgtttagttgatgtctctacatgactacatcatctttgtgaactaatatatagtaatggggattggattggcacaaaactttatttacggaatcattttcttaatttgatactaaaagttcgaaatcgaaattttgaaatccaaatgtggtgcaaaactacatcgtcctatcttcgatttcccatcttcttttataatttaacatggataattcaaaagctattgtctagattacatattttggattcgttagtcacataaccaaaaatgaaactcttttgatgaattatgtattttcaaatttgtattggagatccttttagacttcggactcaagtatacatgcataggatagttttcttttgtcttgctttaaattcgtgtcagcggagaaagcgaaaacatcttttaaaatctcatgaaatgaaataaaataaaataaaaactaaaagaagaaaaaagttgaaacttggaaatcatgcaaagccacacctctactactctaacatctcaccgtcttatgtgtcctcttctcatctctccaacttcttctttaaataaaccttctccaaacttttctagttttattacaaagaaaataggtaaaaacaatttctcattagcttacaatg

SEQ ID NO: 825 - DNA, 3000 bp, Unknown
  misc_feature (1)..( 3000): cDNA_ID_2126945_gDNA_ID_1620326_Annot_ID_153507 3000 nt of promoter + ATG
gttccgtatgtaaacatatatatacttcacctaaacggaattcttaaccgatgtgggacaaatacttattccttttcttcaaaacctctcccctccactgcctctgtctctctgttttcgctcagatttatgaagaatctcgtttcaaaccttcgatttttctcctcttattcttcttcgatagttccgcgatgtagtaacatacctaaaccaattctcaatcctctctacaatttacttccccagtctcaaaaccctagtaaaatcgtggatgttatctgttcaacactcaaccacagtgattattccgtcttgttacctaaccttcgtgacgaggtgaaatcgctgattcctcatttgggttatcctgaaatctcgagggttttgcttaggtttcagtctgatgcttctcgagctattacgttctttaaatgggttaaatttgatttggggaagaggcctaatgttggtaactactgtttgttgcttcacattcttgtgtcttctaagaagtttcctttagctatgcagtttctctgtgaattgattgaattgacatctaagaaagaagaagtggatgtgttcagagttttggtttctgctactgatgaatgtaattgggatcctgttgtttttgatatgcttgtgaaaggttatctgaaattgggtttggtagaagaagggtttagggtttttagagaggtgcttgattccggttttagtgttagtgttgttacttgtaatcatctactgaatgggttgttgaagttggatttgatggaggattgttggcaagtgtatagtgtgatgtgtagagttggaatccatcccaatacgtatacgttcaacattcttactaatgtgttctgcaacgattcaaattttcgtgaagttgatgactttttggagaagatggaagaagaaggttttgagcctgatttggttacttataatacgttagtgagtagttattgtagaagaggaaggttgaaagaagcgttttatctgtataagatcatgtataggcgtcgtgttgtgcctgatttagttacttatacatcgcttatcaaaggtctttgtaaagacgggagagttagagaagctcatcagacttttcacaggatggtagacagaggaattaagcctgattgcatgtcttacaatactcttatttatgcttattgcaaagaaggaatgatgcaacaatcgaagaagctgttacatgaaatgcttgggaatagcgttgttcccgacaggtttacttgtaaggttatagttgaaggatttgtgagagaaggacggttactttctgctgttaattttgttgtcgagcttagaaggttaaaggttgatatcccatttgaagtttgcgactttctgatagtaagtttatgccaggaaggtaaaccatttgcagcaaagcatctattagatcgaattatcgaagaggaaggtcacgaggctaaaccagagacttacaataacttaattgagtctttgtcccgttgtgatgctatagaggaggcattggttctaaaaggcaaactcaaaaaccagaatcaagtacttgatgccaagacataccgagctcttataggctgcttgtgtaggattggtaggaaccgtgaagccgagtctttgatggcagaaatgtttgattctgaagtgaaaccggattcatttatatgcggggctttggtttatggatactgcaaggaattggatttcgataaagctgagagactattgagtttgtttgctatggagtttagaatctttgacccagagagttacaattcgcttgttaaggctgtttgtgaaacgggatgtggatataagaaagcgttagagcttcaagaaagaatgcaaagactcgggtttgttccaaacaggttaacttgtaagtacttgatccaagtgttggaacagccttctttgcccaatcatctgcctgagaattgaagcaacgcttgatgcgatgaaatttgtattccttaatcttggccagatgcgtaacttaaagaaaatacaaacttagaggatgagtactgcggatcgttttaagtggtggtgaagtctgtaggatctcgcacaaagggtccagtacttgcttagcatcctggaggaaaatgttgtccttataattcagtgccaagagcatttgcctcagcttttgctgctttgtttgctgttgaaagcttacctcgactccaaaacacaagtcttctctgttgatcaaacaagagccaagcaatgccgatcggtgtgttcttattgatacaggatgcatccagataacaggtttattgagttagttggaactaaaggatgcacctgaaacggttgcagattgccacaattttgtattctgtagtaattgtaagagtttgagaatgattgtctattggaccccttgtcttgtgtcttgtggtttcgttctttccatggatgtgaagttaaagtaaactttgtgtagttgcagcagtttctttgtaactctatgaaacttctccaagcaatttctttgtaactctattactttgtgctctgaaaaagtcactcttaccaaaagagggtagaatcgatattaaccaaaggaccgtgtctaaaaccaaattaaatgttacattggcaaataaatacaagttccagaaagagtctataaactaattgctaaaccgggaaaaatttctgcttctaactctttagcgttgagtttataggccgacgaatcaggttaaaaattctctctttatcaaattatgaggtttggatctgtaattttgtgagcttttaagcttgcacaccaagtgcttgctaaaatgtccaagtgagctcttttaggaattcagtgaatcaaatgaagttttaggtgacaaaagtcaaaagattttaaatgccactgcttaatgagatcaatcagctcagctattttatatagattgagatctttcattcgtgaaaatggatgcaggtgtataggaagatcattttatagtc

SEQ ID NO: 826 - DNA, 3000 bp, Unknown
  misc_feature (1)..( 3000): cDNA_ID_2126961_gDNA_ID_1620326_Annot_ID_153511 3000 nt of promoter + ATG
agtaacgttcgtattttcagaaataacatattttatattcctttaaaaaacaaagattatagtaaagaacattaaattaactaataactactctacttttccatagaatactaaattcctacgctttctattaatctttagtgtttttaccgctaaagatatcactatatcactttgtcaaaaaatctcaattttccatacatacaaaaagattatgtttagaagtcatcaaatccataatttggttcacttaaatacaagttggtgattatttgattttgttcgatttaatgtcattttggtttcattttgttttctaaaatcagttcagtgttggttaaaataatataaaatacttctaaataataattcaaccataattatataaaagcaagaaaaaaaattctgaaattaaatttcaaattattctaggcatgttctccaatgtggctgcatccgtcttgttggttcaagatgagtgctcttctgttaggtcctctatctaaacatcttcaactccatttcgtggatcgatcacccaatccttcccagctgatccgtattttagtggtccttgtcgccgacgagaagtttagtctagtttctccatggtttgtgtagctattgagatgttaactctcatgctttcagcctccttttcgctgtctctatttgagctgctcatgtctccacactacctatgaagtccgatctctacgactttggtgtgagctaccccctcagacctccagatccgccccctcaggccccaagttgaccattcgttccaatttgtgggagttttctccggtgttatgacctatggtccttccttttctaccacctcacctagcagcatctcctccattcacccttgtttggataatgatctttgtgtcttccacttgcctccttgcgatctattattgttgtgtgcagttcatggtactaaatctttcctctagcgcatatgtgcaattaactggatacttctctggtttatctttgtttgcatttcaggctagtctactttgtttctaatctagaatcacctttgttagtttattttctgtccaaatttggcagagtttgttcaccgaatacttctttagaatcttcgtgtctagggttaagaaaaatcaaacttttgcctagatccatcaaaatttgctcaccctatacatctccagcgtctccatgcatatgtctacggttgatccttcttgggtgcatcatcagagatcctttcatggtgcaacgaccacctccgcctcactgttgaatgaatgggagagaatgagtattattttcgtccttcatctatggtggagaaatatctctgattttgaaaacaaattagaaccgaagagactttgcacaagttttaaacagttttggacactaacgattatatgctaacaaaatatataattagtaaattttaagttttgaatataatttacgaatattttttaatccatgaaaaactttaaagaaaatatcttatgttgacttgacactttatgagtctaattaaaaatgtacatacaagtaacatcataagtaatttgattccagaacatcaagaaccaggtttcaggtttcacactttcgcccatcatgaaaagtggacaaaaatcaaatattttatttggcatgttttgctttgattctttttgaatgaatgttattcatcctaaaacatattttgtataataaatgtaaccttatacttttttccgccaatgtaaccttatgctaaaagttcagaacgtttataaataaaaagacaccaaagacaaacagtagggccttcaagcaccaaagacaaacactagggccttcaccaaaccaaattcttaagacatcctcgaatttggttgtggtttccttttgacttgaaagtctgttctagagttcggacgatacgctcaatgaaagaagacatgagtgaaggagacaagttttgttccccatgtctacgtctaggtttatttctttcggaccatatggaatgcacacaaacttggaacacataccgtacgaggtagtaaactgacttttatgttaaagatggtttatgtaattatgttactttaattgttaaatagtttttacgtttccatgaattggatcaaacgtaatcaagtaaaaaaaaaaacctatacttataatccttccttgtttcatttgatttccttgcctttaaaccacaatattatttcttttgagtttcattgatggtgtctcaattgtaaattggggtttagggacattatacagatggttgtaaattcctggaactgactgagaaaaaataaacttatgggcctggaggagatagttgttgggccacttcttaatatatattggcccacgaaaacacaattaactcttcgtttcaaatttacaaactaaacttcgtgctatctaatacttttaaaacggcacgtaatttagttttcaaaacatagaacgacacagggttattgtcggagttgcttcttcagagagaaacattagagaggggtgttcatcttccacatctcaaggagacacccaaaaagaaaaaccaaacctttgaagaacgaaaagggttattaaaaaagcaacaaactttgagagtaacaaaggtaagtttttatctgtaattctaagagttatatcattttggttttgtatgatttttttgaatttgtgaatttgatccgttgatttaattctgaattttctacgattagttcactgttatgttttgtgaattataactgttttattgactaatcacgactttgaatccaattctattgaagggctataagaaaaactgaaattaatttatagaaacttgaaaattttggggacttttcatgttttgttaagtaagaaatcttcttttttagctaaattagtttcttctaaatagaaagttttcgaatttagaaaaaggttggggttttttcattgactcttgtctgtgttacagaaaaagtagttatc

SEQ ID NO: 827 - DNA, 3000 bp, Unknown
  misc_feature (1)..( 3000): cDNA_ID_2126979_gDNA_ID_1620326_Annot_ID_153496 3000 nt of promoter + ATG
tttagatttttatttcaaaattttcatgaacagttaggttaaaatttgtattagtattattttaagttactcaaatggtactacaattgagtacctttttatatacctaaagtttatagtatgcttgggtttggtataagttttgtaaatcaatacatacaatatattattttaatttaggaaaattttctaactgctcatcaaaccatgcatgacacatgaatacatatcaggctctcaagagagtggaaactatattaagcaaaattggacggagaaacctttttgttgtttgatcatgccattgccatacatgcttatttcggtgaatgttatgtgtcaaagaagctaacttgtcataccatgaatatcagtgttatgttccatctgtcaaaagcactatgcagccgatggcctcagctattcgacaatggggtctacgaacatgtattctctctgaataccaattcaattcatatatatctagtaaaagaggatgagttggtggacttaagtcccactctcacacccacacacacatctatgatacttaaaagatctaaacctgatcatattaaaggttctctctctctttctattatgttcacctctatgcaaagtcattctgcaaatttatagtaaatgcctcttaaaaaaaactcttgtttgttccaacaaaactaatccgaaattctagctatctactaagcgcactaataagcagtttaatcctgaccctttctaaaattttaccatatttttctccccaaaatttctagctatatgaccatatgcatgatcagtgttggagagtctacaagactaatcctcatttctcctttcaaaaatttcttcacttactactgtttccagtccacgtccacactcgcatccccgtcaatcaaaatgcacactattcttgagagctttttctgttctcagcaagaaaggttagtcaatgtgctcctcttccaaataataagtcacagtaacgcaccaatcctgctagcccgtggggagagagttatttacacccattggccaaattgttccccctttatccactaaaatccatcaaaacaaaaaaaaagatccatcaacactaagtcaaaaactcagtgagattattgtgtgaaaacataacaataacgttcaagattcaaagtaggcatgatgcatattgaaccgaaaccctaaagtagaaaattgacatgtgtaaggcgtagatcacgtgatagataatgattactctatggttagagcttttacccaattcctgagtgtttccgtgtctcgtaaaagtgtatggtgtgacaggtgattgttgtgtatattttatgtgtaagatcttggtatttgcgatgagtttggctgttgtgaattaaaaatatatggaatgtcattataatttccctgactataaaagaacccttctcttttatatctcttacacttgatgcgttaccatgtacattagcaaaatgtttcgtggtgcgaacgagcattgttttaataactacatctactgtcataatctcatttttttgagatcaaataaaccacagatatagaataagcaaatgatatcttcgaaaaaagagataagataagagctttgctaagaaacagagcagtctggaaaaagaagcaaagtaaaaatgatattttagacatgaaaaaaaaaaaactggcctttacattttatgagttatttttgtaattaaacccttaaaaagataatcacaactaaagccatgcatgccaaagttattagagtaagaattttctaactatattgagagatttttttttggcgcgtaccaaatatatatatatgaattgtgttagatatcacataatctcttagagcacttccattttataagagtttctcaaagaaaaaagaaaaaacgtttgattatataattatttttttatttttatattctaatagctaaatgacgagtgtgataaacgtttctcatttcagaaccgtttctccttctcatatagaataacttataagcccaactccattttaaaaaaaaaaaaagagcattgggatgctcatatttaaagacaactagagcactagctaggggaaatatataggacaagtttgataacgatgtaattggagatttgaaggtttatgtgcttagtgtgaaggagactccgatccgattaagtaggagtgtctcgaagcctttcggatagagatcatagatatatagggtttattctcaagtctcaagtctgttgatgccaaagtcacgtggaagacacaggaggatatattaaggtcgattctcttacacagctttgttatgttttctcttcccctttagataactcgtctttaattagttttctcagtaatttttcttcatttcagttgatttatccggttatcggataataagagaaacgtgcaagttggctgattgaggataaaacctcacactaaaccatatactttcccctatattaagcattatgaagcgttatctattagatctttaaaaaatctgcacacatccatttgaactatatattaaaatatggcttggaataagtattttggttcagatcgaatcaaattgcaatccaagaatgattatacaatcttacacatacatgttaaattatatgcatgtagaaagaaaatagaactatatatataatatgatcatagttaggtcttgaagctgcactagctccccatgtgttatgaaaatttataaaataaagtaaaaacgacaatatgtgtcgctaattagtatctaaaagacatttaagattttggattaaaggttattaacaatgccttaaactcttgaaaaaccttctctataaaagcagtagctacctgcccaccacctcaaaatatcaactctctctctcactttcacaactctccctttctatttctctctctagaaaaatatcatcatctatcaattatatagagtacttatttagattcatttcataaaaatg

SEQ ID NO: 828 - DNA, 3000 bp, Unknown
  misc_feature (1)..( 3000): cDNA_ID_3059181_gDNA_ID_1620326_Annot_ID_153498 3000 nt of promoter + ATG
agaaaggtttatatatatatactatatagttatatgacaattgacattaggaccggccacagtatttgttatatcgttttattacataattcgtttttatatgattcaagaaattcgaataatactgaacaagtgaatatgattgataccaaaagtccatatttgtaaaaagcagaacatattacaaacaaaagactatatatttagattttgatagaactttttttaattcttgattaattaattacaaaactactattcattctaagatattaactaaaaaaaaaagtggattatgaaatgaatatcaaaattttaccttggttaatttttttttttttttcatttgtaaagttttcatcgttgtggcgaaatagattggacgaattatgacccagcatcaaatatttaactaattaagttccaacggataaaaagaaagaagagattacgttgatccagaaaaaaacagagcggtcaccaataggggaaaacagtacgtttcgtttcttgctatagcgtaatatatagagcttcacaatttgaatgcatataatcactcttttaagtaaaaaaaaacatctatttgaatgaattaattgatgatgtgatctaaacgaatggatacagataaacgatagagacatggatgatggatcatgatagagaatcctggagttaaggcgatgtgaaaacgtgtacagttgtaagagtaatagtattgactacaaaattagtgtgagatcatacttcagacattcatactgatttaattgtattgagaacgaaatttgtaatggtttttttggatcatggaaaatttcagggaaaaaatccatttacagattattattttttgtttttttcttaaagttgttattaagattctatttttaaaaaaacattgttacgagttgtgtatgaactattaatcaataaaccatagcataatatttcaaatacaaaagtgtcctgatcagaaatcaataaatgggcggtcctaatttatgcgtcggtggctaactcgttaagaaggtggggtaaggttaggttgggtgcagctaaattcaataatcatcgcctcaattactgactcgattcgtactcatcggatgatcggaatacaacgttacatatgatttttggagtcaaatatataaatgttgtctagaggtttgagacacaaatattgaaaacaataagacttaatcaacctaagttgttttttgtttctttttcttttttttgttgttctagtgttatttatgacttataatgtgtatctattaaagtttcataatataaaatatcctacagtttcataatcaacatagaatagtatttaaatctgttttaaaaagttaattagggccaagaatttattaattctttagacctacggctttaggccacaccaaagtactgataagtctcgttgcaacattaaattccatcacaaattacttcgtttttctagtacaacaaatcaatggacccaaccacaaatagtttttcttgaacgaacatttagcttaagaactctacaccacacgttaaggatataaatctactaaggaaaaactaattgatcaaattgatttttagtgtttgcatggacgtcttaaactatttgtaagttgtaacttcgtttcaatttttttaatagtatgtggtaaatgtttataaaatggtttcattaactaagaactaaatggaaacaatgtttgggtcataactaaggccttacaaaaaaaaaacaatgaacaaaaccaacaactaagactaaagactgatcgaaattaatatttttactaaggtcaattccgggctacgtttgctatatttgatatttgatttaaagtttgttcacgtagattcattttagttttaagtttacattggaaaaaatcatatgataagtttttttattaacacatgatcatatgatatcttgtaagtaaaattgttttggtgttattcgtgtcaatctctcaaaatattactatatatatgtggaaatttagaaacataaaaagttcaaaaatgcttacatgacgaaacatataatctgaaagattgatttctatcacagcctaattaatttgatacttatatcttttttttttttttttttttttttttttttatacttattttttgtcaatccatatcttatatcatttaaacaatgtttagagaatagtttttgccagaaaatcagctatgcagtttggagatatgggacaaacgtacaattacaaaagtttagagaactagcaagtaagaaaatatcagataaaataccatatatggatctctacattgggtgatcgtaaattgatggccttgattgatatttgacaatcagatttcataatcaccggttgagtgcccaagcatatgattgaggtaagagctgtacgaacaccagagatttcgcgagaaacagagacaatacatatttacttgaagcagagtatttttagaaggatctcgttgccttaaagagaatggtccattctatcctagtaatttggtggagagaaaaattttgacggaaactatttttttgggtgaaaataaatttttgtaattttagtttctaattacatgttttcattaaataaaagataatttaatcattaaattcgtgaaaaaattgaaaaaagtatttttataaatcccgcttacaaaaatcagctgttcttgaattagcaaagatttccaatttaaacgtgccagacattcaccaacctgacgatcgaaaaatgatagaaacaaggcccaataaagcccattaaacaaatctaacgtttgttttattttgaaccttgatgactttttgacttttgactcggtttacaaatatcatccatttagcgtttttataaagccgactgattcgcttctcttactacttcaatttcatttctttctcctcaaaatatcagatcgataaccaacaagcgaaactagggttctctaatctcgacgaagatg

SEQ ID NO: 829 - DNA, 3000 bp, Unknown
  misc_feature (1)..( 3000): cDNA_ID_3059173_gDNA_ID_1620326_Annot_ID_153500 3000 nt of promoter + ATG
ttttgtaattgtacgtttgtcccatatctccaaactgcatagctgattttctggcaaaaactattctctaaacattgtttaaatgatataagatatggattgacaaaaaataagtataaaaaaaaaaaaaaaaaaaaaaaaaaaaaagatataagtatcaaattaattaggctgtgatagaaatcaatctttcagattatatgtttcgtcatgtaagcatttttgaactttttatgtttctaaatttccacatatatatagtaatattttgagagattgacacgaataacaccaaaacaattttacttacaagatatcatatgatcatgtgttaataaaaaaacttatcatatgattttttccaatgtaaacttaaaactaaaatgaatctacgtgaacaaactttaaatcaaatatcaaatatagcaaacgtagcccggaattgaccttagtaaaaatattaatttcgatcagtctttagtcttagttgttggttttgttcattgttttttttttgtaaggccttagttatgacccaaacattgtttccatttagttcttagttaatgaaaccattttataaacatttaccacatactattaaaaaaattgaaacgaagttacaacttacaaatagtttaagacgtccatgcaaacactaaaaatcaatttgatcaattagtttttccttagtagatttatatccttaacgtgtggtgtagagttcttaagctaaatgttcgttcaagaaaaactatttgtggttgggtccattgatttgttgtactagaaaaacgaagtaatttgtgatggaatttaatgttgcaacgagacttatcagtactttggtgtggcctaaagccgtaggtctaaagaattaataaattcttggccctaattaactttttaaaacagatttaaatactattctatgttgattatgaaactgtaggatattttatattatgaaactttaatagatacacattataagtcataaataacactagaacaacaaaaaaaagaaaaagaaacaaaaaacaacttaggttgattaagtcttattgttttcaatatttgtgtctcaaacctctagacaacatttatatatttgactccaaaaatcatatgtaacgttgtattccgatcatccgatgagtacgaatcgagtcagtaattgaggcgatgattattgaatttagctgcacccaacctaaccttaccccaccttcttaacgagttagccaccgacgcataaattaggaccgcccatttattgatttctgatcaggacacttttgtatttgaaatattatgctatggtttattgattaatagttcatacacaactcgtaacaatgtttttttaaaaatagaatcttaataacaactttaagaaaaaaacaaaaaataataatctgtaaatggattttttccctgaaattttccatgatccaaaaaaaccattacaaatttcgttctcaatacaattaaatcagtatgaatgtctgaagtatgatctcacactaattttgtagtcaatactattactcttacaactgtacacgttttcacatcgccttaactccaggattctctatcatgatccatcatccatgtctctatcgtttatctgtatccattcgtttagatcacatcatcaattaattcattcaaatagatgtttttttttacttaaaagagtgattatatgcattcaaattgtgaagctctatatattacgctatagcaagaaacgaaacgtactgttttcccctattggtgaccgctctgtttttttctggatcaacgtaatctcttctttctttttatccgttggaacttaattagttaaatatttgatgctgggtcataattcgtccaatctatttcgccacaacgatgaaaactttacaaatgaaaaaaaaaaaaaaattaaccaaggtaaaattttgatattcatttcataatccacttttttttttagttaatatcttagaatgaatagtagttttgtaattaattaatcaagaattaaaaaaagttctatcaaaatctaaatatatagtcttttgtttgtaatatgttctgctttttacaaatatggacttttggtatcaatcatattcacttgttcagtattattcgaatttcttgaatcatataaaaacgaattatgtaataaaacgatataacaaatactgtggccggtcctaatgtcaattgtcatataactatatagtatatatatataaacctttctgcaaatacaatcctatatttaaataccaacatccacaagataagtaaaaacagaaaaaaaaactttaaaaaatgcgttgcctcacaaaaacaagatcgtttcattatgtcatcattttttattccttcttctttttaccgttcttgtcgtcctcctccgacgatcaaagaaccaccgtctccggtcttttctgtggcggacgtagcaaatcctccgcagatccaaactacatcccaactttcgtcgaagatatgcattcactatctctaaaactaactacacgccgtttcgcaactgaatcattaaactccactacatctatctacgctctgatccaatgccacgacgatctctcaccgtccgattgtcagctctgttacgcgattgcacgcacccgcatccctcgttgtctcccttcttcctccgcaagaatcttcctcgacggttgtttcctccgttacgaaacttacgagttttacgatgaatcagtctccgatgcgtcggatagtttttcttgtagcaacgacaccgttttggatcctcggttcgggtttcaagtttcggaaactgcggcgagagtcgcggttagaaaaggagggtttggagtcgccggagagaatggagtacacgctcttgctcagtgttgggagagtttggggaaagaagattgtagggtttgtttggagaaagctgttaaagaagtgaaacgctgcgtttcgaggagagaaggaagagct

SEQ ID NO: 830 - DNA, 3000 bp, Unknown
  misc_feature (1)..( 3000): cDNA_ID_3059167_gDNA_ID_1620326_Annot_ID_153505 3000 nt of promoter + ATG
aatttaaacaattaaataattttttttattgaaaatttaattattttttaattaccctttaattaggtaggtgcagctactttttttcttttccttctttttctctgtgaagctactcgttgattgtactaaaaagtgtaaaataatactctgtttagtcggtgcaagaaatagaaatgtaactgcttcagacgaccgttggatttctttattcatcagttttttgattaagcgttggcttatttttaacaactccacgtgcaattctcttataaacaaatggttatccaaacgcaaattccttgaccaaatctttttggtcggtttgtttattacaaaaaaagaaatagacaagatcaagggaattagatagtacgtggcataatcccccgttggtcctttgaatgttcttacttagctctggagtgacaattcaaatcctttgcataagtcacctcactaacatctctggtcacatgaacgaactcttatttacaaagcagggtctctctcatcatttttttttaaatgacaatgcatatgtggtctctgttcggtcgattacatttgaccaagtgagtgttcatctttgtaatcatgttggcattcaatcccgagtctcttccatcatcataaactatatcaaacaaactaacaatgatcaagcattattttttctctcttttttctgggtttatattgatattgaaacacaattactaaaagtattatatattaaaaagattttttgtatttatcagttaaactaaaaacctaaaatgctcatttctttagttgaaatagtgtttaccagttgcaataaaaatataaaattaaaccaaagtttcaaggttttattttttaatgagttaatctttcgagattctataaattaatatttattagtttgtagatatatttacgcaaaatacagtactatgttatttttagattttttttttattaaaacttttttaggttttgttctttgcatatttagttatgttttttttacttctttaatttctttttctccaacatattatgttaacgtagatacgaggcttaattcaatttttctttacataaatctaagcaatgacttttcatctacaaagttttttaaaatcaactataactgatcaaatacgtaaagagttatgtgaatacaaaagaaatcatatcaattgtactcaaaaggagttataattgttgattgaacagaagttatatacaaaatttagtcacacaatctgaaacagactcaagcgatcagctgaatatctatcataaatgatgaaataaaaaaaattagagattaacttcaaaaaaattcaaacttaaaaaaaaaacaaataacattataatactaaatttttttaaaaatatatgtttaagatttatgattattaatttatgatattattaggagcatatttttatatagagatttcaaaaaaaaaattatcttattatctgatcgattttggttaatttttatatttacacagaaccgataaaatttattaatttatagaatattaatttagagtttctattgtataatactaaatattggaaaatctaaacctaaatctaaggcatttccttaaattaaatataacatgaaaatagccctagtagcatttataaatccaccgagaatcggcataatttttttgtacaatgaagttagttgagttaatgaacaaatttattatgaccaaaaaatggaaataaaatatcataattggttcaatttttttaattggttcaaaattcaatatataaaaattaaaatcttaattaaatcccagaatctcataaataattttgggtccgactagtgacctataaaggaatacaaggaatgaaaagaaacataactaaaaaggaacaaacaagaaaataaaaaaatgataaaataagaatgaagaggaatgggtgtggaagaaaaatagaacaaatgttactgtaaatgataaccaaaacatagaacaaatagtaacaaaaattaataaataaataatttattttctaaattaaatattaaatataagacgaaaataatttaatttttaattaataaatgtttaatttgtttttttgtctgtttctcatcaaatttgggaaggaataattttcttgtacgattcctcaaaaaataaggaatgattaggaatagtgtggggtacacatattacaatttagaaaaaaattattgctgaatggtgaaaaaagaaaaaaaacaataaggaacgtgttgttcctacccattcttttcttaaaaaatgttcaccaattggaccctttattttctctgaagaggaatctgacgatataagccaatcatcatctaatgcctaaaacgtttcaaaacattaaccatccgaatcaattaaattttcagacaataaagttatcttttccaaatatattatggatatatatacccatcgtcacatttcttttctctaatttccatatcaaaactaaaatgaatataacaagttgagtgaggatatttttaaattaataaggaatgattttcattggtcaatccgtggaaattacattgtcggtaggtcaattaaaggcgcaattatgatgcaatatataaaaatttagaaatattaagagccatgtgactagaaccatgtatacaatattttatttcccttcgtattaaatcaccaacgaccaaatctaaaggtagcaaatcaaacagccccacaaatatatcaaaatatataaagaagtaattaaattaacaaaaacgaagaaagtataggtttcactctcttactcattccttacatgtcgaccaataattctataagtatctaatgacatttcctatctttctttcaatccataatcttatcatataatcaaattcgggaaagtttttaagtttcataaactctataaattactctctaccatcttaacctaaaaaacattctcaatcctttgtccaaaatcttgcatatcggcaaa

SEQ ID NO: 831 - DNA, 3000 bp, Unknown
  misc_feature (1)..( 3000): cDNA_ID_2126916_gDNA_ID_1620326_Annot_ID_153497 3000 nt of promoter + ATG
ttaattacaaaaataactcataaaatgtaaaggccagttttttttttttcatgtctaaaatatcatttttactttgcttctttttccagactgctctgtttcttagcaaagctcttatcttatctcttttttcgaagatatcatttgcttattctatatctgtggtttatttgatctcaaaaaaatgagattatgacagtagatgtagttattaaaacaatgctcgttcgcaccacgaaacattttgctaatgtacatggtaacgcatcaagtgtaagagatataaaagagaagggttcttttatagtcagggaaattataatgacattccatatatttttaattcacaacagccaaactcatcgcaaataccaagatcttacacataaaatatacacaacaatcacctgtcacaccatacacttttacgagacacggaaacactcaggaattgggtaaaagctctaaccatagagtaatcattatctatcacgtgatctacgccttacacatgtcaattttctactttagggtttcggttcaatatgcatcatgcctactttgaatcttgaacgttattgttatgttttcacacaataatctcactgagtttttgacttagtgttgatggatctttttttttgttttgatggattttagtggataaagggggaacaatttggccaatgggtgtaaataactctctccccacgggctagcaggattggtgcgttactgtgacttattatttggaagaggagcacattgactaacctttcttgctgagaacagaaaaagctctcaagaatagtgtgcattttgattgacggggatgcgagtgtggacgtggactggaaacagtagtaagtgaagaaatttttgaaaggagaaatgaggattagtcttgtagactctccaacactgatcatgcatatggtcatatagctagaaattttggggagaaaaatatggtaaaattttagaaagggtcaggattaaactgcttattagtgcgcttagtagatagctagaatttcggattagttttgttggaacaaacaagagttttttttaagaggcatttactataaatttgcagaatgactttgcatagaggtgaacataatagaaagagagagagaacctttaatatgatcaggtttagatcttttaagtatcatagatgtgtgtgtgggtgtgagagtgggacttaagtccaccaactcatcctcttttactagatatatatgaattgaattggtattcagagagaatacatgttcgtagaccccattgtcgaatagctgaggccatcggctgcatagtgcttttgacagatggaacataacactgatattcatggtatgacaagttagcttctttgacacataacattcaccgaaataagcatgtatggcaatggcatgatcaaacaacaaaaaggtttctccgtccaattttgcttaatatagtttccactctcttgagagcctgatatgtattcatgtgtcatgcatggtttgatgagcagttagaaaattttcctaaattaaaataatatattgtatgtattgatttacaaaacttataccaaacccaagcatactataaactttaggtatataaaaaggtactcaattgtagtaccatttgagtaacttaaaataatactaatacaaattttaacctaactgttcatgaaaattttgaaataaaaatctaaaatatgaaagatttaaaattgttattttgtatataaaatatatctcacaaaattaatcgactattttaattaaagatatatagtagtttaaataacataaaacaacgacaataggagggttataaataaatgttctaaaatgatgtctaggaagtcgtttagtctccgcctagaatagacagtggaagttaccttacacacattgggattatgtatttttttttaataaatggatttaagttgtttcaagagatcttaagctctcttaggtggtcttaggcggttttacaatttaacggttttagtttattttccaatatttaagtacaataatttaaatttataatttttaactccatatacatgattataaacgttcatatgttatttgatatgaattaaataaactaatttttgtttatgatttactatttttatttttaatagatttttgtatattgtgtatctaaaatatcatatttataatattgtatgttggaaatgcttaaaccacctaaaattgcatatgttttgattagacgttatatgttttaagtattgtgtcagtgcttgcttcgtgcctaacgctttcttaaacacaaacaagtcaatattttatactacacaaactcattaatagatattagtgctaaacttaataaagcatatataactattcaagtccacaaaatcttttaccaaaataaacttttaaaatataaacttttttacatgtctagcacgtatccgaacatttccaaaaagatactccatcttttgaaatagttgtcgtttaacgtttttgcacataaattaagaaaacaattaaatttatagttgtcgtttaaacgtttttgcacataaattaagaaaacaattaaatttatccttaaaagacattgttgctaatattcataaagaatatctaattgtttgagtccaaaaaagatttacccaaaaaaacctttgaccattaaaaacttgcttacatgtctaatacgtgtcttaaaagttttcatatcaaagctcaaaattcctaaatttcaagattcttaacttttgttttatttacaagtaatgatgatactactttaaaatcctaatttgtaagagacaatatattgtgtttaattaaatattttcttattgcaaatgttttcttatttatataaggagttgttgaagaacatctacaataaaatctccttctaaactctcacttatttcgtactgataaacaaaaagagcatcttaaatctcttgatcggttttcgaag

SEQ ID NO: 832 - DNA, 3000 bp, Unknown
  misc_feature (1)..( 3000): cDNA_ID_3059186_gDNA_ID_1620326_Annot_ID_153493 3000 nt of promoter + ATG
atccaattttgtgcatgacaatgcaacatgtggaacccgacgttagcctaactctttgagctgaactatcaaaaccttaaatctttctaagaaatttccattatattagaggatgaaaaaaagacaacatgaatgaaacaacaatttatatactcgatctaaagaaaataatagcataaattaaaattttcagaaaaaaacaagagggaacattggtgtgaataagtgtagttattgtgctaaattaaattatgttggtctataaagtattggttaatatatatcaaaacatcagaatgctataacgtctagattaacttgagctttagcaattcgcatgaagaaataaaatttgatggttaatttttgatccaaaaatcatctgattactaaaaataataaagaagaataatcggaccgacaaggatattattcgtggacgacaaaaagtttggcaagggagtgagttcactacagtaagacggcatatgtatttaaggattaccaaactttttgctttagccaaggaagctttttctcaagagccaagaggcacacttgtaaaaatatataatcaaatatatgtatatatcaaactaaatcaatacatatcaaatgttgtccttgcatatacacaagtaatttcacatatgtgatagtgatagtggtagagatcatcatcttagttgagacttaattaaatatgaacaatcaagttcgctattgcatctatatatgtttttgcctttatttctaatcatgtagattaagatcatttttatgatatgcgtataaatattgtagaaaagattaaggtgcacaatctagatttggatagatagaaaaagtagaggcattggtttagctatcatatgttctcatcacatcaagagacttggatcttaattaatcaatgtttccatatttactgataaataaaaaagttataaagtagacaaaccgttgatataatttttcacgtccaaagagagtacgtagatcacctcatgaccaggttgctttatagtgtttagattgtatagcattcatattctgactgaatctctagaacatatgctcaaatcatttcgtttggagttttgacccatcctcaaatcatattatatatgcattctatgcaagtacaaatatgaaccattacattttgttgaattaggttgcatgtctttttagttttgcccacatgtttttcgtgtgagaattgtgaattccccatgtgaatcataaatgaaaagataacatggtgggtcgttcacaacttacaattcggaattattttaaacgtgtctgaattcccttggcactgtaatgatccgtctgttacgttgccttgggccttgggctttggagatggactaatatttacacaagttgggttcaaggtcattgagctttctttcaaactatgattaagtagtgggaaatatatgattcatatatcactattacttggtattacagttctaatacagattatacagttgattcatattggttcgccgtcgatactacatataatcatgtcatgagaacgtgttgttcgtgtaaaattaacacaacaagaaaattacgtttagatgtatcaaatgttatcctaacagatttcacatgttatatagtctcaacgaaaaaaattaaaacatttaaactgggtcaaaagatgtatttaagcgattttcttatatggtgtaacataagttgaccaaaaagattgaatatgaattagtgtgaagattgattcaatgactaaatctagtttaatcataaaatctaaacatttatctttttttaataaaactcaaaccgataaataattttgttttagtaacaaattagattttataagtaaattaatttttttattattattaaatgtcaaattttaattgaataaaataaaaaaagtgaatataagggttcaactcaaatatttttcaattcaatatatataaccaagattttcgttaccactccacttaagtaatgcagtgaatgaaaaagaaaaaataatcagtgtctaaaatcaaaataccgttggtcagttgaataatgaaaaagaaaagatctttgattttccttttacttggtagattcctactctttaggattgaggttttaataaaagactttaatcaacaagcactaaatttaagatactggtgttgtgtaataataagtttgggccgagcaaaaaaagaaaaggactgggccgagaaacggcaaatatttgtgtcgtttcaaataccaaattcaaaatctccattcttttattactctgcttattagccgtctaagcatattacagctgtcaatcatcgaaagcatgtgacgcgtctctcttatttcatcccactcgcgttcatatacacgtgttatctactctctatccgatttccgccacgtaagaatctagacactgatgttcttatacacatagcgagtaagctgtattttacactctcgtagctagtcagtttattgtgatagcgacacggctgatttagggaaataaattaaaaacgttgtcttattcctggggcaaaaaaaagcagataagtaagcaaaaaaaaaaactcattaattacgaaagtacccttaaatttctccgaaaggaaatttttgcgccgcgtttcatcttctctcaaatcaaaatccagagagaaaaaaaagagaggatttttctcatgagattctgagagtgtctttgttcttcttacaaagaagtgttttttcttgaagattcttcggtcgctgttcgaaaagttgttgtttcgtttctctcggagctcaaaatcaggtaaaaaatttgttactttatattttcgtttttctaggtttttcgtaagagttaacctaatttcaaaatttgtttttttgggagatattgttgggtttgtgtgtaaatagttaggttgatttttttttctgatttgtttgtcgttttgtgattttttttttctacagtcgggaagaaaaatg

SEQ ID NO: 833 - DNA, 3000 bp, Unknown
  misc_feature (1)..( 3000): cDNA_ID_1715938_gDNA_ID_1620327_Annot_ID_153517 3000 nt of promoter + ATG
gaatttcaaatttctgaatcaatcattcaacaggagaaacagaaatcgctcagcagtgactactacccagtaacttaaaaccacctaaatcattcccaaaatagcccactcgtacgagaaggctaattaacgaacgcaaaatcactattcaaattaaagaaacgtgtacagctccaagcacgaaaacacagatgcgagaagagaaaatggctgagagattcaaattcgtcaggagagataccaaaaccagctcaaatgatgataaagaagaagaaagaaggaaggagtgaatccaaaatcttctcaccggatttcaatttatttcggcgactctctctgtgatggttttggagaagagaggtcgaaaaccatatacatatgtgtttatatcgttaagtcctatcgctaatccctatcgttaaggttatacggttagtcatatattagaattttttttttcgtctttggataaaattcattaaattgttagtcctatatttgatatctgtgattttctatatttaagaatacgaaattatattgggcaactttgaaaacgatcctatttatgagttttgtttgaaaaatatcatttttctcttttaattaaaaactacatttttatatttgtaatatgaaaaattttcctgatttaaattaaaagttaataaatcatttaattcgaatttggagaaaaaatgaaaacataaactaaagtcgaaataaatattaattattattatgcattctttttttataaataaaagatggtttattgaattttatactaaaatttaactgattataaagattatagcttaatatttttcatgttatataaaaactaaaaaatctccaaaactttaaacataataacttggaaaatcgaaacaggttatacatcaatgactcgatatttttctagataaatatatatacatatatttttttgtcaatattattttttgtcaaatagtagatattttttatctgtccacgaagaacagttattgcactgagaagctctatcattataaatgtcctgtatgtatcttagtatgttttcggtctgattttataagcatattagtaaaacctctatagattaataatgttgagactaaaatattttattaattaacaaagatattaattattaatctatatagagatttgccttattttgtaattttgaaagagagtttttcgttataatcaatatacttctaaaatcaactaaaaataatcaatcatttatcatgtctaacagatgataaaaaataaattgatatggtgaaaatattagcaatgaattctaacaaaaactacaatggatttttgtaaaaatatattttgatatatttatacaatcattaatttatagtatttgatgggaccattttaaaaaaaaagttttactgtaactataactctcactttaaacaaagaaaagagagggaaaaactaagaatacttcttattaacattaactctcatactaatcaaagaaaaaacaaaaaaaacatatatatagtaaagctgatttaaattagctctagcttttggtaaaatatgtgaaccaaaattttcgagttgaatattccagatacctggataatcgaaagatattcgagtaattgaacagaatttacaaaaattactcaaataaaaaacagaaaatcctaatacatatatcccaaaatagtttggtttttcagatatcttaaagctaaaccgaaaaatacttagaaaactttcaaatcctacttagttattgagtcagtttcttaaacctacctgaaccgaatgaaatttgaataaaaaatgtattttggttccttaatggaaccaaccaaaatactcaaacaccttgagctaatttaataactgaaaacgaaaaaagcatataagtagtatttaaaaaatctatcgtggaaagggaattctgtatatgtattggaagccttgtgtaatgtcgagttcagaccaccaaataattgctacaactctgtgaaatccattggtgcttaaaatacactaaggctacacagtatctcttctttgatgtagccgtgaggcatatttgaggattacacatcccaaaaaacaaacattgagttgatattcgacggcgacgaattcatttattattagtaacaataataattttctctgtctagtttccgtttgtttccatttccatggctagagtaacaagaatgacgaaaaataaataaatagaaaatcgacttttagtggtagaattaagttggcaccaataaaaaaagaaacaatacaaaagagtccaaatagtagcctaataatatagaatgaaatattaaccatccctcttttaatatatagaggatttcaaatattattttttagattctatttaaacgaaaatattattagaagattcagaaaaaaagcaaaaatgttagatgaaaataaataaatttcatattaaataattggaaacgaaaaagcataagtatttgaaatatggtacttcagtaatgaacttttaacaaagaaaaaaaagtattagaaaaatggttttgggtcttggtcttataaaatattgaacccatatcttactttctcaactaatggacaaagaaaaaggtgctcatgaaacgtataaatgaattttgatctcaacttgatatataatattggtgatttgatgttgtttggtcttttatgatttgtcttttaccagctaatttacattccattccatgaaattcccaaaaaagttatcaaatatcatttttaagtccaagaaaatgcaatgcaaacgactataaaaagaaaatcaaatcctggaaatttcgtttcagtcatcactcaatttgatttcagctattaaatccggtttgatttggttttcggtttaaccaaaccaaaattcaggcctcctaataaataccgaatccttctccctccctctctctgccactacgaatttagcacatagccggagctccgatcatg

SEQ ID NO: 834 - DNA, 3000 bp, Unknown
  misc_feature (1)..( 3000): cDNA_ID_2126859_gDNA_ID_1620327_Annot_ID_153536 3000 nt of promoter + ATG
tctttggtttgggttcggattgatccgttcttgccgaaacagactggtccgttactgaagcaatgtggcgtcgactgttaaatgaggaaccgcattttcgttttggaccgctattttgagccattttgcttggcctatttttccgatttgggtgttctttgttggattatatggatttgtaaggaggaaaaaaaatacaaaactttgattcacttgtgaaataaagtagacaaatttctgtaaaatacaaacaaatagaatgaatattactaaatcaaatcacacacaaaacacaacgattttgttatcaaccacacacacacaaacaaacagagtgataaaaataatttcacaaaggcaatgtagtaaccaaacatgtgtggaattctttctctgttgtggaattggagttctaagaacttcgactgtacttgttcgttgccattgagtgactgttccagtaaccaccaactgttccaattatcggtgattcagggcttctacttggcgatttccttggcgaattcgtagctgagaactgctttatctcctctgcagttaacgcgcccaatataggtctttcatcatggcattgaaccagtttcgagtatttcttcttctcggacattgtggtttcaacactgctacaaccgctggtcgtggtttgtgatgtggataaccaagttgaaagactagcatcaacagctatttcttgagttctctgtttctcagtttcatctcttgatttccggttcaagctgaatgttgatgataaatcatcaacctgagactccaagctgaaggaagcaattatcacattctccttccgaggctgtgtttgagttgttgttcttcctttggctttcacagctttccattgggaaagattctcaatcgggttcagtactgcattgacatatccacttctgtctctaacactcacactacccttttcttcaaccctctctatatccataacattatccgcaatctcctccgtataaactactttatcccagttgtgcagcttgtcctcataattgtcatcattataatagtcatcatctagcagcccacaatcatcatcatcagtatcctcaagatcgctatcgtcacaatccgttacatcctcctcttcatcatcactctctctgcaattctgatatctatggttagaaggataagaccctgacgagttagaagtaacatcgctcccttcagacgaacatcgagcctgcctcgacttcacctcttctttcttctcttcaaagagctcaacagattcatctactgcaatgtgttcatatgttttaacattggtgtcaaaagttactctcttacgatttggacttggactcggactctgtttctcctcaaccttgtcactgcagtttaaagaaaagaatcaaataagtcaaatctgttgagctaaaacacaaaacatgaatctaagtagaaagaacaaaaccacaacacttaccagatatcagtgatcggagttacagaaactgtagggactttctcaacaacgttcacatgattatcctttggagacacctccgagattttagggacttccataacagttgaatcttttgcatactttgggacttcttcaacagtaggaaccctaagattcaaaagaacatcctttgcagcttcctcagagattctctacataaaacgaaacaaaattacttcagataaagcaaaacccaacaaaaaattgaagctgaaattagcttaattgcagcaaatcaacactaagaagaagaacttacgtttaaacgtggctgaaaagattctctgcgtctctgacggcgacgattcttccgacgaccgaagcaaccaagtaagcaacccattctcttctacaattcaaagagctaacaacgagagagattgaaggtaatagattccttcgagagcttataaatcgaagattaaagagtcaacattgcaaagagatgatttttaactggacttagagagaagaagaagaagtgttgtactcatggatttgggggtttagggtttccttttttatttgtctcttcagatttccttttttatttgtctctttagatttccttttttctctttctaatttcaggttataatttattaattttggcggagtaaaagtagatgaccgttacaagtctgatttattagactgtgaaattggaccgttgttatgtgggccatggcttttattaaaaaaagaagagaaggtatattatttaaattggagataatgggccgttttaaacccaattattattggtccactaaagtttttatatcctctaacttcgacgagcttgatatagttttggaccttttggtgtgaacggtcacattcaactaaattaaaaagtccaacaaacaaaatctggtcatgaaaagcttggtgtgatgtttctaataagtaaatttactgaggttaattggttggtttaacttaaatgtaatccaaactcctctccctttagagattttcagttgggaatgaaaacctttaaagcttgcaccctaaaatgacattaatggttatagatatagtttgttttcatgtttcttttttttttatattttcctttagttttttctagggttgggactaaataatcggactcggatccgagatccgatttgaaaagctggatacccaattgggatggatccgcttccggatcctgaatttttagattcagatgaatatttttttttaaactaaagaaagcatatcagcatcacatttttgtggtgatactgcttcaagaatctgtcacatatctgtccaaaagaaaagaatttgtcacatattgtataattttaatatatttattgttttagtttgaaaacaaacgtggaaaaaaacatcttacaggtgtcaggtgtgccgcgtcgtcccactcaaagcctatatcatcaattttctggctgttctaatctactcaatttatttttttattgttaatttactgaagatcggcg

SEQ ID NO: 835 - DNA, 3000 bp, Unknown
  misc_feature (1)..( 3000): cDNA_ID_2126856_gDNA_ID_1620327_Annot_ID_153535 3000 nt of promoter + ATG
actccagaagaaattgcaatcacctatggtaatgtaaaagaacatcgaaaaccaaaataaataaataaaaagtaagaggatattaacctaacacatattatatattaatatcaagaaaaaaaaacccaactagtttatagacataaaactagttttccctataattatctcttactttttttttttttttttatgttcatcatgttactcttgttgcacaccattcaaatccctttatatgcccaaataacttgctattaaagatttgaatcaagtcttaacccgaaccgataatcacaagtgtatggtttagttgttcttgcagtgatatgtatagcgagttcaaattccacaaagaaccaggccattaattactaaacataataagctaaggcgatatatttttatggttttttgctaatagacaaacaagataataagcaagaaagcaataaactaataataatagatgcgcacatgatatgaacagttaataaagaaaccattggatcatggttatgcaatcgattaggatagatcaacaactgatctatgatacaaaaacatatagtattaagcttatattcctaggaaaatggagcacatgactattctattcccatgatactaacacattatccgattatgttaaacttcaattaacaaactagaaactcaagaaagattaacaaataatcccaattagtccactaattatgtatttaatagtggttaattcactagtgcgatcaaatgagacagcttgttgttcaacgaggaacacgtggttgaccatttgggtaaatgttatttattcatcaattattggtccaccaagctcgctgacccattcaagtttccaagatttaaaaatgaacgagaaaaacaaacatactatacaaagacattttaggatttctaaatgcaagaaatcgttcacaaacacacacacacaaataaataaaacaaaggaatattgccaaaaataactagcatctagaaaaaatcaattaactttctataataagttaatctaacatcaatgaagaaatggtagttttactcatcaatttcacacggaaactgatcaatatttttgcaaacactgtctaccccaaaaatagagccgtctagttcacaagatatttggactaacccccaccgttgtgaccaactgacctttcaaatcataagttacataccgaatttttaagctggcattggaggaaccggttgatagggaaaaagaaggcaaatgagaaatgtgtaggaatggcccaaacagagatgataccggagagctctgcgatgtcgtcaggctggcccatgaacttaagaatcggagtcgcaaagatgtacattgggaggagcaagatggagaataagaaaagaacaatccaagatcgctgcaaatacactccaaacatgtcatacttctttgctccaaacgcttgaccgcacagcgtttccaacgcagtcgccattccaatctgcatataaacatatatagtttcttaacaaattaaacccaacattataatataagctacataaaaagtattgttgcgtatatatacgaagaggctatagttgaagccgataatgacgttgttgacgatggagatggcagcgagttctagctcgccgaggtggccagcgaaagcctgagtgatgacaaagatcaagttggtcgtgactctagtgaatatagctggtccgacaatacgccacagcttcttcgtctctagccatatctctttctttatttctccgttttcctcctctgccacattttgatcctttaacaaaggaatcttcgccttctctaaaataccttctgcttcgtcgtctctctctcccatcgccgatcttcagtaaattaacaataaaaaaataaattgagtagattagaacagccagaaaattgatgatataggctttgagtgggacgacgcggcacacctgacacctgtaagatgtttttttccacgtttgttttcaaactaaaacaataaatatattaaaattatacaatatgtgacaaattcttttcttttggacagatatgtgacagattcttgaagcagtatcaccacaaaaatgtgatgctgatatgctttctttagtttaaaaaaaaatattcatctgaatctaaaaattcaggatccggaagcggatccatcccaattgggtatccagcttttcaaatcggatctcggatccgagtccgattatttagtcccaaccctagaaaaaactaaaggaaaatataaaaaaaaaagaaacatgaaaacaaactatatctataaccattaatgtcattttagggtgcaagctttaaaggttttcattcccaactgaaaatctctaaagggagaggagtttggattacatttaagttaaaccaaccaattaacctcagtaaatttacttattagaaacatcacaccaagcttttcatgaccagattttgtttgttggactttttaatttagttgaatgtgaccgttcacaccaaaaggtccaaaactatatcaagctcgtcgaagttagaggatataaaaactttagtggaccaataataattgggtttaaaacggcccattatctccaatttaaataatataccttctcttctttttttaataaaagccatggcccacataacaacggtccaatttcacagtctaataaatcagacttgtaacggtcatctacttttactccgccaaaattaataaattataacctgaaattagaaagagaaaaaaggaaatctaaagagacaaataaaaaaggaaatctgaagagacaaataaaaaaggaaaccctaaacccccaaatccatgagtacaacacttcttcttcttctctctaagtccagttaaaaatcatctctttgcaatgttgactctttaatcttcgatttataagctctcgaaggaatctattaccttcaatctctctcgttgttagctctttgaattgtagaagagaatg

SEQ ID NO: 836 - DNA, 3000 bp, Unknown
  misc_feature (1)..( 3000): cDNA_ID_2126849_gDNA_ID_1620327_Annot_ID_153534 3000 nt of promoter + ATG
ttaaatagcatgagctggaatggatgtttctcaacttatttctccaagttgcctatttcacatcaagacatggtgcccactttcctccaactctagatttattgtatatctatgtgaaaatgtgctgtcgttcacattcatccccaaagtattttaatgtatattgtatttgatcacatgaacatgacaaaatttatctgtaaatgtcttataataattgaactaaaaatgttatatttttaatctttttgtttgtttctattggataaaatgcaaataattatttggtagctatagacaaaactaacgtcgtgcaacaaaagttaaaaccatctttaacaaaagaaaaaaattgatgacaagatatgtataacaatatcaatgtctaatgacattctatctttaaatgtaagaaacaaaactagtattttggagaaaatattttaaaccttactttgtgtttttgttgacatttcacaaattatttaaggtgatttgttaattaacaatatcaaaaaaatcttcctaaaaaaaattaacccatacatgtgatgctatagttagtagtactagaactaaacccatccagtagtaaatctaataaacttcatttttttttgtattttgttgacttgcacttcgacatactctatataaacacaaccatattagagatcagatcccaacaccactaataaactcaacatggctagatccttgttgctctcgctaaccctcacattcctcttcgccggaattgtctcagctcgtgactggaacatcctgagccagctcaaaggaaccacaaccaccacgaagactagccaaaccggcgtcacatctttgaaagctcccaacctaaacggatactgtgagagctggagagtcaacgtggagcttaacaacataagggactttaaggtggttccacaggaatgtgtatggttcgtccaaaagtacatgacctcatctcaatacgaagatgacgtggagagagccgtcgatgaagccatcctctacctcggaaaaacttgttgcgagaagaagacatgcgatggcatggatgcttggatctttgacattgatgacactcttctctcaaccattccttaccacaagagcaacggttgtttcgggtaaataaactaaacttaaccatatacattagccttgattcggtttttggtttgatttatggatattaaagatccgaattatatttgaacaaaaaaaaatgattatgtcacataaaaaaaaattggcttgaattttggtttagatgggtttaaatgtctacctctaatcatttcatttgttttctggttagctttaattcggtttagaatgaaaccgggattgacatgttacattgatttgaaacagtggtgagcaactgaacacgaccaagttcgaggaatggcaaaattcgggcaaggcaccagcggttccacacatggtgaagttgtaccatgagatcagagagagaggtttcaagatctttttgatctcttctcgtaaagagtatctcagatctgccaccgtcgaaaatcttattgaagccggttaccacagctggtctaacctccttctgaggttcgaatcatatttaataaccgcattaaaccgaaatttaaattctaatttcaccaaatcaaaaagtaaaactagaacacttcagataaattttgtcgttctgttgacttcatttattctctaaacacaaagaactatagaccataatcgaaataaaaaccctaaaaaccaaatttatctatttaaaacaaacattagctatttgagtttcttttaggtaagttatttaaggttttggagactttaagatgttttcagcatttatggttgtgtcattaatttgtttagtttagtaaagaaagaaaagatagtaattaaagagttggttgtgaaatcatatttaaaacattaataggtatttatgtctaatttggggacaaaatagtggaattctttatcatatctagctagttcttatcgagtttgaactcgggttatgattatgttacatgcattggtccatataaatctatgagcaatcaatataattcgagcattttggtataacataatgagccaagtataacaaaagtatcaaacctatgcaggggagaagatgatgaaaagaagagtgtgagccaatacaaagcagatttgaggacatggcttacaagtcttgggtacagagtttggggagtgatgggtgcacaatggaacagcttctctggttgtccagttcccaagagaaccttcaagctccctaactccatctactatgtcgcctgattaaatcttatttactaacaaaacaataagatcagagtttcattctgattcttgagtcttttttttctctctccctcttttcatttctggtttatataaccaattcaaatgcttatgatccatgcatgaaccatgatcatctttgtgtttttttttccttctgtattaccattttgggcctttgtgaaattgattttgggcttttgttatataatctcctctttctctttctctacctgattggattcaagaacatagccagatttggtaaagtttataagatacaaaatattaagtaagactaaagtagaaatacataataacttgaaagctactctaagttatacaaattctaaagaactcaaaagaataacaaacagtagaagttggaagctcaagcaattaaattatataaaaacactaactacactgagctgtctccttcttccaccaaatcttgttgctgtctcttgaagctttcttatgacacaaaccttagacccaatttcactcacagtttggtacaacctcagttttcttcacaacaaattcaaacatcttacccttatattacctctttatctcttcaatcatcaaaacacatagtcacatacatttctctaccccaccttctgctctgcttccgagagctcagtgtacctcgccatggaaccaaacacc

SEQ ID NO: 837 - DNA, 3000 bp, Unknown
  misc_feature (1)..( 3000): cDNA_ID_3059207_gDNA_ID_1620327_Annot_ID_153533 3000 nt of promoter + ATG
tagccattctaaaaataagatgttcaggctcagagtctgtgaaccgaaccggaccggaaccgtccataaagaatttgacaacaacaaaaaaaaaaagagagacgaaaatacggataatttttttttaattacaacaacaactttcttattatatttttgacatcacatgtgacgaaaatggcttgtttgtttaaattttttaataagaccaaacataattggacaaccaattataaaagtgacaaaacacgattaatttttaaattttttatttacaaaaacaactattttcttattaaattttatttttgacatcatatgtgacgaaatggcttatctgtttgtttttcaattaaatccaaaattggtaacactttggttttatttgttttgtcaactgaatttatgaatttgattaatcgtatgttttcggacttcggagtagttaacatgacatctatctaataaatccattgttaatcaaatgatttctaattaatatataatgaaaatctttgaagcaaataagatcatgtatttatattcatccctacactaaccagaaagccaatcccgtcgctcacacatggataaaggacagacaaagtcaagagacccgtcaattattatgaacgaaagttaatatttattctaaatttgtcaagaagagttgtaattaacgaaatggtcctaaatatgtataaatgacaaataattttcagtacttacattaaaaaaaaaaattggaattgaagtattgaaaaagcaattcatggttgccgattgtgtggatccagactgatcaagaactgtatgagttgtgaatgcaatcacttggatttggtacaagatacatatatcttaaagtcgcaccatatatgtaatgttaaacaaatcaaaatatattagaacgtgggaaatgttcttaaggatgtaatgtaaacgaatgaggactaggttaacaatacacatgagttcagccattcacatataaaataatgttaatgtttacaaacaaaattcggtcaataatttaagaacttgcaagacatatctatatatacatgattaatatttgttcaaatctgtaatctcttcgtcttaatctgttaccaacaaaaaaaatgatttctgttagacaaattctaataattattatttcgatccgagatactcatatatattacaatttgaaataaagtatatacaaaatggaacatagatcaaagattgtaaactttgattttgcataccatatattatttatttattttttccaaatatttattattattatctcacaagagcgaatgtgtaagtattaactgtagatagctctaccaagttttaaaagtttcaaaagataattactaattgattcatgataaatcttacgatttttagtcttttgagactaattattcttatatcgagaatcgaagaatatgaatgatatcaaaagctgaaaattgtgttttagagaagaaaatatatttaaacatgtagagaaagttggctagtccaaatgtgtatccattatttttagaaggtctatgcaatctaaaagattttgatttctgaaaaaaatgatgatttatgtggaaacacataatataattgatttccttatctatgtcattaaaatatatttattttcctctaatgtatccaaaaaaaaatctacagttgaacacgttttagctgaaacgaagtatgaccaaccaaaatcgccaagagagagcagtcattcatcgcgacctccaaaccctctttatacatgttgaagcgatggaatccatacatactgatcttccagaaagtcgaatagtttcataggtcttctcaaaagagatgattttaacaaaataattgtaatagttgtgtgaaaatgacttctaacaatcattattcaaatgacattaggaattagttgtgttaaccctagaaattctacaagttttttaggcccaaagactaatcatacgaagctttgtatttgtgtatacactcgaaaatattctaaatttaaagtgcggctaagtggataagaagacgactcgaatccaagactctgtactggagaattaccacaggaccaaggtaattaacttgattaatcgatttacactaatccatcaaccttttaacatctttttggttgtacatacacatacatatacatagatatgtatatagttatacttatttatatctttttttaatagaattgatcatatccggagtataaattagctaagaatacatttattcagacagccaacacagctgattatattaaatagcatgagctggaatggatgtttctcaacttatttctccaagttgcctatttcacatcaagacatggtgcccactttcctccaactctagatttattgtatatctatgtgaaaatgtgctgtcgttcacattcatccccaaagtattttaatgtatattgtatttgatcacatgaacatgacaaaatttatctgtaaatgtcttataataattgaactaaaaatgttatatttttaatctttttgtttgtttctattggataaaatgcaaataattatttggtagctatagacaaaactaacgtcgtgcaacaaaagttaaaaccatctttaacaaaagaaaaaaattgatgacaagatatgtataacaatatcaatgtctaatgacattctatctttaaatgtaagaaacaaaactagtattttggagaaaatattttaaaccttactttgtgtttttgttgacatttcacaaattatttaaggtgatttgttaattaacaatatcaaaaaaatcttcctaaaaaaaattaacccatacatgtgatgctatagttagtagtactagaactaaacccatccagtagtaaatctaataaacttcatttttttttgtattttgttgacttgcacttcgacatactctatataaacacaaccatattagagatcagatcccaacaccactaataaactcaac

SEQ ID NO: 838 - DNA, 3000 bp, Unknown
  misc_feature (1)..( 3000): cDNA_ID_2126839_gDNA_ID_1620327_Annot_ID_153531 3000 nt of promoter + ATG
caacaaaaacacaaagtaaggtttaaaatattttctccaaaatactagttttgtttcttacatttaaagatagaatgtcattagacattgatattgttatacatatcttgtcatcaatttttttcttttgttaaagatggttttaacttttgttgcacgacgttagttttgtctatagctaccaaataattatttgcattttatccaatagaaacaaacaaaaagattaaaaatataacatttttagttcaattattataagacatttacagataaattttgtcatgttcatgtgatcaaatacaatatacattaaaatactttggggatgaatgtgaacgacagcacattttcacatagatatacaataaatctagagttggaggaaagtgggcaccatgtcttgatgtgaaataggcaacttggagaaataagttgagaaacatccattccagctcatgctatttaatataatcagctgtgttggctgtctgaataaatgtattcttagctaatttatactccggatatgatcaattctattaaaaaaagatataaataagtataactatatacatatctatgtatatgtatgtgtatgtacaaccaaaaagatgttaaaaggttgatggattagtgtaaatcgattaatcaagttaattaccttggtcctgtggtaattctccagtacagagtcttggattcgagtcgtcttcttatccacttagccgcactttaaatttagaatattttcgagtgtatacacaaatacaaagcttcgtatgattagtctttgggcctaaaaaacttgtagaatttctagggttaacacaactaattcctaatgtcatttgaataatgattgttagaagtcattttcacacaactattacaattattttgttaaaatcatctcttttgagaagacctatgaaactattcgactttctggaagatcagtatgtatggattccatcgcttcaacatgtataaagagggtttggaggtcgcgatgaatgactgctctctcttggcgattttggttggtcatacttcgtttcagctaaaacgtgttcaactgtagatttttttttggatacattagaggaaaataaatatattttaatgacatagataaggaaatcaattatattatgtgtttccacataaatcatcatttttttcagaaatcaaaatcttttagattgcatagaccttctaaaaataatggatacacatttggactagccaactttctctacatgtttaaatatattttcttctctaaaacacaattttcagcttttgatatcattcatattcttcgattctcgatataagaataattagtctcaaaagactaaaaatcgtaagatttatcatgaatcaattagtaattatcttttgaaacttttaaaacttggtagagctatctacagttaatacttacacattcgctcttgtgagataataataataaatatttggaaaaaataaataaataatatatggtatgcaaaatcaaagtttacaatctttgatctatgttccattttgtatatactttatttcaaattgtaatatatatgagtatctcggatcgaaataataattattagaatttgtctaacagaaatcattttttttgttggtaacagattaagacgaagagattacagatttgaacaaatattaatcatgtatatatagatatgtcttgcaagttcttaaattattgaccgaattttgtttgtaaacattaacattattttatatgtgaatggctgaactcatgtgtattgttaacctagtcctcattcgtttacattacatccttaagaacatttcccacgttctaatatattttgatttgtttaacattacatatatggtgcgactttaagatatatgtatcttgtaccaaatccaagtgattgcattcacaactcatacagttcttgatcagtctggatccacacaatcggcaaccatgaattgctttttcaatacttcaattccaatttttttttttaatgtaagtactgaaaattatttgtcatttatacatatttaggaccatttcgttaattacaactcttcttgacaaatttagaataaatattaactttcgttcataataattgacgggtctcttgactttgtctgtcctttatccatgtgtgagcgacgggattggctttctggttagtgtagggatgaatataaatacatgatcttatttgcttcaaagattttcattatatattaattagaaatcatttgattaacaatggatttattagatagatgtcatgttaactactccgaagtccgaaaacatacgattaatcaaattcataaattcagttgacaaaacaaataaaaccaaagtgttaccaattttggatttaattgaaaaacaaacagataagccatttcgtcacatatgatgtcaaaaataaaatttaataagaaaatagttgtttttgtaaataaaaaatttaaaaattaatcgtgttttgtcacttttataattggttgtccaattatgtttggtcttattaaaaaatttaaacaaacaagccattttcgtcacatgtgatgtcaaaaatataataagaaagttgttgttgtaattaaaaaaaaattatccgtattttcgtctctctttttttttttgttgttgtcaaattctttatggacggttccggtccggttcggttcacagactctgagcctgaacatcttatttttagaatggctaaacatcgtgtagttcccagtacacaaaaacgtcacaaagttcttagttagaaaaccaaaaccttattattcagaataccaaattcttctagggcaacgaacgcgcgggaaagaacccaaagacagaagcttatcactgattcacgatcatgcctcacaccaatcagtcaattcccttgtgcttttatgaattagggtttgtatcgttcgaatcgaatcaaaaaataagaagaaatg

SEQ ID NO: 839 - DNA, 3000 bp, Unknown
  misc_feature (1)..( 3000): cDNA_ID_2994165_gDNA_ID_1620327_Annot_ID_153530 3000 nt of promoter + ATG
tttgtcttagagcatttgatgaataactcgacattgaaggataaacaactccaagctattctagttgctgcggtggaatcaggtgacggtattagagagataattgatgggaaactctgtaagaggcaatctgttgtgtcctgtgtatcagcacttgaaactggtttgaagatcctttctaagcacatagagcctaaagagtccctacatagagaagacaatgatgcaactttcttggggtatgtttggctttctaagtattgcaataatcttggtgtacttgttgatgagcttaatttgattcctttttttgcttagtttgggacaacagcctattgagcttttaagatggaatatctggcagtcgaaagcgatatcttattttcttagtaagagaacgttaagattagtatcaggagccagcttgatattttctgcaccaaaagctcagtgggtagaaatgttgagaaggttgcgtgtttcagataagaatgatgacgatatattcatcgaaaagattgtaagttgatctgattcttgaactaggtatattcatattggactcttttggtttgtaagaaatggtggtcactcttacttgaacacttgtggtgatattgtttaagggcaggagctattgttactaggatgtgtaacaagcagatggacccatttaatcgaaggtatcatgtcagtttcctacaaatctgtcactgtgtcagaagaatacgaggagttatgcaagcttcttcttcaaagatctaaatgcttaaaacagaacgagattgctttgaattctaaggtcactttttcaattagaatcatttattgaaagttttagttttcttgctatatgtaaatcaggtttctaactttcttggtttgttcttatataggttgaagagattctagagtatctaacagaaatacttgagagtcgttttcatcagctctggaaattgccttctgcccttaccgcagctgcaattccatcatggtaatttcaactctatagttcatcatcttaacattggatctaattataggtctgatgccacaacatagattttgtattctggtcctggttaaagtaacattttgttaaagatcttgaaccatggtatcacaggtcaccgctgtttggtctgtattttggcggaatagagaaacagttgaaactagaccactcaacaacaaggtcaagtttctctctaaagatcagtttcacattgttcttgaacccaaacagttagaaatcgacatccatatatctacctgtttccttctcttctgcagattttgcagctgcgataaagatctaaacgagcacaatgactgtaagttacacaactacatagtactttccttgagttttacaagttcccttgagatatcttttcattaacttagatggcattgtgttcatacacgtaggtgagctcgcggaaagagtttggtgcttgtacgtattccatatctgcatatgccactagaaaaactaatggtcattgatcaatacaagaagatcagtttcttcaaggtaagatcacattgatgcagatgttttgtcaaaatatcttatgaaaactctgttttcttgcgtttgcgattagatgataaagatacaataaatggtatgatggatgagtaacagaaagatccagaaatgaattgatttctagttcgagatatttccttagctttattttggttgtttaaaattgaattctctttgtttataattgttatacatcgttgtcgttttgactcatgtatctttacttttacgtcatgtaacaagaaagcaattacgcgtggggtcttccttttaggcataatcttgtcattttggtatatgctttgtatcaatccatgtcatgatctatcctaaaacgtcgtcgtttatgccatggacggtgtagactggtagacactcatatctcactttaaccgaatgtttccgaagaatttcagacaaaaaaaactgatgaaaaaaatgagtttgcatcagataatgctttttgataaaggggtttcaaaagtggaattcttattattttttcgccaatagtgggattaatttagtcgttgagatttttgcttcaccgttggtttattggttctaataaaagttgtatttgattctccacccaaagttgggacgggtttatgacccataaattaggcttgtgatgtggagctgacactaactaaattttcaaacatatcttgaaaatttatattcattcattagaaatttatattcattcattataaagactaaatctcaataaatgggagtgttaatttgacatatgaactatgaaacgtatcattttactatattttgtattaaccatttggtaatgtattgatgtcctatcttaagtcatgtcatagtgtagctcttttaaaaccttttgtaggtcgtttataaacttgctagatgtacgccatgattttgcctatagatgatttcatttagccactacaacatagagttaatgtgcaaatatgtcacgaggtagtttatttaagtggtaatagatgatgaaatagattgaattgttttttataatattaactttttcatactagtgtattagacaaacaaaaaagaagtggatatatggtgatgaatgacgcactttggataattctttggcatatgaatcatgaatcactctactatatttctttttgtattgaaatatgttaatctactgatgatttatctactaactcatgtcattatgttggtcgtttaaacccatcttttttttttgttaaaagggtcgtttaaaatcttgctaaaacaccatgatttgcctattaatgatttcatttagccactaaaacatagaagtttatgtgcaaatacgtcacgaggtagttcactaaagtggtaatagatgaaatagattgaattacttttataatgtttaattacttagctttttcatatttgtatattaggcaaacaaaaaaaatggatatatg

SEQ ID NO: 840 - DNA, 3000 bp, Unknown
  misc_feature (1)..( 3000): cDNA_ID_1394384_gDNA_ID_1620327_Annot_ID_153522 3000 nt of promoter + ATG
catgtggagtttgaacccaccagataaatgactcgagaaaccatccaactacaagctcccaataactttacattatttgaacctatcagatagtgactgggcaaataaaatcctactacaatctccccgtatagttacatgtcccctttttcttttgtccactgctttgcaaaaagctagtttgaaccaaacataacaaggaacaaaaggcactgtcaaatagctgaagtagtggcactttcatgggcgatgtcttaccttcacaaccttggaattggacttgtgatgttcataagtgacaccaaagcattgtttcaggcgttagaaggccatcataagtggcttagaccggagggtatcacgacatagatcttagaggcaaaaggatgacacatcataccatcttagggagcatctctatcagtagtatctcatagagtatttggagattaaaaaaaaaaccaatgaaaaagtaggagtgagagtgtttcttgtttgagaaactttatacatttttatttttttggctaatgattttatacattcaaaagtacgtccagaagggcgccaatcaaattacggatactgtagccaaaaggacctcttatttcccgatttattaatgctattttgtaaagttgtactcccgtagttaaatccactagttgatttggatgtagacaacatttgtattgatgagtaatcttaacgataattcggtaagcacgagacaacaaaaatatatataacaagaaatgataaatatgaaagaaaaaaaacagaaatgaaaattctcatattcatgtaacatatacgaattacaccacgtgatcattacaattcctctatttaaacatctccaactgatcaacgtctaaaaaaatcaaatattggagaagagagagtgaacaactatgaacgtcgaaagagaccaacacatatctccaccgtgtctcctaaccaagaagatccctatcgttgatctaagcgatccaagcgacgagctcgtggctcatgcagtggtgaaagcgagcgaagagtgggggatttttcagttggttaaccacggcattcctgccgaattgatgcggcggctgcaagaagtggggaggcagtttttcgagctcccggcttccgaaaaagaatctgtcacaaggccagccgactcccaagacatcgaaggtttcttttccaaggatccaaaaaaactaaaggcttgggacgatcatctgattcacaatatctggccaccatcgtccatcaactatagatattggcctaacaatccttcagattacaggtattgaacatcattgaaaagccgatatatagtttatagttataaaccttaacattgtataagagctcatgtaagttatataatatccaacaaaatgtatgtaattaaatagtatacaagttacatgaaacttgattgcgttatttcttaccattaaaaaacattcatcaagtttttacattcttcatgatacttaaaatgtttttcggctatatagattattatgtagctgaaaattaatagtattatttgggagtggtgatggtttcagggaggtgactaaggagtacacaaggaatgttacaaatctaacggagaagattgttggttacttatcaaaagggttagggttacggcgtgaggccttgcaataatgtctaggtggcgataaagcacagtatgtgatgaggatcaattactatccgccatcggattcagccatcggagcaccggcgcacacagatttttgtggactcgcacttcttgtctccaacgaggttccagggcttcaagtgttcaaggatgaccattggttcgacgttgagtatatcaactccgctgtcattgtcctcattggggatcagatcatggtccgtttgtgtttggtttttaacttttggaaatgtttttggggtttggtttttaaaatgtgtgaattgcatgcagaggatgagcaacgggaagtacaagaacgtgctacacagatcaataatggatgcgaaaaagacaagaatgtcgtggccgattttggtagagcctaagcgtggtttggtcgtgggacctttgcctgagctcacgggagacgagaatcctcccaagtttgagtctttaacttttgaagactatgtataccgcaagatcataaaggttcttcgtgattgatgctaaacctcagcaaaatcatgtgttgtgataagacagtggcattagccaatagcttaaacaaaaaaaagtactagagtacaacctcttattattgttttcaatgttttgtttttatatttttttcagaataaaatatataatggttcgacgcatatttttcaattttcttttggtttaattaatgataaaatgattgcaactctataaatatacataattgtgaaataaacctaattgctatgttcttaattgtcaagaatttatcttcgaatgacacgaaaatcgaatttgaagtacgagacatgatttgatctgtgtatattgtacatgtcctggatcgataaggttcccagtctagctacgtacactagtttggtcagggatagctttatggtaacgagaaagaaaggaagtgtatccaatcacgatgaatcgttttctaatctatttctttcagtcctattcaactgattacacatgtcacatgtgcgccaattggatgctgttgaaactttgaaaatgcaccactatagtgttaacaatgagccggcgtgataccatgttttctttattttcgaaaggtgtatccattattgtaattttggaccaaagcatatgacattgatgtgtctctgggcctactttaaatcaaatcggacttttctcactcgattattaacgacccgacccgactcgacccggctcggaccggataattacatttgtagctatgagaagaaaaagaagaccacactactctctctatctctctttctctctatctctctctatctctctcatttcttcctgcgtca

SEQ ID NO: 841 - DNA, 3000 bp, Unknown
  misc_feature (1)..( 3000): cDNA_ID_2126813_gDNA_ID_1620327_Annot_ID_153523 3000 nt of promoter + ATG
agttttcatttcgtaaattgatttatggattcttaagctattattattggctaagtgattgaatcggtgtcatactatgtgttgcaggtgggttcgtactttgtggggcagtattatcaagtgttgcagcagcagccagatcttattcatcagttttattctgagcctagtagagctattcgtatcgatggtgattccaccgagactgctaattctttgctggtacacgactctctccttctgtttctactaatcccatttctcaagatccagtatttttctagaattcattaggttctagtggattagtggaacttaagttgataaaggtttgtgctttacttaattagtgaaagtttttgatttttcaatttctatgtgattgcagcatattcataacatggttatgtcactgaatttcactgcgattgaagtgaagacgattaattcagtcgagtcgtgggaaggtggtgttcttgtggtggtttcaggatctgtgaaaaccaaggaatttagcaacagaaggagttttgtgcagaccttttttctcgctcctcaggaaaagggttattttgttctcagtgatgtatttctgtttgttgatgagggtactgtttactatcatcagccttcttatttatctgaaatcaagcatgaggctcagcttaatcctcctacccgtcatccagatccccaaggtttgtttgtcaactttgtcatgttttgtttcgactgattcagtgtgatgaatttgttaaaacttaaaattgatatcactggttttgacttttcagtttctgactatgtgctggaggaagaggcaagcgattatgtgaacgcagtccaaatcaaagatgatcttgttgataagtacagtctgcaagaggaccaacatcaacctcagcatgaagactatgaagatgaagttgcgattgaggaaacacctagggaagaagttgcagttgatgtggtacatgaacatcgggctgcaccagtagaggaaccagttggtgaaaaatcaaagatgagttatgcttccattgtaagtgcacactctctttggtcttgtttagttgttcagcatagtaacaaaacaacatatctattgaaaaaaacgacctggaagcacatatcttacagtgttcatagttcatacttcatatatatgtgtgtcatggtagtcagtcaatagttgactgtatacttcctttgaaaagataatgctgtgaattggggattactatctcgtaccatgacgaataaccatgatctggtcttgtcatttgtacctaactttagtattgtctcatttgagatatagaaaattatctttttaattggagatgtgctgattctctttttctcagttaaaagttgcaaaggaagcagcaactgtacctgtagctgctacacaaccatcatataacaagagctctcaagatattaatgagtgggatcaaccaatgcggactccttcccctcagctggctgcgcctcttgcccctattcagcaatcaaactcatccacatatgtttccgactatggagcagaggcagaagatggctccggttttgaagactgtaagtttcttggaccattaaaagttttgaaatttctcatatgctcaaactcgcactaggatatgctatttggagttatttgtcatatattcatttctttctggtgtgccttgtttcagttgagttcaaatcagtgtacgttaggaatttgccttccgacatatctgcttctgaaatagaggaagagtttaagaacttcggtacaatcaagcctgatggtgtgttcctcagaacccgcaaggtaaataatcttcatttcgtgttttttttaatccttttctctatgtttatcttaagtgatatgaagagccaaaactaacaatcttatgcaactaaacatgtaggatgttatgggcgtatgttatgcatttgttgagtttgaggacatgacttccgttgagaatgcgattaaggtctagattctattccacagttacctcactagattaattttcatcttctgttcccctttcgctttgttcttatcattttccgtttgtgtaataataatatataggcttctcctatatacttgggtggaaggcaagtatacattgaggaacgaagaccaaatcccgctggtgttcgcggagcaagtaagtcttcttttgaaaccgtgctctatgaccaacaaattttgtatcataaaacttcttaagagcgtcttgtgaaagcctcataagaaagaaagtgtacagcatgtaactcattctgactttgatgtgtattgacttggtcaggaagaggaggaggacgtggaaggggtggttacccaacagaagcaccaagaggccggtttggtgggcgtgggtctggcagaggaaaccaggatggaggtgactacaggccaagaggaaatggttactaccgcggtggtggtcgctaaaagaaaaaagaatctcgtcaaagttttagtgctaccaaagaatgaaatgattcagttcttcttcctttatctacggaagaagtagtttgtaatttctattttgttgggtttggtttttggctcaaagaaacaaagattttggcttatatatgtttttctttaaatttgttatagatttagccatttagagcttttgactgttatctccctttgggaatggtttagttttggtataacatttcaatttttggtttccttactggattgaattccaaacttcatcaatgtgcttctgttcctttgtctccgagctttatgtactgctctgagacatcagcttttatggggcgacagaacatattttcactctgttttttttatgaaaaagaaattgaagaattattatcagaaaaatcgaaaaaactcgaagattaaagaattgggacccaacaaggtttttgatatatgtcggtgtttgattgtaatggtttcgcgaagcatcgtatgaatctttcagagagacagagggaatg

SEQ ID NO: 842 - DNA, 3000 bp, Unknown
  misc_feature (1)..( 3000): cDNA_ID_2126817_gDNA_ID_1620327_Annot_ID_153524 3000 nt of promoter + ATG
ggtaacataaaacggtaaataaaaactttagcgcgaaacagagtaatagaaaaatggtggaatttagtagtattggtatataattagttggtatcactgtttatgtttgaggtatgaattagtacggtaatatacttgatatgaatcgaacacatatatgtatctttagttgaagtatgaaaaaacttttttccattttagcgacatattttatctctacggtaaggagttatttaatcgaataatagtgagtgttagattttgtatacaaatattaatagttcggtgatagttacacacacatgaatctcgtataagaatgtgtatatctttatgtagtttcgttgtcaagtagactaaacaaaaactaatggagacaagacgaaaacaaagaactagtagtggaagaagatattaaaaccgaaaaactagtggggaaatagattacttcgttatagaaaagaagagatttttccaaatgttagaatattgacacatcattcaggttacatgtgagtgaggctagctaatatttttaatttaattttctttgataattaaaatttgaaataagtaattataatgggaatggccattaatgggtgtttgtgtgtgtgtgtaggtggagagaagagacaacacacagaaaggacgatagctttggcggtgggaggagtttttgttttagggtttgtgattgtttgtttgttggttttgaggtctgccatgaagaagaagagtaataaatatgatgcttattgattcttatttttacctaccaattcttattttcccaattaaaaatttaacaaggtatattagaaaaatgattagtatagcatgtccaattgtatattcaattatgatattgatttaaatacaaataaattttgatttttttggaaaattttggatgatataaatacaatatttattaagctattggaataatgaaggattaattttgtcatttttttcttttgtctctctgtcacttagtatctaatttctttcaaatctttcattttatttaattgcccattgaaagatgaaagtgattcctcaacttactgattaatacttgttgttctatttatttccaatgatttagatcagataaaaaccatacccactattgaaaacaaaatattaaaagtaaaatgaagcatcaaaatagaaaattgatgaaaacgagaaaacactaacaagaagtaaagcagcagctttttctagtgaaatccagtttcagtcgttttcattgggaaagagtgaagctttactggtatctcactttggaagtttggagttagtgagattcacagtatccaactatacatttcactacatctataaaacttctatctatagcatataaagtgattgtgacactattcaaagatatgcacgattatggtaaatgaaaaatctttctacactagattgtaactctgattgatttcaaaatttgcaaggcgcagcaaatacatggaacttcaatgaccgttcttttactcaatactcaaaccgggttaggtatgtttcaaagaaaaaaacagtttgacggctgataatctgttcttccaccactgttatggttaagttagatcatgaacatgatttcccaaaccaagaggagacgtgatagacttcatctttgaccctagacataagctgaaatatcttctttcagcttaaaccctttaacgaaacaaacacataacaatttgacaatcacatcaaaacatatcagaaggaactaatcccagaactcaaacttcatcgctcaagtaccacaaactagaagaagactagtctgttaaaggtagaaccattcaaataaagtgaaaattaaccatataaacaagcttcagaactctagagcattgaatacgcttctagcatcacttaagttagaacctgaacatgatttcctaaaccaagaggagacaggactcacacacaaatcatcttacatatagatctctaaaccaagacaggacacacacacaaacatatcagaaggaagtatcccaaacttgtacaaaactccaactccatagctctcaagtagatgatcgccattcatacaaagtgacaatcaaccatacttagacgcttgagaactctatggaatcaacttcatagcctaaagatgctaaatttaactaacttcttgcaatagaaacaatttcaactgaatgatgaatccgagaaaccagaattattgattgccaaatcaatctcaagataatatataaaacaacaaagcctgaactttatgaatccaacgatgtgaattaaaccactcttatacgaaattcaaattcaaacaacaacatataaccaaaaaaactcgtaaaacagaggaccctaatccataataagggattcttacaatcccctttgcattggagatggtggagctccgaggagactggcctgttgaagctcaatttcgttgatttgtgcctctcgatccatctcgatgatcaatggaacaacaagtatgagaaaagttgtcccagcgatccacgctgcttttccggtgctccggagcagtttcttcgatacttcgacggcatctcctgctgcgcgtcttccttgggacacgatctcggagtttgaaatcctcgctaatatgtttggatctccgccgccagatttaccggctccgattctcttcgccgccatcgagtgaacaaaagtttttttttttttgcttttttgggttaaaactttctgaatcgcttcggagagtgagaggatagtaacgagggtttcttctatcagtaggatgagttttgtttaccatgatttgggccattaaagtccaatatattaatcagctcaatgattgggccataaaagcccaattataatcactgcataatacttatatcaagggctctagatcagaatcagaacttaataaccaatgcaatatgcaaaagatgtctccggaggcaatactataagcgaggaattcaaagcttggtaatg

SEQ ID NO: 843 - DNA, 3000 bp, Unknown
  misc_feature (1)..( 3000): cDNA_ID_2126824_gDNA_ID_1620327_Annot_ID_153527 3000 nt of promoter + ATG
catttttctattactctgtttcgcgctaaagtttttatttaccgttttatgttaccaattcgacctatacgattaaaactctttaataagagaactaattttctaatcatctgaaagtattatatcaaaaggaaaaatataacagtgatttaattagtgtatacctgataatggctctatgttgggaacaccatgagagtagtaactatagctaacgaagcacttctgaaggtaaacttgtcccgagttcgactctccacactcactctttgctttctcaaatccatctttcacacattccccacaatctgaatttcccaaactaccctcacactgtcccaacacatacaccgactcatactgccccgcgtaaaaacctcctccgccaccaccaccaccggatgatccagttttcacgccgttctccgccataccaaacgccgtctcccttttcccgacaaacccaggatcgttagaatcttttttcccacagacacggaacaacatctccgtaccggaagtttgccggaatcctgaactctcataccggatataacatccagcgaggtgaacacgagccgccaccacattaccgtcatctctgccgccaccgcagagtttagaaacgagtttagggattttggagacgcaatcgtaacactgagcgttttggagatcgccacggcactgaaaaacaccgatcacggcggtggtgttatcagttccggaggttacggaagcgaaagagctttgtgatgattgagaaactaaagaagtgaataagtttttgagattctgagagaaaacaccagttgggtctggagatttctgatttgcacaacctttaaagatcagatttttataatcatcatcaccggagattgcaaagaatggtaaaaagaaccagaagatgaagaattgataggtgagtttcataattgagaaagacagagagagatttttgtttcttgatgttcaaaatctttttactagtttgtttctgtctaataaagtttgtgttgtttttatgtgtccggaaaaaagaaagttttccgttttttttttgtcttttgttttgaggtttaaagacaaaaaaatgtaaataagagcaggttttgtagtatgaaaccatgaaaaataaaggagtatacttttctttggatcttgcttcaagggtaagataaaaaagaaagaaactttgagacgacaagtgtttattatatagatttggtttaggagattatgtaatacagtatcaaaaaaaaatgattactgtttcttcttttttgttgttgaatttagtgaataacctttaatgccattaaatctgactttattgtctgaatttggattttgttttaggacattgatggaaaaacaccttttgtgtatatgtattttttgtttaaggcactaagatatattttgatgagtttgatttaaattgtaggctgatacgagaaggaaaataaaatcttagaccttgttgtaaatgtgaatgattgattcgattttattttgtgtccaaaacaaaacaaaacatgatcgttttgagtttacataatttcagaacataattgcgtagtaactggagtaaataataataaacctgtgtgtttttgtaaactacaaaagatattatcactatgattattttgagttaatgataagcatgattgtttttgcaggattttggatttcacattctatatgatatattttgagttggtgagtgtggaagatttgtcaacaacccttgatctcacaagaaccaaattgcctttgtgtgtttggattatagctctcttggaacctttgttgatgtattttacctatgcttttgcttaccttttatggtattggggaatgcctatctttgttgtatgttaaaactttgtgatcttagaatccttctacctttgtacttgttttctcttgtagatgaatgaaaacaagcatttgcccaaaaaaaaaaaaaaaagattgctcggagaagtagaggtgttccccaatgtttcaaaatcattaagagttaaagactacaaaaggaaagaactaatactgtatactgtaaaagatatgtgaaactcttaattaagtatagattccctatacaatattagtgaataatttttataaaataaggttaccagaactgcctgcattggatttaaataccggagaatttgagacatacatagttacatacacatgatagtagtaagatcaaaaacaaatcttaagaggtcaataagattcgcttatttattgagtttgacccgacccaattaagcccggcccattaagcagagaagaagaagaaagagagagggtcaacaaaaagtcacagtcgaacaagatactgagaaagaaacgaaatttcacctggcactgtcctcgcgtgtactctcacgcgccgacgtaatactctgccgtcgtcaccgacattgtctctacgccgttgtcatttgcttattacggccaagattcttcactaagtaagtcaaaatcgtggaatcctttctctgtaccgagctcgctttaaaccctaaccctctcgtctctgtacttagtaagttcttctaatttccgacgaaagtcttctcctttttgagtctcatcgtcatctgaaaacgctattagctctctggaagagaaaaaacaacgttttgttagagtttctttgtgcgattgtgttttcttaagaggaaaggtttcaactttcttaggatattcaatttctgagtcttttctgctacttgtggttagtctttgctgctaggtagatgtctgtagtcttggtttgttgttgatttgctttaggtctgtctttgcttattgttgtaatgttttgagttctggccacatttatttccttactgaacggctcttcacatcttgtttcttccgcattttgataggacgaggcaaatgagaagttacaacttgtttcacgaaagcaatcccacaatcagttttagttttgttggtgcagaaacg

SEQ ID NO: 844 - DNA, 3000 bp, Unknown
  misc_feature (1)..( 3000): cDNA_ID_3059237_gDNA_ID_1620327_Annot_ID_153525 3000 nt of promoter + ATG
gcaaattcctaacgtacactgatttgaactcaactgaaacaaggcacaccagaaagaaatgaatatatgacaaataactccaaatagcatatcctagtgcgagtttgagcatatgagaaatttcaaaacttttaatggtccaagaaacttacagtcttcaaaaccggagccatcttctgcctctgctccatagtcggaaacatatgtggatgagtttgattgctgaataggggcaagaggcgcagccagctgaggggaaggagtccgcattggttgatcccactcattaatatcttgagagctcttgttatatgatggttgtgtagcagctacaggtacagttgctgcttcctttgcaacttttaactgagaaaaagagaatcagcacatctccaattaaaaagataattttctatatctcaaatgagacaatactaaagttaggtacaaatgacaagaccagatcatggttattcgtcatggtacgagatagtaatccccaattcacagcattatcttttcaaaggaagtatacagtcaactattgactgactaccatgacacacatatatatgaagtatgaactatgaacactgtaagatatgtgcttccaggtcgtttttttcaatagatatgttgttttgttactatgctgaacaactaaacaagaccaaagagagtgtgcacttacaatggaagcataactcatctttgatttttcaccaactggttcctctactggtgcagcccgatgttcatgtaccacatcaactgcaacttcttccctaggtgtttcctcaatcgcaacttcatcttcatagtcttcatgctgaggttgatgttggtcctcttgcagactgtacttatcaacaagatcatctttgatttggactgcgttcacataatcgcttgcctcttcctccagcacatagtcagaaactgaaaagtcaaaaccagtgatatcaattttaagttttaacaaattcatcacactgaatcagtcgaaacaaaacatgacaaagttgacaaacaaaccttggggatctggatgacgggtaggaggattaagctgagcctcatgcttgatttcagataaataagaaggctgatgatagtaaacagtaccctcatcaacaaacagaaatacatcactgagaacaaaataacccttttcctgaggagcgagaaaaaaggtctgcacaaaactccttctgttgctaaattccttggttttcacagatcctgaaaccaccacaagaacaccaccttcccacgactcgactgaattaatcgtcttcacttcaatcgcagtgaaattcagtgacataaccatgttatgaatatgctgcaatcacatagaaattgaaaaatcaaaaactttcactaattaagtaaagcacaaacctttatcaacttaagttccactaatccactagaacctaatgaattctagaaaaatactggatcttgagaaatgggattagtagaaacagaaggagagagtcgtgtaccagcaaagaattagcagtctcggtggaatcaccatcgatacgaatagctctactaggctcagaataaaactgatgaataagatctggctgctgctgcaacacttgataatactgccccacaaagtacgaacccacctgcaacacatagtatgacaccgattcaatcacttagccaataataatagcttaagaatccataaatcaatttacgaaatgaaaactcgcctgcgtcgctccaggataaggagtcgccattatttaacaaaacccaagatctggatttaaacaaaaccctaagatccgatgaagatcgagtaaaagcttccaagaaactcaaattaatcagaagaacttcgcacagaaggaactggatagagaaaaagaagaagaagagagtatctctcaattgaatttgaataagaagagatctgaggaaggattgatgaagaagaaggaagtgagatttataaagggtttacagagaagaagggaaatggagagtgatagatctacacgagagagagattaaaagggtttttgtgaacactatagatagggtatggcaattaagaggaggcgctctttattccctttttatctacaaatgtatcttttctttccttttccctttgatttgccccataagttttgaatgcgtagaaaataaccctgaattcttataataacaatatgggtcctttatcttctttttattcatgattttaaccccaaaggttttgacattaccaaaataaaccataataacaaactgaatatttatattctcatgattttaaaccccaaaggttttaagattatcaaaccctttatattgccattacttactttttgttttctcgttttttttcaacatctagctttgattaatatgaaaagtagtcctgatgtttacaatggaacttgaaatgtaaaagtatgatacaaagtttgtttgatcaatgagagtttcttttaccaaacgatctgcagctttgttgttgtgccttcttgtccaaacaaagtcaacactggagaatttttgcctccaatatttgatctctctgatccaattgtggactttaaagttttgtgtttctcccttgactagcttcaagactatacgattatccccttcaaataacactttcttgtgtccttgtatccatgtgtgttgtattgccattaccaagctttgaattcctcgcttatagtattgcctccggagacatcttttgcatattgcattggttattaagttctgattctgatctagagcccttgatataagtattatgcagtgattataattgggcttttatggcccaatcattgagctgattaatatattggactttaatggcccaaatcatggtaaacaaaactcatcctactgatagaagaaaccctcgttactatcctctcactctccgaagcgattcagaaagttttaacccaaaaaagcaaaaaaaaaaaaacttttgttcactcg

SEQ ID NO: 845 - DNA, 3000 bp, Unknown
  misc_feature (1)..( 3000): cDNA_ID_2126804_gDNA_ID_1620327_Annot_ID_153520 3000 nt of promoter + ATG
ccaggtgctgttttctgccttagggaaccattggttttcattttcataaactcgttagtggttcttatagtttctcaatctcttattatcttacagattttggtggcacacaaaaatgaagtgtggtttgtgcaattctctaatagtggcaaatatctggccactgcatcaagcgattgtacagctataatatggaaggtaaatatcttagaccatttggtttctcttatttttccctaaagtcattgagaaagagaccagatgaattagctctgatgtgtaagagaaccttatgaggtttcttcttgtataactcttcacgctgtgaggtggaaaaaaatattaaggaaataacatttggatgtcttgtcttgaagcttggtatataaggtagaaagccattttgtgacaacaaaaaaggacaagaacttttatgttgtaattcatagtgatttgtcgttttgagccatgtaatgtaactagttcttagtacttcagggttgataaaatttctgtgtatttttctatggtagttttgagaccgtttctttaaggattaaacatggtaatttctaattgataaaatttggtattggactaaaacttcttgtttcaggtactggatgacaacaaagtcgaactgaagcacacacttgagagccaccaaaatccagtttcttttgtctcgtggagtcctgacgatactaaactgcttacatgcggaaacgctgaggttcttaagctatgggatgttgacacaggtgtgttgagacacacatttggaaacaacaatactggattcactgtcagctcttgcgcatggttccctgactcaactcggcttgtctgtggcagttctgacccagaaagagggattgtaatgtgggacactgatggaaacgagatcaaagcctggagaggaacgagaattccaaaggttagtaaaggttaaaagatttgcttatccgttttggtattcaaatacttgaaattcgaaatgcacaatttcctaataggtggtggatttggctgtgacgccggatggcgagagtatgattacagtgttttcggataaagagatccggatcttgaatttggagacaaaagtcgaacgtgttatctctgaggaacagccaattacttccctttcaatttctggtgatggtaagttttttatagtcaacttgagctgccaagagatacatctttgggatcttgctggagagtggaaacaaccattgaagttctcgggtcacaggcagagcaaatacgtgatacggtcatgttttggtgggttggatagttcgttcatcgccagtggaagtgaggattcacaggtaagcacattattttcgaccaagacagttgttttttggttgctgttgactgacattgatctgttgttcacaggtttacatatggaatctaaagaacacaaagccgcttgaagtgttatcaggtcattcgatgaccgtaaactgtgtaagctggaacccgaaaaatcctcggatgctagcctctgctagtgatgaccaaaccatccgtatttggggaccgggcaaaccgaacaaaccactgaactgattagataaccagaaaccgtagtagctttaaaccaggacctagttctagtagttccacatttgtgtatagttcatttctggttttttcttttttggtggtccttattggctttgcagaacaatctcttgctttttgagttttggtacactggttttggagaacttgatttgagatgagccatgaattgaaaccaaaccggtttaggcggtaaactgaaccaagctgtgttgaggagttaggtggcaattgtttggtgttcagagcaaaacttagctaactacttgtttcgttggtcatttgctaccatgtgggttccccgttattttaaacagaaaatttaattataatataaacttcggaaacgcccctaaacttatgatatttaagaatctgccaatattgttactttttttccttagtacagagacattattttttctaacaaacctgtttagaccaaaacttctgaaataattggcaatgcgtagattacaccaaaaaaaaagtttgaaagaaaatgtgttgcaatgattctaatatcttgaaaaggtatatgagtttcaattatagaactcaagaagattaataagtaattgcgagttcgaacatttgtgggtttcaattatataattaacaaaaaaatctactaagtgcatacataagaagtatttcacctaatacgattaagaatatacatgatttcagttttagtatctactatataaatatgaataccaacgtaatttaatcatatatttaaactacatatacatctatttgaaacatggaatttacatctttctatatttaaaaatatttgaaatgaagtttcaaaattttcatatgtaaagtatacgttatacaatctaaactagtattcaaaagatgataacatctacacaaaacaatcacatgaataggttaaatcaaaattaaaaatagaactgatataccctcttagatctcgaaatatttatcagtatgggccagaagggctatagttattcttagaaaaaaaatggaggtaatgtcgaaattgacgaaattaataggcgtatttttaaaaataaaggttgtttaagataatcatgaaaaattagcagccactgagtaacataattacataaacagagacacacttacttgaaatagaaaacaaaataagatccttttaacaacaacaacaacaacatctcacaggtctcgctaagacggtcctaaacaaaaaccaaactgtttaggtttcgtcgtcgacgcgctctcatcaacaaagtcccatacgaaatttaaccaaaactatatatcgagggacgaagcgcgtgacgttagatcggagatctcaccgagatcgccggtgaattagggtttctacttcctttgttcttgttaacgttatatgaaagtttggaattcaag

SEQ ID NO: 846 - DNA, 3000 bp, Unknown
  misc_feature (1)..( 3000): cDNA_ID_3059242_gDNA_ID_1620327_Annot_ID_153519 3000 nt of promoter + ATG
atcaccaatattatatatcaagttgagatcaaaattcatttatacgtttcatgagcacctttttctttgtccattagttgagaaagtaagatatgggttcaatattttataagaccaagacccaaaaccatttttctaatacttttttttctttgttaaaagttcattactgaagtaccatatttcaaatacttatgctttttcgtttccaattatttaatatgaaatttatttattttcatctaacatttttgctttttttctgaatcttctaataatattttcgtttaaatagaatctaaaaaataatatttgaaatcctctatatattaaaagagggatggttaatatttcattctatattattaggctactatttggactcttttgtattgtttctttttttattggtgccaacttaattctaccactaaaagtcgattttctatttatttatttttcgtcattcttgttactctagccatggaaatggaaacaaacggaaactagacagagaaaattattattgttactaataataaatgaattcgtcgccgtcgaatatcaactcaatgtttgttttttgggatgtgtaatcctcaaatatgcctcacggctacatcaaagaagagatactgtgtagccttagtgtattttaagcaccaatggatttcacagagttgtagcaattatttggtggtctgaactcgacattacacaaggcttccaatacatatacagaattccctttccacgatagattttttaaatactacttatatgcttttttcgttttcagttattaaattagctcaaggtgtttgagtattttggttggttccattaaggaaccaaaatacattttttattcaaatttcattcggttcaggtaggtttaagaaactgactcaataactaagtaggatttgaaagttttctaagtatttttcggtttagctttaagatatctgaaaaaccaaactattttgggatatatgtattaggattttctgttttttatttgagtaatttttgtaaattctgttcaattactcgaatatctttcgattatccaggtatctggaatattcaactcgaaaattttggttcacatattttaccaaaagctagagctaatttaaatcagctttactatatatatgttttttttgttttttctttgattagtatgagagttaatgttaataagaagtattcttagtttttccctctcttttctttgtttaaagtgagagttatagttacagtaaaactttttttttaaaatggtcccatcaaatactataaattaatgattgtataaatatatcaaaatatatttttacaaaaatccattgtagtttttgttagaattcattgctaatattttcaccatatcaatttattttttatcatctgttagacatgataaatgattgattatttttagttgattttagaagtatattgattataacgaaaaactctctttcaaaattacaaaataaggcaaatctctatatagattaataattaatatctttgttaattaataaaatattttagtctcaacattattaatctatagaggttttactaatatgcttataaaatcagaccgaaaacatactaagatacatacaggacatttataatgatagagcttctcagtgcaataactgttcttcgtggacagataaaaaatatctactatttgacaaaaaataatattgacaaaaaaatatatgtatatatatttatctagaaaaatatcgagtcattgatgtataacctgtttcgattttccaagttattatgtttaaagttttggagattttttagtttttatataacatgaaaaatattaagctataatctttataatcagttaaattttagtataaaattcaataaaccatcttttatttataaaaaaagaatgcataataataattaatatttatttcgactttagtttatgttttcattttttctccaaattcgaattaaatgatttattaacttttaatttaaatcaggaaaatttttcatattacaaatataaaaatgtagtttttaattaaaagagaaaaatgatatttttcaaacaaaactcataaataggatcgttttcaaagttgcccaatataatttcgtattcttaaatatagaaaatcacagatatcaaatataggactaacaatttaatgaattttatccaaagacgaaaaaaaaaattctaatatatgactaaccgtataaccttaacgatagggattagcgataggacttaacgatataaacacatatgtatatggttttcgacctctcttctccaaaaccatcacagagagagtcgccgaaataaattgaaatccggtgagaagattttggattcactccttccttctttcttcttctttatcatcatttgagctggttttggtatctctcctgacgaatttgaatctctcagccattttctcttctcgcatctgtgttttcgtgcttggagctgtacacgtttctttaatttgaatagtgattttgcgttcgttaattagccttctcgtacgagtgggctattttgggaatgatttaggtggttttaagttactgggtagtagtcactgctgagcgatttctgtttctcctgttgaatgattgattcagaaatttgaaattcacatcgaaaccaaatcttaaatcatattggtagctttttttttgttttgtgattagatactgtttttttatagtattaaattcgttttggtgtgagtgatttagtgtttgggaaattatttaatttagtggttattttctgatttagtgatgatttgagaattttgtgttgtttatattcttggtagcgggaaatttgtactttcctttgtggacctttcaactattgaatgtggaagatttgctgagaatcttagaaagtcatcatcatccatacgtaagagaacttttttttagcttgagagtgattttcag

SEQ ID NO: 847 - DNA, 3000 bp, Unknown
  misc_feature (1)..( 3000): cDNA_ID_2126983_gDNA_ID_1620328_Annot_ID_153557 3000 nt of promoter + ATG
aaatgcctcttgttgaattggattatccctactatattacttggtttctgattataactctagttggagttgaattgcgccttgcaatagtggtgacatttttgcatgtggtggtggtgacaggtcggagaagccaccaaatgcagatcagggagacaatcaggtatcaaacccgaggaaaattctggaggaggagtatatagactatgagaccaaggtaagaattgctgcttagtaggttacgattgattatttttattgagaccaaatatgactctgcatggtcgtgctctggttcgttgattttttttctttttctggtttctattcttcctcgtctcttatttggttttatcaaaaacttagatcattaccacattcagcattgtggacaacgtgaaagagcaattccaggttctccaaagcaaactggataagtgagtggaaacataattatgtgacctttcagtaatcggtatagatttattgtactaaagttctgaaatcctacattataccagaaaggacgaccggcgtgtgaaagagctgtttgatgacatggagaaaatgaggcagcaatttgaatccatagcgaggccaacgttagagatagagattccatcacctagaagcagtgttacgtcccctaaaagcagtgctacatcacccaaatctcccaagcctagcagtagtagcatgaatgcttcaactgaatctactcagacccaaaagccagagctgagcaattctcctcaggcacccaatcctgcagctggttccagtcaagagtttaaccctgaagccgaactagccgagctggaatctgaatttggtaaggtggctcgtgattactctgcagatgaggttgatggatgggaattcgatgaactggagaaagaactgcagtagtatgatccatcacacgcctgcctcacatacactgatatgtttttcatttactttctttgtttgaccataactccgaagttcctttgttaatctgtttggtaatttatggtaactgcctgttgacttttgtatgtctacttttttttttttttgctcataagtgttgtctcttatttaaaccaaagattgtaaagattacaaaagagtggaaacctccgctttcagtctccagacaaaaacaaaataaagataaaagtccaactaaattaaagcccagttgaagcaagaaacccttttaggaagtaattgatgtagtccaccgccgatttggttagtcattgcagggaactccaaaaccaccaggaaccaccaagacttcaagcttgtccgatggagcaacacaaaattcagagaatcccatcaatcttcttcatcttcgaattcgcaaaggaaaatctcccctgggtagtcatatcatcatcttcaaacgacatcagcgtagaacttaagccaatgaaacttccatgaacacctaaaagtaaaataaaaacactcgtttccaaaaaccaatatgacaattgactcaattgcataaaacccaactcaaaggcattagagaaaaccccaatccacaactctaatttgttcttatataattgaaatcgataagcttgaaaaacaaattgagccctttaaacaaaggaggttcaaggaattgagccctctaagagttagaacacaaaggagcaaaatcaaactggatctatagaaaacgagaacataaaacaaaaccgaaaaagaaatccggccaaaagctagcctaaaccgccggagacggacgacggagaagctagacaagagccaaccaccgttggtagaggaaccaaccgatggaggacggcgacaccggacaattctgctaaaggagccagaagattccgggaaagtaaccgaccaaccacatcacaagaggcatatggatgtcgggctgaagcctgtcaagcggactggaccggcccgctagactcacacatcacagtgggtttaataatgttttactgttaatgaatgggcctctcaagacaatgtgctaatccattccttgctagtttttgctcaacttttagcatgtagtgtttaacgttttccttgtgtatgcgtatctaaattggaacttatgtgaccatcaagacagtttggaatttcatcaaagcttgtcttgtgatgcctcttagtggtatggagcggatatcaattgtccaaattgtcctttggcagactcgagaaatgttgaaagcaaatgaaaccggtgaaaaggaaaaggttccttttttctcaagcttttaaaatcaattaaaattgtaatggcaacaaaaattaagtagattatcttctaaagttaagaaagtcatctaaaaaaacaattttggaattaaatccctagttaaacattttgcctttaactgtagtgtttcatttctgtgcatcaaaggttttgaaatcatcaaaactgttttgtgaattctcatcatggacacatacacatacacacaagagccaagagttgacccactcatcaacatcatggatctagacggcttaacgtccctcttcacacttttttcaacacatgttttattccctcccaatttctggtacctattaaaataaagaatagtaaacaaatcatcaaaactagcacgcaagccacttgtattggattgacccctcatgaattctattctattaattagagatacgtgacgaaacttacaagtgacaacaatttatctaattactaattaacaactaattttaaaaatgttatgtgattagcaaaatttaaatgtagttacgttatcgtaattctggatctattactataaactaaattatttttgacgtatgattagataatgtaatgataattgtaaagtttagtttgaaaaaaaacaaaattgaccagacactagagtaaagcttatgagcattgatggaataaatgatacaaagctctttaacatttgagtattccattctctcattaacggattctctaaagtgcgccaagcgtgcgcaagagccatcatg

SEQ ID NO: 848 - DNA, 3000 bp, Unknown
  misc_feature (1)..( 3000): cDNA_ID_2109090_gDNA_ID_1620328_Annot_ID_153568 3000 nt of promoter + ATG
catgtcacttgacaatgaaactgggttggatccagctggtattagagttcgagctgtatcaggactcgtggctgctgactactttgctcctggctactttgtctgggcagtgctgattgctaaccttgcacatattggatatgaagagaaaaatatgtacatggctgcatatgactggcggctttcgtttcagaacacagaggttcttttctcatcgttctttctattattctgttccatgttacgtttctttcttcattacttaaggcttaaatatgtttcatgttgaattaataggtacgtgatcagactcttagccgtatgaaaagtaatatagagttgatggtttctaccaacggtggaaaaaaagcagttatagttccgcattccatgggggtcttgtattttctacattttatgaagtgggttgaggcaccagctcctctgggtggcgggggtgggccagattggtgtgcaaagtatattaaggcggtgatgaacattggtggaccatttcttggtgttccaaaagctgttgcagggcttttctctgctgaagcaaaggatgttgcagttgccaggtattgaatatctgcttatacttttgatgatcagaaccttggctctggaactcaaagttattctactaaatatcaattctaataacattgctatattatcgctgcaactgacattggttgattatttttgctgcttatgtaactgaaactctcttgagattagacaaatgatgaattgataattcttacgcattgctctgtgatgaccagtttcttagcttcgacgataacatttgtcatactgtcttttggagggcattgaattttgctatggaaagcgctggagcttccatgcttgcattctttaccaattagcgttattctgcttctttcaattttcttgtatatgcatctatggtcttttatttcttcttaattaaagactcgttggattagttgctctattagtcacttggttccttaatatagaactttactttcttcgaaaattgcagagcgattgccccaggattcttagacaccgatatatttagacttcagaccttgcagcatgtaatgagaatgacacgcacatgggactcaacaatgtctatgttaccgaagggaggtgacacgatatggggcgggcttgattggtcaccggagaaaggccacacctgttgtgggaaaaagcaaaagaacaacgaaacttgtggtgaagcaggtgaaaacggagtttccaagaaaagtcctgttaactatggaaggatgatatcttttgggaaagaagtagcagaggctgcgccatctgagattaataatattgattttcgagtaaggacatataaatcataataaaccttgtacattttgtgattgtatgatgaatatctgtacattttatctggtgaagggtgctgtcaaaggtcagagtatcccaaatcacacctgtcgtgacgtgtggacagagtaccatgacatgggaattgctgggatcaaagctatcgctgagtataaggtctacactgctggtgaagctatagatctactacattatgttgctcctaagatgatggcgcgtggtgccgctcatttctcttatggaattgctgatgatttggatgacaccaagtatcaagatcccaaatactggtcaaatccgttagagacaaagtaagtgatttcttgattccaactgtatccttcgtcctgatgcattatcagtctttttgttttcggtcttgttggatatggttttcagctcaaagcttacaaagctgtttctgagcctttctcaaaaaggcttgctcagtaatattgaggtgctaaagttgatacatgtgactcttgcttataaatcctccgtttggtttgttctgctttttcagattaccgaatgctcctgagatggaaatctactcattatacggagtggggataccaacggaacgagcatacgtatacaagcttaaccagtctcccgacagttgcatcccctttcagatattcacttctgctcacgaggaggacgaagatagctgtctgaaagcaggagtttacaatgtggatggggatgaaacagtacccgtcctaagtgccgggtacatgtgtgcaaaagcgtggcgtggcaagacaagattcaacccttccggaatcaagacttatataagagaatacaatcactctccgccggctaacctgttggaagggcgcgggacgcagagtggtgcccatgttgatatcatgggaaactttgctttgatcgaagatatcatgagggttgccgccggaggtaacgggtctgatataggacatgaccaggtccactctggcatatttgaatggtcggagcgtattgacctgaagctgtgaatatcatgatctctttaagctgtcctgtcagcttatgtgaatccaatactttgaaagagagatcatcatcaattcatcatcatcgtcatcatcatgatgctcaactcacaaagaagcctgagaatgatactttggtgcgaaattctcaatacctctttaatattcttattgaatgtaaattatacaatcctatctaatgtttgaacgataacacaaaacttgctgcgccatgtttgtttgtcttgtcaaaagcatcaatttgtgggttatacgtagtgtagaggatgattcaaatttgtgataaatttggtaatcaaagttaattctgaaaatgcaacaccacatgaactatgtcactaaggcctagaagatcgttatcagtaatagactaatagctcgccaccatgtatgtgaagttgggaatcgataagtcggaagagtgagagacgtggcttaacctggtccctctaaatccatacgatcgcttaatgaaatcctcggaataaaacagcagcttctcctctccaaccaaataaaatcctttaagctcccctctctctcccattctcttctcccttttctctgtttcgcggcggagaaaattgaa

SEQ ID NO: 849 - DNA, 3000 bp, Unknown
  misc_feature (1)..( 3000): cDNA_ID_3059262_gDNA_ID_1620328_Annot_ID_153571 3000 nt of promoter + ATG
aattctgtaacatggttcaaattgtttacttgctcaacaaatgctacggctgactgtagaaatgcctgccacccatatagatccacgataacattaaagtcgattctatgacgccttaccaagttaaatgcatctttgaaccgttgctgagctaacgcattcgtaatggaagagaggaccagctttctgggatatatgcattcgagattcccccgcatagtttgtaatatcacagcagcttcatctccattgaggactcctatcacttttgcacctctttcccaaatattaacatagctcatattttcctcgtctcgccttctaccatcaataacaaagaacacatttccaagtgccacatctccattcagtacatccttggtatcgacaataaagagaaaatcctgtttggtcaaaataatcagatgggtaactacttcattggccaactctgaataaaatgagaaactgctacagttattacataggttcttcccgttgatggacagtctacccatatcatcaagcccacatatcaagggtttatgcaccccactagcatcaacctgtgccaccctcacccaaggacaagtcgatggaaaacatacactatcatcactactacgagtttccataatttctgaccttgacgcatatccaagcactttcccaccctcaaactccacaaaggctgaatcacgcttactaggattccaggcaagagccaggaccggtgattcgagaagtgtctggaaagtaatgctagccttaaagccagagcaagtcacttgatcaggaacatgatcctcatgacagactacttcaacttcttgtaaataagaaccatgaagctctgtgtcataccctcccgaagagagacacttgttgtggctagaaccataagcggagacacacagaagtgagtggacatccaaccatagaagatgtacaaaagagcccagtgctgttttacagtctgaaatttccacactgaagtctttgccttcgagatcttcccaagtattaggtgcagggaactcaacaaaagacaggtttccatctgacaaaaacacagccagacaattcttagaattccttgagtaatatgctatatctctgacagcagaagaaaaactaaggctgaacaaatacataggaggtggcatcaaggacaaagatagtggtgtcacgagtatcttggagttatctatgacaaaggctgttgagtcctccatgaccgctgttacccacataaagtggcgaacagacacctgccctgacagagtccaacatattaactgcagtggctttgttggatcccacatgactgttaccccagcttcccttggatacctaatctcctgtttcaggtaccagtggttgttgctaaagaaccacaccctaatggcatcatatgttttacaactaacaacccctgcaagaagatctgatgcagaattccatttcagattttcacatgattccgtagcatcttctggttcaccaattctaaacgagcttctctcaagtccattcctctcaaagaaagcaatcgatggactgctatcatctgacttcctcttataaacagctgcgattttagcaccactcggcatccattcaagaatcccctgcgtaaattcttttgtttctgaagaagactgcaaagcaccggaatcactttcccatatcttaatcttcttagacatacaaccagactcataaacctcacccatagtcgcaaaatactttccatcacccctccaggaaatggaaatacccccacaatttacagacaaatcattcgtttcacctaaaacagtatttaattcagatggttagcaaataaacaaaagctgttcacgataagtttcaactcaaacccataaatttaacccttatgcagtcaatatgacaagaaggtaaggggtccttacgtacgtaaccaccttcaggaacctctccaagcgccttctcgtacatcaaagcccaatcataagtcattacaagcaactgcccaagaccagtaatcaatccaagtagatctccagtcggattaggcgagatacacttgacacctccttctatatttccaactagctcagtcacatcactctccacattatgcactagcaaaagcccatgagaagtcccaattaatagagactccttctccgcgagataatcgaaagccgtgatgaaatccccaggctcaatatcaatactgcagacctccacaggcatagcactctttgccccagcgctttcattctgccacaagaaatacataaacataaagagaaagactttcgatttaaacagaccctactcgctaagttcacttgcaagttcatccacaagaaacttgaatcaaaagcaaaataaaaagaaaaatccatctttagaccaaagtccccaacttttttctcactcgtttccttattaagcagaaacaggattaaccaaggaggaaacgaattctctcacagaaagcaattcacttacttggaaggaagagagctgaagggcgtaaacgaaattagcagaagatgcgaaaaataagcgactttggtcgatgtcataagctgcgaactgtacaacttcttcagtcgaatgcaattggatgttctgaggaacctccgagaaaagcttcaaatttttcattttcgaagaagtaagaatcagtacaacatcaacgaactttgcagctacagatccaggaagcagatttaaaccccagaaatcactgatataataatatttagggtttaacctaaaacacgccttcttctctgtttttcttttcttctctgtttcctctctttcgttttgctataaacttgaaaaactgacccggtttattttaccacaccggttatcttggtttataccggtttagtttgtaagaaatataatattattatccggccactttcttcagagatcagttttctatgcctttccttgctgattctctcactagtgaggaaaagcatcatc

SEQ ID NO: 850 - DNA, 3000 bp, Unknown
  misc_feature (1)..( 3000): cDNA_ID_2127027_gDNA_ID_1620328_Annot_ID_153570 3000 nt of promoter + ATG
gactcaggcataagaaggaaactgagacaacaatataccagatataaggagttccataaaattgggcggacttgttccatatcggtttgacttcagcatataggtcaagaactatcattttgccaaagggaactgaatgtaagagtgcctgcagaaagcaagcgaggctgtgatattgaatcaatcagcattcatcatatacactaaattggatgtttactttcaactgaggcggcttccagaatttggagtctgaactaaaaagccaaccctgcaaaaaggtgagtctcaagtaagaaaacattcataaatagagaaatctctgccccgtcattctagattgttgttacttcaatactaaaatctgtgtctgtgtgtttacagttttctaaagtctaaaaagcatcctaaagtacatacgccactgagaataaaatggaaaagaaggcatacttgcattaaccatacagcattcttgtttccttttgacatagctttgtacactgcagctcctagtgaagatatatattcaggttcacttgtgggaggagtattctcattgaatgtatcactgcattaacacaagtaagattcgtatcatcattccaaacaaagagagttgatttttcttgaatcgtgcatttttgcggaaggttgttttcaccaatacctgcgtccaggatactggaaaaacttgtaagaaataatttacctcttaagtgcaaattgaagataattaccagttatatatgtttgtaatctctccatattctgagacagtaacaaggtaaaatcaaagacatataaacgtgtaattatatcgaaaagactgtgatcaggtgggagctttgttagtatgtatctaatttgagaaaatgctttcaatggatcacacaatttgccaagattaaaaaaaaagaaatagcttcagggtaccttcagtttgttgtttaataaaagcctctccaatttcaatgaagagagggtcagagggattcagaaggtaagtgcagcaccagcgagaatcaccatccaccgtgttcctgagaatacacaaatggtaacggtaaggttattgtcaatgtgaagacaaggcagtaaaaaaatagcatttttttctcatcacacaactcaaaaagtttcatccattggattgaaaaaagtttccggacatgatttacggaaggaacacataccagttatcaagtcgagttatatttgcctcaggatatatctttctcaaagctgatggaacattgcctgagaatgatgggagtactaggaaaggaggaaacaaaagaaaatataagatgctatgagaacaatcaatcgagtatatgaaaagagaagaaagtgattgttcttggacctggagtcatgccaaacttcaacatccgagaaagtatctgtttctgcaaaagcaactggtcatctaaccagtttttcgataatggaccaccccaactgtgatgtagatgtagttagagatatgaattatgtgagcttcaagaatgaaagataaatcaagctcagaaggagcactggagataggagcctgaaaatatcagagatcaggttatttacgcgtgaagatttcccatgcgagcccaagcaagaaacgctggtccaccaaaataatcatccagatcttctttgctgatattgaacctctaaacaaaattgatatagaacttggttagcggtatatatcaacttatattaaataaaaaagttgcaatatctaatcatgtcacagcaaacaattactaatgcaatctgactttttaccttgaaaaccttttgccaaatagcttcttgtccagtgaatgctagaggcaggttaattccttgcaatgccatccagtcaatctctctctcccatctctcccatccccaccaaacatatgaatctggaaaaaacaagaaagcaggcagtagcaggagtgtgattctagtgaatcatgacatgaggaaacttttgattccaagaagtgtatatatcttacagctagatgtaacaacattttggtaatagttccaagggacaggacgccggataaagatgcgtttagaatctatacgaggtagatgtccaggttgtggaacagaggcaacctgaattccaccagttttgtcccaagaaacatgagcattacatttatacttcaaataccaatggagcccagaagcaatctcaactccagttgtgcctttaatcctgagacacaagatggcaaaactaaaagagaagaattttaagtaaaattcgatccctcatcaggaaatcagaagatacttacagaatttcaggtccaattcgtcccgggccatcatagttttcaattacaaagcagctggtaccaccacaagcatcctattgtaacaaaaaacaatcagtactgaagaatcacctagcatagtggggcctaaggaaataaaaggaagaacctttgagataattctgagctcaaagctctgagaatgggtgggaagcagtctctgcaataaaccctttgctgctgattcttgtacagaagaagttggtaataaagaatccaaacggtcaagcagaccatcaatagttggatgatgttttgacacagtttgagagtgaaaagaaattatcaacaaaaccaacaaaaccaatttgatggaatgcatgatgatgcttttcctcactagtgagagaatcagcaaggaaaggcatagaaaactgatctctgaagaaagtggccggataataatattatatttcttacaaactaaaccggtataaaccaagataaccggtgtggtaaaataaaccgggtcagtttttcaagtttatagcaaaacgaaagagaggaaacagagaagaaaagaaaaacagagaagaaggcgtgttttaggttaaaccctaaatattattatatcagtgatttctggggtttaaatctgcttcctggatctgtagctgcaaagttcgttgatgttgtactgattcttacttcttcgaaaatg

SEQ ID NO: 851 - DNA, 3000 bp, Unknown
  misc_feature (1)..( 3000): cDNA_ID_2127039_gDNA_ID_1620328_Annot_ID_153575 3000 nt of promoter + ATG
acacaacaagctaaaacgatgtattcactaattacttcacttcccagaacaacattgcattttatttttctatgtaacaatagaagatgacttggttcacatatagttaacatctatatatggtagcaactatacaatgtaacacatattcatctcaaactgtaagaattggaggctcaccggcaatttgacaagtctagatttatgcgctatagcccttaagatggcctgtttgatccaccagtagacataagttgatagtttgtatcctcggtcgggatcaaatctctcagctccacgaagcagccctatgcttccttcctgaataaggtcttgcaaattcaaacctttgccttggtaccctgttgcaatagaaacaaccaacctacggtaacaacgagtaatcttttctctcgcttcttttctacggcatagtatttcatttgcactacgcttcttcttccctctgccactggctaacaaaactgataccatttcattctcttcaacacttgttcccaaattttcaagttttgctccttcctattaattaccagcaaaggtattattaccaacaaggatacacaatgtttgaatctttccattaatgggccatgagagatattggataagaaagaaatgatataccttgaggtacaagcaaagctgaacctcctctaaacgactcaaaaacccagatcgtgaagctccaacaacaggaacactaattgtctctgcttctgcttctacgccagcattttcctcttcttcaggctccaaacgttcgtaacctactcttcttcttcttctcctcttccttctcttttctgactgaattccccatttctcaggtttgatcatcacggagctatcaaccactctatccactgtagtgtcaccgcaaaccagagccgtactaagctttatagaaaatggggatgataaagaaggagatggttgacattggtgagtcgttctgagtaagggagagattgtagggacaggaggagacggacacatagttgcggtagctgtagtgggaatcgtcgtcgccatggatggatgagctgcagagcttcccacaccttagatttttctatttttgttatctatcttctttttggtccaataaaaatggaagaagaagataattctctcttgtgttacttacttatatcatagagcctctctctgtgtcatatcagttatccgcaattaaatttgggtggagttgctttctttttttgtaattaaaaaaaaaaaaaaatcttttcgatatgcaacaattttggaaaaggaaaccaaaaatgagaaattacagcttataaatgttttcggattgcagtatatacaaacccaaagctccatagttttcggacccttaattattaatgcaaacccaaaattcgagtggtttcggacccataaaaaggcccaataaaattggattcctagtaaattgacgcatatgatgtcacatgtacagtgatggctgaacgagagataatggaccaagtgtcacggtctagaccccacgtgcttgagggtgggagcaacgcgctgttccaaagcttgtctgtggtgaacacgcgtacctctctgaatcctcgtgatcttacggtgggctccactaatttcgctgacgtggaattgtccacacacagtactcttcttggcactgtacgctcaacacaagaggagtcaattatgccaccactaactatatattaagattagactttaacaacaaaaaacctatttaaaattagatttttatatggaattagtaaaagcagtatattcgtacgagttccaaagcactcagagcctcaaccattggacgtcattcatagatgtacgaattaataatcattgtctttagaaatagtctgtaaagccgtctagatggtaagtgtttgagtcaatcgtttttgtagacggtttcatacgaaaatgtaattcaaaaagctgttttgtaaaaagattatggattaagtttggacgtagtttaattagacgtgtaaagtatacgaatacgcaaaactaatgatagagaatcaaaggtaaaacacattttgattccgaagcgggaatcaatccacctttatccatacgcatatgaataacaaagtctatcttcttttttgttctgatgatttaaagtttcaatactattttgttttttggatcaaaatattttttaattcactttttaaacaataaagtcttttttgggtatatagtattcttaaagtatctgctgctttaattttggtgatgcatctgtacctaacaagacaaatgaataattgttgatataatttcattaaaatagacacacgtgaagcaattggatttgctaaatgagataaccattccaagtcttaaaagatagatcactagacaacattgtttagtccttattctattctctccccactttcaaatcaattgtctctttcttcctgtatgcattatcccatgtgccctcaaaaaacattcctcctaagattgattagtctctcggactatacaattaatatcttaaataccagtttttaattacaaattactttctcactaactaaactttgaatcttttttaaaaaaaatatgtaaccacatttggatggattggtgaaaaacaaaattgcgggtggaggaggtccgtgaacatgtgacgagattaaaatgacacttgggtgaccacctttttggccctctttagctccaaggctatatatatatatatgcatacatccatccatttgtacatatatacgtgactcatcgtctttttcactcccacacgttctgctccagcgatactgtgagagaatctctgtgtggtactctttcatttttcctttcccattttcaaatattccgttacgatttcgaatatttcccccattgattatttcctttaattctcacgcttattagcttaatattggaatttttaggttctgaattcttaggctggaattgaattctgaa

SEQ ID NO: 852 - DNA, 3000 bp, Unknown
  misc_feature (1)..( 3000): cDNA_ID_2990406_gDNA_ID_1620328_Annot_ID_153574 3000 nt of promoter + ATG
ataataagataggagaagatgcaactgacaatctggtgtgcagaacaaaaacataaaccaagagtaatagcggtaacaaagaagccaccttcattgttccaagcaaacagttgaaactcccaagaagaaaccttgtgccaattgccatccaaaaatttgagctcaagccaaaaagagcgttgaaaattgcactgcagtaaactacctaatcagcatctagagacgaagatggatacaaatcaaaatcatgtttaatgatactaacattgagatagttcccaagagtataatgggttttcttccataacgatcagccacaattccccagaacacagaagtcagtgctcttccaagcataaaagagcaaccttccaagtaataagagatatcattagaacaaacggtatagatatggagattcactacagaataacaagtgacagaggcaaatgtcttatcagttctcaccaacaaaaccagcataaaacccaatatctttctccgtctttgcgacaccaaaatcctcaatctatgaaaacaaagaagacatgtcagacttactattaagagcctgtgacaaaagaacagtacagtactcgatcaaaaactcaccatatagtagaggaagggatagagtgaggaaattggtagagctgcaaacacatgatatcaaataagaacgtatgaggaatcgcataacgaatcattactttcaacacaagaagccaatttcaaaacatttagcagtaaaaccattaagcaaatcaatttccggaatctcgtcaaagtagttgacaatgacgaatagtcaaaaacaacactatagccgaatccgattgacaccaaaaatctcaaggaaaattgacacaatagtaactgttatgagaaggcgaagaaggtgttacaagtggagaggacgataatccaaacgaaggaaagctcgaggtaaggatatcctcgccggagctgcttcatctgctccaccttacagccgggacatccgtcgtgatagttctgcttctccaacaacgcttccttgtactcctccgccatttcagaattcaattccagcctaagaattcagaacctaaaaattccaatattaagctaataagcgtgagaattaaaggaaataatcaatgggggaaatattcgaaatcgtaacggaatatttgaaaatgggaaaggaaaaatgaaagagtaccacacagagattctctcacagtatcgctggagcagaacgtgtgggagtgaaaaagacgatgagtcacgtatatatgtacaaatggatggatgtatgcatatatatatatatagccttggagctaaagagggccaaaaaggtggtcacccaagtgtcattttaatctcgtcacatgttcacggacctcctccacccgcaattttgtttttcaccaatccatccaaatgtggttacatattttttttaaaaaagattcaaagtttagttagtgagaaagtaatttgtaattaaaaactggtatttaagatattaattgtatagtccgagagactaatcaatcttaggaggaatgttttttgagggcacatgggataatgcatacaggaagaaagagacaattgatttgaaagtggggagagaatagaataaggactaaacaatgttgtctagtgatctatcttttaagacttggaatggttatctcatttagcaaatccaattgcttcacgtgtgtctattttaatgaaattatatcaacaattattcatttgtcttgttaggtacagatgcatcaccaaaattaaagcagcagatactttaagaatactatatacccaaaaaagactttattgtttaaaaagtgaattaaaaaatattttgatccaaaaaacaaaatagtattgaaactttaaatcatcagaacaaaaaagaagatagactttgttattcatatgcgtatggataaaggtggattgattcccgcttcggaatcaaaatgtgttttacctttgattctctatcattagttttgcgtattcgtatactttacacgtctaattaaactacgtccaaacttaatccataatctttttacaaaacagctttttgaattacattttcgtatgaaaccgtctacaaaaacgattgactcaaacacttaccatctagacggctttacagactatttctaaagacaatgattattaattcgtacatctatgaatgacgtccaatggttgaggctctgagtgctttggaactcgtacgaatatactgcttttactaattccatataaaaatctaattttaaataggttttttgttgttaaagtctaatcttaatatatagttagtggtggcataattgactcctcttgtgttgagcgtacagtgccaagaagagtactgtgtgtggacaattccacgtcagcgaaattagtggagcccaccgtaagatcacgaggattcagagaggtacgcgtgttcaccacagacaagctttggaacagcgcgttgctcccaccctcaagcacgtggggtctagaccgtgacacttggtccattatctctcgttcagccatcactgtacatgtgacatcatatgcgtcaatttactaggaatccaattttattgggcctttttatgggtccgaaaccactcgaattttgggtttgcattaataattaagggtccgaaaactatggagctttgggtttgtatatactgcaatccgaaaacatttataagctgtaatttctcatttttggtttccttttccaaaattgttgcatatcgaaaagatttttttttttttttaattacaaaaaaagaaagcaactccacccaaatttaattgcggataactgatatgacacagagagaggctctatgatataagtaagtaacacaagagagaattatcttcttcttccatttttattggaccaaaaagaagatagataacaaaaatagaaaaatctaaggtgtgggaagctctgcagctcatccatccatg

SEQ ID NO: 853 - DNA, 3000 bp, Unknown
  misc_feature (1)..( 3000): cDNA_ID_2106965_gDNA_ID_1620328_Annot_ID_153573 3000 nt of promoter + ATG
aattttacgtaccgcatcaggtgcatggcaagttgcttctattgcataaactgcatcgaaactgttttccgggaatggcatcttcatgaagtcagcctgcaagattaacaagtgacagcaaccttcatcatgttgtcctttgcaaggtgttttcttattcaaaacatgatttatagcttatgcaataattacaagaactatgtactcaactgaccttgacaaagttacatgtcttgtcgacacctgcaagtcggtttagttcctgcaaagagaaagatgccaatatgaattataatggacatagcaggaatgcatcatctttcacaaatgtagatacgttaccttgcctctggtgatctggtattcgttattgttgagcccggtaacaactgaattgctgcaacagagcaaacacaaacacacttcataattgaacaactatgttcctaaccataaaatctatttcaaaactcatgtatagtagaagcacatgatgaaaagagtgtgtgtgcgcttttggtatgtgtagtcattttacctgaatcttgcaatttccctcaacggtccaccaattccacatcctacatccagtacctactcagaaacataatggcaatgagcatctgatggcgatggcgaagggtccattttcaagtgttcggttaaggtttaacaaaccttttgtcctggttggatgccaagctgaagagcaagaaagtgctcgtgtcgcttaatactctctcgaagcgattctcctttccatctacaaacccaaaattcatgtcaatcaatacatatataactatagtatcagtagcatctatggctgtaagaaagaaagtatattgaaagtcaagaattacctttgtgcaaaatggaaggattctccccatccgtactcataaaagctagtagcaaggtcatagtacttattaacctgaaaatttaatcaggaaatactcattccaacaggcaatgatttgttaaagaaattcaatacctagcctagtgaagtagtactttaactattttaaatatgatctcctggaacaatataggcttttttagttgtcgcatattctcaaagtcaggagacacaactacaaggaacaggcgtgtctcaaggtggtgaaaattttataaaatgtaaaaaaaaaaaaaaaaaaaacatttttgaatttaccatgtcagtataattggcttttctctcttcctcgtttcctccatggaagacatgatattgctcatacctgaatcaccaaatcactaaaaattaataatgtccaggacaaaaaaaaaagtccaccaaataacattttttttttttttttaattcatagaactctgaaaaactttggccaaaaaaaacaaaccaattgttctatatagatagatagatgaagtcaatgacaataagattggtggtcgggccctcaagaacgtgacagtagtgaaatacacgtcaaatggatcttttatagagccaaaaacgaaactagggaccatctctcactcatcatttttcttttttctgctgtattgaaagctcagttccatgaagcattaaaaaccaaaacaaacataaaaacagaggcgaaatccaatgccatcatggtattcgtggaattggtaaaaagcgtaaacgtatggaaatagtaggctcaaaatatacgttgattccaaaaatatggagatgctacacaaaacaacaatcaaatcttaatcttaggagttgattatagataaaaaccaacgagatcaatatgcatgagacgaaaaaagcgaattgtaagtgaatcggagatggaaactacgatcaaagaagaagggagaagaaattacttttcgacggcggtgagaacatcggatttatcgatcttcccaccaagattcgacgcgagatccatagcacttatgcaacaacggacgagatctgcaaaaagtgagactgaatcagaataaggatcaaggagaaaagagaaatcggaatcggaacacacattggaggagacttacgagagagaggataaagatgaatcggagtggtggggaagagctaaagaggcacctgactggctttagtttataactagtaagatagagaggtcacaagccgtcaatcccagcttggcaatgagagtgtattaccattatatcctctctacttgtccaaattaattatgaaataattagagcctatataactctactctctagtgttaagcatattctccactatctcgtaatttattctagtataaaataaaacctttactatagaatctcaccacctaccaagaacaggcgcgacattcgagtggttaattggttttaaatctagatcaaagattgaatctacctactacttccttgatcttctgtttttgccatcctgattcctgaatgtttttaagtgtttgtagcaagaatatttgactttctactaactccaaacctggtttaaaattttgtgaaatattcaatggtttcaagagaaaaaaaaacttagaatttttttactagtccactacttcactcctactttaatctctaaactccaaattctgattcttaactcatactgtatggtctgtatatgtttatagtttatacacatgggtatctcaggaacaattgctatttttatttttatcaatattatcggatttgattacatgtaaaacacaacaacaatagttagtctatgtcaacaatagttaattagaaaatgactaatctacctatcatttaattaaaaagttatagattacgttgtgattaactagagtagtactaatagttagtctatgtcatgattaacgtaggaaactaggaattgaccgtttgggttaaaattccaaaggaaaaaccaacttcaaccacacaccacatatttctctcccgcctaatcctccgcgttcccaagccgacgcgccgatctttcttctactacttgtcctccggcaataacaaactaaccatttcgaaaagtaattatct

SEQ ID NO: 854 - DNA, 3000 bp, Unknown
  misc_feature (1)..( 3000): cDNA_ID_3059258_gDNA_ID_1620328_Annot_ID_153572 3000 nt of promoter + ATG
tccttgttggtaataatacctttgctggtaattaataggaaggagcaaaacttgaaaatttgggaacaagtgttgaagagaatgaaatggtatcagttttgttagccagtggcagagggaagaagaagcgtagtgcaaatgaaatactatgccgtagaaaagaagcgagagaaaagattactcgttgttaccgtaggttggttgtttctattgcaacagggtaccaaggcaaaggtttgaatttgcaagaccttattcaggaaggaagcatagggctgcttcgtggagctgagagatttgatcccgaccgaggatacaaactatcaacttatgtctactggtggatcaaacaggccatcttaagggctatagcgcataaatctagacttgtcaaattgccggtgagcctccaattcttacagtttgagatgaatatgtgttacattgtatagttgctaccatatatagatgttaactatatgtgaaccaagtcatcttctattgttacatagaaaaataaaatgcaatgttgttctgggaagtgaagtaattagtgaatacatcgttttagcttgttgtgtgtagggaagcatgtgggagttaacggcaaaagttgcagaagctagtaatgtgttgaccagaaaactaagaaggcaaccaagctgtgaagagattgcagagcacctaaacctcaatgtatccgcggttagactagctgtggagcgtagcagatcccctgtttcgttggaccgagtcgcgtctcaaaatggccgcatgacattgcaggtacttgagttttccatgaaaatagaaagctaagagagactttggactgatttatcatgttcaggaaattgtacggggaccagatgaaacaaggccagaggagatggtgaaaagggaacacatgaagcatgagattgagcaactcttaggaagtcttaccgctagagaatctcgtgtattgggactttactttgggctcaacggagagactcctatgtcgtttgaagagataggtaagtcgctgaagctttcgagagagagggtgagacaaatcaatggcattgctttgaagaagctacggaatgtacataatgtgaatgatttgaaaatatactattcctctagtgaataaaaagcaaataaattggttcttcataatcattaatagcaaattaaacaaaaaaacagagtaaacacatatattggatatattgggtctgtacataatatgggttcatgtctctcctttgtggagattatggaggatatacagagaagcagaggacaagaagatgcaaacggaataactaagcaaatctagaccggtggcgatagtaaccatcttgcttctctcgaacatcttcactagcagaatcataacaatgacatgtcccactttggttttaagctcatcaagtgagctgatcttcatccattttggtctctccttcattgcaaacataccaaagagggaagaggatctaagggcacgatcggattccggtggaacatcatgaggcgagtgactgatgaagagtccatacaaacccatactaaatattaacatcacagtcccagctagataaacatctgcaatcaaatttcacacacaagtatatatgagtattataactaaacaaacaggcttatatcataatcatatatatagcaaattagttttaccgatagcttcgactaggcgtaaaaccatttggccggtatggatgccttttgaacagttagtccagtagactttatatgcctccactatgtagacacacccctacacaatgagccatgagattagtactaaaatggtgtatgcgtggcaaaacatttcagactaaaactagaccacaagttagttacattgagaaagcagagtagcgaaccagccagcgaacctcctactgccaaaagcgctaggaaccggaaatcaaatattatctgctccatccaccaagaaaccagatatcagaacaaatattctaaagtctcaaaatcaatatatagaagaagaaagagacaaacaggcttgattgatattaccctctcaacgttggattcggtggagcgaaagaactgagcaaacgggctgtcgtctttgcgagttccgtaagaactaggtaacgtgtttccgttgacgggaatcgaggtaggaatcgatgatgatgcggatgactctggaggcgatgagtcaagagttgctaacggcaagtggaaacggcggcgcgtgggtaacacgagatatctcggcaccgaaagggagagcggagtggctgagatcaacgaggagagagccatagataattacttttcgaaatggttagtttgttattgccggaggacaagtagtagaagaaagatcggcgcgtcggcttgggaacgcggaggattaggcgggagagaaatatgtggtgtgtggttgaagttggtttttcctttggaattttaacccaaacggtcaattcctagtttcctacgttaatcatgacatagactaactattagtactactctagttaatcacaacgtaatctataactttttaattaaatgataggtagattagtcattttctaattaactattgttgacatagactaactattgttgttgtgttttacatgtaatcaaatccgataatattgataaaaataaaaatagcaattgttcctgagatacccatgtgtataaactataaacatatacagaccatacagtatgagttaagaatcagaatttggagtttagagattaaagtaggagtgaagtagtggactagtaaaaaaattctaagtttttttttctcttgaaaccattgaatatttcacaaaattttaaaccaggtttggagttagtagaaagtcaaatattcttgctacaaacacttaaaaacattcaggaatcaggatggcaaaaacagaagatcaaggaagtagtaggtagattcaatctttgatctagatttaaaaccaattaaccactcgaatg

SEQ ID NO: 855 - DNA, 3000 bp, Unknown
  misc_feature (1)..( 3000): cDNA_ID_2127019_gDNA_ID_1620328_Annot_ID_153567 3000 nt of promoter + ATG
gaatcgctctgatgcagagttgctccactctcttgtggagagcatgtgacttccctgcagcaattggtaaaccacctccataagaaaacattcccactcttgcgtaatgacaatcatgaaaaatgcaatatggtcataagtggactaacctgttctagggtcacgaccagcgaaaacgattggctccatcgctccatcaagctcagggagggcaacctgcagagccacctggatgggatgcagaccaagtgtgctgtttagccattcctctgtcgtctggaacaccagtggtactgccacaaggtaaggaacatcgagctttttcagggcttcgatagccctgggatgatcctgccttgcaggtccaccaacaagagcaaaaccagtcaaggagacagcagagtttacgatgggctgtttcgacaccgggtctacgaaatatttctctactggaccagagaaatccaaccctcctgcgaatataggaacgaccttagcacctctagcctcaagctccatgataacagccacatagtgactatcatcaccagtcacaatgtgactcctctgcaagactaaaccgacaaccgttgcatctttcctcttgagtgagtcattggtgtcccttctagtgtcataccagttccagtactccttcacatcatcgtacatggttggagcaagtggatgccaaattccagtatccaagaacaaaaccggatccgaatactcgattttgacacctttcaaagccggaacataagatccagaaatcatcttaacaaaattctgaagattatcaggagagcctccaagccaaaactgtaaactcaagatgtagagacgagcatcttgagccttgtcactaggtaagtacttcaaaaccttaggcaaagtcctaacaagcttcaacatactatcggcaaaaccagcagagccttgtttcttcctcttgaagagttggaaaaacggagactttgactgacccaattgagacatactaaaagatccaagcttgttcagtctcattacctcaggcattgaagggaagacaagaactgcgtccatcctgtctctctccttctccaccgcatccttaactttaatcgccaattcctcgacgaagatcagagaaccaatgaagatgttggcgtctttaaggtcttcgcagaagttgttgtaagtgttcttgtctctaagctcctcgaccaagtatccaaccacttcgtaggatgcgaatctcgaagtcttgttgagagattgcacggcttcactgagagaagactggtactgagcctcgaggacgacgtagacgattttcaccgtcggaacgttgtctctcttgatcggaactatacgacggacctccgggttcgtctgtgtgaagaggccgtttccagatacagcagatttcaccttgaagaaagatttggctggtttggttgatctgtgtttcttccggaggaaagaatgtttggtactgttagtgagcgaagagagatgctctgctttagaagtggatagagtgaatggagaatacacaagcgaagccattttgcggctgctggattctccaaacgttgaattcgaagaggagaggataggagaagagatgaatcgttttttgttggttgtctcttacactttttgagctccaagtgggagtttatgattctctcatcggtaaacgcttcggaccaaggaactaaaaaagaagcgttggttttgaaggtaagtggtgagagggaaggacacgtggacgaatagttacggaagaagggagagtctacttgtgaggttgagttttgtcggatgtatatccgcttgggacaatgagatggactttgctggcctctgattggctcattgagatttctattcatattttcatggtttgggagtgtggatattgagtgtcttattttctttacttatttgacaagtatttttatgttgctctcttgaagatcgtatttgcggtttcagccatgtaaaagattcttttccgatgacgacacttttactaggcatattcgtcgggtagccggtttaatccggtctagattttgtataatttttggttcagctaggtctggtttgatatttttctacttatttcttaaaaactggctttaatcttttaaggtaaactcaggatttttctttgaaaacgaaatttgaaatatcagactcataacaattgtaacaacaaatgtaaaagttaaaacactctaaaatgtactcaaaattttgatcatcatcatcactattttttttataataaatggatgtaaaaacttatcatgtttcaatatttaaaacttttttttttttcaatatttaaaacttacataaaatatataattaaaagaaagtttatgaattagaatattaagttatatgtaattaaatggagcaatacatgtagcctactagtattgttgttgcatgagttgcatcatattcgaagatatacaatatgtttttttgatataagagtaccgcttcattctcttttttttttttgtcatttcccaagtgtaatattgttattaatacatgggctatactaaaagccccacgaaaagtttactgaactatttgaggcccaacaagagcctatcggattaacgcctactgcagaagaaaatctgtctgcactccacccaagaaaacgcagactaattaatgaaatcaacgaaacggataggtcgggtctaaggttgaccatgaaccgcaacctgaaccaggagcaaagtggtcaagttttgccatccggtccgagtcccttggaggaataataccagaacagaaaaaaacagaaaagtcgacaataaacaaaagagacaaatttgatttgattggttccagaaattcgcagagaaacagctctttgtctctctcgactgatctaacaatccctaatctgtgttctaaattcctggacgagatttgacaaagtccgtatagcttaacctggtttaatttcaagtgacagat

SEQ ID NO: 856 - DNA, 3000 bp, Unknown
  misc_feature (1)..( 3000): cDNA_ID_2126991_gDNA_ID_1620328_Annot_ID_153559 3000 nt of promoter + ATG
aaatcagaagcttcagcatcaattctgaaaacatgaattcaatcaacagtgaggcaagatgagtagtgccctatgactcattattcattaataaagagaaacaagagcaaaaagcacatcattatcttcatttatcacctcagcatttcagcattaatcttcaaccctgtgatggcattttgggcaaactgaagcaattcgtcctgcttaacctgtccaaaagcagccaaagcaacacagaagaatagaaaagttaggaggagatccaaacgcccataaattaacatatgctgacttttttactgatcaagcgcttaccaaaacttcatccttgtaacttgaaaagactgtagcaagatcctgcatactgctaactatggcatcatgaacttcctttcctccattcaaacaaaggctgaaaacaatgttaagttctatgaataattgcagtacgaatgaaaatagcaatgaattgtgttgactttccaagaaacagtttaagactccttttggaatccaaattttggcaatgcaatatggaatgccagcagactcacccaaacatctccaggagtagcgtgatttcttcgtcatgtggtggttcaataatctgtaataaaacagtcaaacctttaacccccatagacggcacatatgttttcacatcacccaaatataaaggtaaaatggtactacgtatctgttatcacttatcagatagccaccaaaagatcaaatttaggttgcaaaagaataccatggacagaacgatcccctccagagcttgactttgcagaaaaacatcacggaagttaagtggctcaccgcctatatctggatcgtaatacaaaacctacacatgcaaagggatcttcagaaagaattctgttggaaaaaggtcataaatacaacatatgaaattcgacgcagaatagtaatgcaaaagtcactgttaatgaaaaaccctttagcagaaaaagttaccctatactactacagattagcaatcttatctacttaagtaatacttttttttttatattctaaaatgcaggaggatgatatgatgacatcttcctctttctctttgacaaaaccagttaaggaacatataagattctaacgcagcaacactaaggatcacaatcatctctacttaattactagtcttgatattttacgatgtgggagaattgttaacttcttcttttcctcttatccaaaaaaaaaaaaagaataaaaataatacccattcacgtttctttgcttcatcagaagcaagttgttcctctgaactcaattgtttatcctttagagaactgtcagtagctctatcaatctccttaagcacacttagccatctagtaatcagcaatgccctttcttgacctctatatgagactgcagcttcttccaatctctgaattgtctgatgaacactcttataagccccaacaccctgcaaagttacagtccggattattcactctagtcctaaagtaatgcaactgttgtgtcataattacaactgtattgtaataaaagcccttaataccaaaatcaaaactggaatctagaaaaataagacccaaatactaattagaaatgggaataattaaaaggaaaggagaaattacaatgcggtcttggaacaatttggctccttcagcgacggcttggccagcgtgctggacgacggagtcggcatagtttttgacggttcgtgtgatgtttttgcggtttccgacctccacagccttattcacggccgttcgcagccacgacatattctcagcgatcttatggtctactagggaagaaacctcctcggggaacgaaaaccaattttagagacgactaattactgaaatgagagaactcggccaccgtccatcaaagtttttttttactcggtttaagtttgacgatttgcaggcgactaatatattatttcttttctgaaatgtagcttatttttactatgtaacgtttgtatattaaaccgatttaaataacgagtttatgtataagtattttgttaaaaatgtaaaaaaaataagatcaaaaacctaaactatttttgtgaatactataaaacctctaaaacatttaagtcgttttcttcttcacataacaaataaccataaaatgaagttaaaaaaacaatatgtgaaaaatatggaatttggtggcaaagaaatgaatagtggagttgagaaaaaaaatgatcttctaaagaattttctaactattgaaattaaacttctaattttcgtagtagattacatgatcgagaatatataccaaaaaaattgaagaaatcatagctttcatgacatgaaagatccttgatgagaattaaaattctaatttaaaattaatttaccaatgaaaaaaattaattaattagtttgtcatagttgtgaaatgcaatctcaattatagatagtaaacacaagttttttcttataataattttcttatgaagatactatataaataattaattatttttaaaaataaataatattaatttagattatatattttatagttggtaaatgttaaaataaaatcttcatatctatttttttggtaaaaaaaacaaaacatgtaaatgtttttaaacgttgcccaaaaaaaaaaaaggtaaatgttttgactaaaaaatatccaatcgaaacttgggtcggatctcggatagttttatccaccctaaacagagacggcagctcataactcaatcagccataaaggccaaagaagggcccaccttttagatacacacaatcgtcgcactctcagattcttctccggagcgatcagatttcaccgacgacggttgtttttgcctcctctttcaatcagaggaagccaaagcttagagcaacagttgtaaatctatatatagagagggagagagagagagagagctcctctcgtccagtattagggttttaaaggcaagaactactagaacaagagaaggtacaaaaaaaa

SEQ ID NO: 857 - DNA, 3000 bp, Unknown
  misc_feature (1)..( 3000): cDNA_ID_2126997_gDNA_ID_1620328_Annot_ID_153561 3000 nt of promoter + ATG
agtatttcatgtttggtattagtaaatcctctagagcagcttcgtctagctgcattccaattctcttctccagagtctcctgagtgacctgactcgcgtgcagaaccattgatgtcctaagaagcctgagcaagaattttgtcgatgtaacgcactttttgcccgggagaagttccacgatttcctcaaggagacttcgttgttcttcatgtgaatagtacatgtcatctccatagttagtcccttcctctgaaggagaaccagatttcctagaacaaccaagtaaaggaagattccgtttggcgtaatgtgtgacagatgctgctatgatacccgcatttacgcctctggattcaacagttttgatgaaccttttgtacattggtaaatctaggaacgatgatacatcgttgaaccaccagttttcgctcgtggcctttgtttgtattccgttccaatatatagtagtagtagtggttccttcaggtagtgagattggccagttgaaaaaacttgtgttgtcctctgcacaagccttcatggctaaagaaccaatgcacctagaaacaatgtgaagctcttcagcgagaggcaacacttttggttcgcatgatttctccagggccttgatggaatcttcccagtttacgaatacgtgatcgttgaggaaactctcagtgagatagatgagatttgcatctccatagttttcactcatttggagatactctgctgcacatctgagactcacagcgttttcaggtgtgacctcaattcttacaccgtaacaaaacttagctacaagcaagaatgtttcaggaccaccgggaatgtcatgaagctgagcaacacaagttgtctcagaggctttgctgaacagagtttctagatatccacttcttgacaacaaaggaaactgatgttgaaaacaagacaagttaaaaaagtgaacgtatgagtttagaaattcaaaagagttttgagtcgattagaattggtaccttatggagatggaagctttcgtctacgacttggatcataacatcgggcttaagaccagtcttgcaaagcctgatcagattacaaaaggagatgaaacgttttgttttgttagtgaatgatttaagcgattgaagaagaagaagaagactgaccatgtgtgaccactaagatgaaagacttcagatttggaacccagtttcaagctagccatctttgttctttcacttcaactctttggtttttccgcaaatctaaaagtgttgcaaaatggttgatcatcaaaaccccataaacatatgggttgataatgggaataaattaattttgggttttggttgtatcggagaagtaggggtgagaccgagtctgaagggagagatagatacagacgaagcttttgttttgtttgcaggagttagctgttactaaaattttgcaactttcgtttttccctttatttctgtaacgcctgactctctctctctctttcttcttttcttttgtaactttgtgtttacggtaaaatatctggctcattttggtaaatgactaaattcttgatattatttttcaatattccacagtaatactaataaatgtaggagatatttgactggtcaatatagtagttgctctcttaaatgtggagctagctcttttcaccaaaaaatattttattagtcaaaacccattacggaaagaattcataaggcccattatcaaaaccatggaccagagcagaaaaagtaagtgagttaattccggattagtgtgaaattaaacctaggcatactaatcggattaagccggcatgaccacacccatatatttagtccggcgacggcgcaataaagtacagtatatactcaatctttatttatttttcactttagaaataaatataatttcttaattttcaataatcataagatttaatatttattttgtttgagtcctaactaattttggatgacaaaaaaaaaaaaaaacatcataattataaaaaaaatgaatggattttgttttgagacaaggaccacaactgtttagtcagcaaaacttaaatgagaacactaaatttaaacatatagacatataaccatgtaataatgattttcaaaaattctgaaaaactacagtcttatacaaatctttattataattcgctgaatcgattttataaatccgaatatttataaataattcttgaaaaagccgtgtaaaaaaaaaaaagggtggatgagtcaaactgtgttataaagaggcaaagttgctgctgcagagttgtgtggcccttgtcaaagtttagcatctctctctttctctgtgtagccttctcttcatatatttcatatctaaactgtactttttatttaattttcctggaaactgcatcatcatcctcatcatccattatcactcaaacctctccatcactcttccttcttttggtagattcttctctctcccctaacacctttctctttcttccctaaatctggatttcttattctctttcacacttattttgtttttgtcggtagatttgcgaacctctaattctttgattactcttctctctgctctgtgagtcttacgtaactagcttcgatcttgtttttacgtattggattcaatccttttttggatactttttcagatttttctccactaaccatattactttctgatttactttttttgtaatcttatcgttgacttcatttttttcttcttgattgttcttcctttctataggggccttgttgatctctggattcactgtttacttgcgtctattagggtctagttagatagataccttgtgggatttatgtttgtttcatctgaaatccatttgaatttgaattcttcttttgcctttttctctgctttataatgatattgatcttgtaggtgtgttagttggagttagcctgtaaaaaggtacaagagtgaagttttgatttttattaggaccctcgaagttcaactatg

SEQ ID NO: 858 - DNA, 3000 bp, Unknown
  misc_feature (1)..( 3000): cDNA_ID_2127013_gDNA_ID_1620328_Annot_ID_153565 3000 nt of promoter + ATG
atgaagaaagaaacgtaacatggaacagaataatagaaagaacgatgagaaaagaacctctgtgttctgaaacgaaagccgccagtcatatgcagccatgtacatatttttctcttcatatccaatatgtgcaaggttagcaatcagcactgcccagacaaagtagccaggagcaaagtagtcagcagccacgagtcctgatacagctcgaactctaataccagctggatccaacccagtttcattgtcaagtgacatgtgttccacccaacatagaggcctgaatcaaagagataattgattagttaagatactatcaactataccactgttaccatcaacaataacattgcccatctctaccatagcaaaaacatgaacactgagccgaaagaagaagatgcagatcgtaacaaagatgcaacccacaaaacactttttttttaatatatccatagcagggtcgggaggagttcaaagctggataacagaacgaggatggacgaaattcaagacatgtgaataaactcgatgtgaaactttgaaattgagaaaaaaattgagaaaagcacattgagctgaaagatcaaaaaggaactagctttaattacacatatacatagttgaataataaagcaacagtcctctatcacagcctgaacacactttccacagatgtagttagaacttctctattcccaacaaaacataaaacactacttcattatacgctacacaaagctaaatctacacgcaacgacagtaaaggaagtaacttgttatgaacggactctagggcatgtctagcaacagatttggcaataagatgacttgaaattccaaggcagctattttatatcctaaagttaacaatcaaacagaaatagtccaagccaattacgtccttggaacgcttaccttacacatacagaaatagtctcttaagaaaatagcgtttcacatcaaaaaaaaaaaaaagtaaagagtaagacagacaaacatggaattaaagtttgagtgatgttgaagaagcaacaagtgcgtgatctcatcagatccaatccaaatcccaatataaaggaagagtgagaattgttgagctcaccttttgtagacttcaccaaaagttccaccccacaaacgttttctaaataaaccatcagcgcattgtttgccttcccaaagctcgagcccaccggtgacaatcccaggaatgaagacaacaggatgtttcgccttaagaccttcttttttgagcttaacaccgggcgggtcaggcaaaggacccgtgattcgctccgttacatactgagggaagctcgcaggcattgcgttgtaaaggaagagaagaaaccaccaggttacacacacacacccaatgaaccaacaacaagaatcgatgcacgaccacttccctcctccgttcgatttcttatggtgggatttggaagattcgtgtggtttcttttgcgaatcctcatcgtgcaccacctcttcagatggcggcgtcgatggtttctccgtcggctttttccgatgaataaggggcatatctgtcacttgaaattaaaccaggttaagctatacggactttgtcaaatctcgtccaggaatttagaacacagattagggattgttagatcagtcgagagagacaaagagctgtttctctgcgaatttctggaaccaatcaaatcaaatttgtctcttttgtttattgtcgacttttctgtttttttctgttctggtattattcctccaagggactcggaccggatggcaaaacttgaccactttgctcctggttcaggttgcggttcatggtcaaccttagacccgacctatccgtttcgttgatttcattaattagtctgcgttttcttgggtggagtgcagacagattttcttctgcagtaggcgttaatccgataggctcttgttgggcctcaaatagttcagtaaacttttcgtggggcttttagtatagcccatgtattaataacaatattacacttgggaaatgacaaaaaaaaaaaagagaatgaagcggtactcttatatcaaaaaaacatattgtatatcttcgaatatgatgcaactcatgcaacaacaatactagtaggctacatgtattgctccatttaattacatataacttaatattctaattcataaactttcttttaattatatattttatgtaagttttaaatattgaaaaaaaaaaaagttttaaatattgaaacatgataagtttttacatccatttattataaaaaaaatagtgatgatgatgatcaaaattttgagtacattttagagtgttttaacttttacatttgttgttacaattgttatgagtctgatatttcaaatttcgttttcaaagaaaaatcctgagtttaccttaaaagattaaagccagtttttaagaaataagtagaaaaatatcaaaccagacctagctgaaccaaaaattatacaaaatctagaccggattaaaccggctacccgacgaatatgcctagtaaaagtgtcgtcatcggaaaagaatcttttacatggctgaaaccgcaaatacgatcttcaagagagcaacataaaaatacttgtcaaataagtaaagaaaataagacactcaatatccacactcccaaaccatgaaaatatgaatagaaatctcaatgagccaatcagaggccagcaaagtccatctcattgtcccaagcggatatacatccgacaaaactcaacctcacaagtagactctcccttcttccgtaactattcgtccacgtgtccttccctctcaccacttaccttcaaaaccaacgcttcttttttagttccttggtccgaagcgtttaccgatgagagaatcataaactcccacttggagctcaaaaagtgtaagagacaaccaacaaaaaacgattcatctcttctcctatcctctcctcttcgaattcaacgtttggagaatccagcagccgcaaaatg

SEQ ID NO: 859 - DNA, 3000 bp, Unknown
  misc_feature (1)..( 3000): cDNA_ID_2127001_gDNA_ID_1620328_Annot_ID_153562 3000 nt of promoter + ATG
tttcagtcctttaatagatagcccgattggagaaacttgagtactctctgttgcctgcctaacactctcttcaatgatttctgacttcacagtcctaaggttcactgaacacacattcccagctcttgcctctgatgtggtagctggtagagaaggagatttctcaataggaggatatgaactgaggcctagactaagtgagcatgtgggattaacatgattatcaaactgcatcaacgtcaccttaggagaactaaatcctacactttccttctgtctttcagaaacagactttgtaatagcagtcgtatcacgacaacttgatctctctatgtcacgaagacttctgttactgtttaagaatgcaccacttgtgcgatctagagcatcttcccaaacatccatggtagtattcaaatcccaattttctctgttcaggccactgttgccagatttggtagaagtagaatctgtgttatgagcgggacaaactcccttgcttaatgacaaattcagttctgtaggctcttcattcttccaatatggagaattgtttttagtgttacaacttagctgtaaggaaacagtcttagcaccagaagatgcttctgtttgacactctcctctgagagtttccttgtcacctgtcttccggactatatcatgagtcttaagaacagttttttctactttcatccgagtttgatttgaggggacaacaagaccagcatgttcagcaccaacaggaagctttcccataggaaaatggattgaactgccaagtacgttagaactagaagggatgtcaaagcctgccaatggactggagtgaattggagaacttggcttctcaaatttcactctagtttggtcaaaaactatgttcccaatgctcttccctttaccagaaattcccacaggaacagatggtaatgaagaggttggttctcgaccagtcattttctgagtttcgtcagcatgagcactcctagtatcaccttgctcattaggttgtggaatctgagtggagacagcttcttccatttgcggctgaacaaggtacttcctcttcttgattggaatatcactgcagctccatgtagatggtctgatcctaggctgaatgagacagaggaaaaacacatcaatatgggaatctcaaaaaaatgtccgaagagttaaagtggggaataaacacctcttggcttccagacatagttgaacttcgagggtcctaataaaaatcaaaacttcactcttgtacctttttacaggctaactccaactaacacacctacaagatcaatatcattataaagcagagaaaaaggcaaaagaagaattcaaattcaaatggatttcagatgaaacaaacataaatcccacaaggtatctatctaactagaccctaatagacgcaagtaaacagtgaatccagagatcaacaaggcccctatagaaaggaagaacaatcaagaagaaaaaaatgaagtcaacgataagattacaaaaaaagtaaatcagaaagtaatatggttagtggagaaaaatctgaaaaagtatccaaaaaaggattgaatccaatacgtaaaaacaagatcgaagctagttacgtaagactcacagagcagagagaagagtaatcaaagaattagaggttcgcaaatctaccgacaaaaacaaaataagtgtgaaagagaataagaaatccagatttagggaagaaagagaaaggtgttaggggagagagaagaatctaccaaaagaaggaagagtgatggagaggtttgagtgataatggatgatgaggatgatgatgcagtttccaggaaaattaaataaaaagtacagtttagatatgaaatatatgaagagaaggctacacagagaaagagagagatgctaaactttgacaagggccacacaactctgcagcagcaactttgcctctttataacacagtttgactcatccacccttttttttttttacacggctttttcaagaattatttataaatattcggatttataaaatcgattcagcgaattataataaagatttgtataagactgtagtttttcagaatttttgaaaatcattattacatggttatatgtctatatgtttaaatttagtgttctcatttaagttttgctgactaaacagttgtggtccttgtctcaaaacaaaatccattcattttttttataattatgatgtttttttttttttttgtcatccaaaattagttaggactcaaacaaaataaatattaaatcttatgattattgaaaattaagaaattatatttatttctaaagtgaaaaataaataaagattgagtatatactgtactttattgcgccgtcgccggactaaatatatgggtgtggtcatgccggcttaatccgattagtatgcctaggtttaatttcacactaatccggaattaactcacttactttttctgctctggtccatggttttgataatgggccttatgaattctttccgtaatgggttttgactaataaaatattttttggtgaaaagagctagctccacatttaagagagcaactactatattgaccagtcaaatatctcctacatttattagtattactgtggaatattgaaaaataatatcaagaatttagtcatttaccaaaatgagccagatattttaccgtaaacacaaagttacaaaagaaaagaagaaagagagagagagagtcaggcgttacagaaataaagggaaaaacgaaagttgcaaaattttagtaacagctaactcctgcaaacaaaacaaaagcttcgtctgtatctatctctcccttcagactcggtctcacccctacttctccgatacaaccaaaacccaaaattaatttattcccattatcaacccatatgtttatggggttttgatgatcaaccattttgcaacacttttagatttgcggaaaaaccaaagagttgaagtgaaagaacaaag

SEQ ID NO: 860 - DNA, 3000 bp, Unknown
  misc_feature (1)..( 3000): cDNA_ID_2126987_gDNA_ID_1620328_Annot_ID_153558 3000 nt of promoter + ATG
aagtattccacaacaaaagaagataagagactcatcatacatacacagacaagatcagatccacaagttaattgttaaatacgcacactgatttccttctttgtaagtggtgcaaaaactgtatcttctgtcaccccagcaacaatgtaaagtcgtactctttgctgcctgaaaacaaactctatatattcttctctcttgagtagctttgagacatcaaatccagtttcctctaagacctgtaatttagcatggaagaacaatacataagaagtgtgacaaaatattcagttttttttcaacattaacccatattccaagtctatacaaacaatcagaagaagaattacagcacctgaaatgctacattcaccaggagaatagcactagagagctacaattaaacctttgaccatttccataccaatgaaatagtaaaaagatacagagagcctatatagttgaccattgacagcagcactattctcatttgcaaaagattctgtctactggtgacctaagaacattttttcttcctcaattatcacgtaggagaatctattttcagtacgtaaggtgtatgtgttatgatcaaactgttaaattagtgtgaaaatgagttactctgtttcaagagcagaagatataagagacgttctatttgctattctttgacctccgtcatctatactaaaaaaaattcatgcgcacattatgttgacacattttcatatgtcaacaaccactaaagtagaaccaatgcatccactaagtgaggttaatctaacccaataagcggtcttcttctaattacatagtgttctttattaatatgcactatgatcaatgagtggcggttgttggagatatcaattttgctacaaaagtgtaaaataaatgaaacacaaaagagacaggaaacaacagaattgatactaacctcacgtatggcacaagcatggtcttcttcatccttgctcttttttccgcggggaaagctccagctcgatcctttccatcccttcaccaacaggcactgaaaatgacaatgaaacaaaaagggtaagcattaactaataagtaaacctaaatatcaccccacagggttcttaccctttcatatgtctcatccaggataattgccccagtgactggaactcgacacttgtaagaagtgaagtctttaaagatatcatcaatgtgagtaacataaggtctcaacacatcacagctgttgaatactataggccacgtcaaggaaaaatatccacagaaaacaatggaaaagacaaagagaagcccagtctatgtggcaaacacaaatcatttatgcttcgagcatatgagatcatagtcctatcattaacgagcattgtactaaacagtgaagacaagaaattgaacacagaataatgaatcagaaggcaatgaaggatacagagcgaagtaaactctttcaaagacagggacttaagctttggatcattctctacagcattatcttcatagtaccaataagcatactccaccagaaacaaaattctctcgaatgactgttgatcttcttcagggacattcaaaacaaatcgactgaaacaaaaccccatcacaaagcatcagttaccgaaaatcaattcgagcccaatcgcttcactatccacagaaaaaagaagaaaaacactcgattgatgaaattacctgcaaagatcatcaaggagttctttggagggaaggcaatttccgatgttcttcgatgaacttgatgatcgatggaggcccgacatttttttttgtaccttctcttgttctagtagttcttgcctttaaaaccctaatactggacgagaggagctctctctctctctctccctctctatatatagatttacaactgttgctctaagctttggcttcctctgattgaaagaggaggcaaaaacaaccgtcgtcggtgaaatctgatcgctccggagaagaatctgagagtgcgacgattgtgtgtatctaaaaggtgggcccttctttggcctttatggctgattgagttatgagctgccgtctctgtttagggtggataaaactatccgagatccgacccaagtttcgattggatattttttagtcaaaacatttaccttttttttttttgggcaacgtttaaaaacatttacatgttttgttttttttaccaaaaaaatagatatgaagattttattttaacatttaccaactataaaatatataatctaaattaatattatttatttttaaaaataattaattatttatatagtatcttcataagaaaattattataagaaaaaacttgtgtttactatctataattgagattgcatttcacaactatgacaaactaattaattaatttttttcattggtaaattaattttaaattagaattttaattctcatcaaggatctttcatgtcatgaaagctatgatttcttcaatttttttggtatatattctcgatcatgtaatctactacgaaaattagaagtttaatttcaatagttagaaaattctttagaagatcattttttttctcaactccactattcatttctttgccaccaaattccatatttttcacatattgtttttttaacttcattttatggttatttgttatgtgaagaagaaaacgacttaaatgttttagaggttttatagtattcacaaaaatagtttaggtttttgatcttattttttttacatttttaacaaaatacttatacataaactcgttatttaaatcggtttaatatacaaacgttacatagtaaaaataagctacatttcagaaaagaaataatatattagtcgcctgcaaatcgtcaaacttaaaccgagtaaaaaaaaactttgatggacggtggccgagttctctcatttcagtaattagtcgtctctaaaattggttttcgttccccgaggaggtttcttccctagtagaccataagatcgctgagaatatg

SEQ ID NO: 861 - DNA, 3000 bp, Unknown
  misc_feature (1)..( 3000): cDNA_ID_1399202_gDNA_ID_1620330_Annot_ID_153608 3000 nt of promoter + ATG
tcacattctccatgaagcaatgaacttgaaattgacctgagagttgattgtataagtatttggcaatcgtagttttcccaactccacccattccccaaatccccaacattcgaacatccttgtccactatagatatcatagactgcagaaagtccatatgagaactcattccaatcaaaccttttgaatcatcccatgaagtagaaaccaatttatcagaaatgtctttaacaatcttcttaatcagctttgagtcatccctcctaccaataccatacaaaagtcatcactttaatactaactttgaatatacaccaactaaactgttttagaaacttaccaattccgagaatcttcaccagaaatggcagctaatttcttcaaagcttctttccatttccccactttctccttgtcactgtgactctcaacatcttcaccgaaacttcctctctgtcttctcacatccgaaggatcaacctcgtagaaaatgggtacaatcgtatctttattacattccatgatcttcaagagctcgtctaagcaccagcttgaagctgcgtagttcctagagaccacaacaatggcaaatctggagcctttgatcgcatctataagctcaggggagatggattttcctctctgtagatccaaatcgtctctgaaagctttaatccccatccgatcaaactcgcagaatagatggctcacgaatgttttacgcacatcttctcctctaaaactcacgaaaacgtccgttttccacactgttgaagaagaagaagaagaagaagaaggaagagaagccatggattgtctctgagctctactaccacatagattccatcaattgcagttaaagtcgacaattcttgtccttcttactattttagctcaagcaggtatctatcatcatcatccagtatctccaaaaccttggaaccatgaaaatgatacccagaagtcaaaggttccaacttttcaatgacgcgtgacagagacagagtcaaaatcaaaactttttgaccttgtttgcaatttagcagtgattctccgaaatctagcagcttttactcaaatctcttcttgatggcattttgatagaattggatcattcaatagtgaaagaaatataaatacattatgtgattagagtttgaattgcgagtcaaaagatagaaacaatgaaacgaatcagtgttgtaaaatcactcaaggaggtggtgaatccagtcctttacaataaccggtgagccataccaaggtctggtttcatcgtctgaaccaacaggtgaatggtaaacaccgtcgaagctaacattaagtgcaccttcaagatgagctgaaacctcaggaactactccatcaccccacacatcagctcttccacatacttgcttgtatccttgccctacaaaacgagcacggaaagtaccactcttcttgttgcttgctatagcaagttctgaaatcccttctccactgtcgattccaacagttacatcagaatcaatatctgcatctgcattgtcaaccaaacgagctccacgaatgtatctacacatgaagtactaaattcagattggacagaggttccacacatatatggtttctagaagaagcattacctcccggcgatacagacatatttcagctcaggagtgtaaacagcttttgcacaattctcttcgacataatagagaagacctcttgtttgatcaataacccccggaagtcctctcggtggtggtctaaacgggatacaaaaccatacatggtcaaaacatcgaagcaatatctcttgaaaggtctaaaaaatgtaatcgacatgtatgttacctacaagtgaggcgtaccaagtgtcaacaacaaggagatatcagagtttccgtattcttccatgtaaactcgagcaagccatcctccagctgagtgtccaatcaaacacaatccttgacctataaatgacgcaaaactaccgagttttatggttaccgcgattcacaactgaaactagcagctaagtctgatccaagaacaaaaagcttcaaatcaaatgtgagatttaccttgagctagctcattggcttcacggactgcatcatcaattctattcaagtacctgatcaaccatataaaagactcatcatttgaaaccagtcaaaaaattcaaaacacaaaacaagtgatacattcattgagcaatcagtaccaatcaagaacaggacgagggcggagcgtgccacgccagtaggctggatcaaccaaaccggctgcatttctaaaccaatcaagccttgatacagctgcaaccacagcaggaacaccgtattcacccaatgttacctccagcttcttgtagtctcctgtattattccctaaaccctaataaaccaattccacaaagcagccatagtgacactaaacccaccattgaatcatataacacaaaaaccaagttttggactttaaatatgtttctaaaggaaaatgcaggaaaacacttaaaactataagaaacagaaaattcagtgaaaataataaaaaaaaattttggaaccacacattttccgccatagttgtctcaatcaaaggacggagattatttaccgggagaattacggcgggtcggtacttgacatttccggcggaagaagaggaggagggtgacgtggctgcggagaagtttggcctcagcctgagcgatgtaaccatcgccgaggccatctttttggttagtggctatgatgagctcaagcggagaaagctggagtttttaaaatccacaagttcttaagcattttaatgtatttacacaaacaccccatttatttcgattcttatcacattaagtacaaaactcttgaacgttttctagattgagatcacagctttcttcttccttcattgggtttaagaagcaggagaagaacactaaaagaaaacatttttatggtctggaattgaatccaatcctcctctgtttctctaacaaaaatg

SEQ ID NO: 862 - DNA, 3000 bp, Unknown
  misc_feature (1)..( 3000): cDNA_ID_2127170_gDNA_ID_1620330_Annot_ID_153618 3000 nt of promoter + ATG
aaggttgcaacctccaaccgaaacgagccaaccgctaggtgctgtccaggtttggtctccacgatggatttagttttgagttttatatcattatttttcgtacaaacaatacatgagccgatcttaaacatttttttatgtgaataggtatcaaaaccattgacgttatcaggacttttaaattgcattgatgggttatggtcaagttgtggaaacgaacgtattataatatttacgactaacaacaaggagaagctggatccggcattgctcagaccaggccgtatggatatgcacatttacatgggacattgtagttttcagggatttaagacattggcgtctaactatttaggcctgtctgacgaaaatgatgatactcaccctctctgtccggatataaagcatttgattgatggacacgtgttgactccggctcaagtcgctgaggaactaatgaaggatgaagatgctgatgcggcgcttgagggtttggttaaggttctcaagaggaagaggttagagccaaagaagtgtgatgatgaatctaagatgaagaaactgaaagagggagaggaggcaatagctgacgctgaattagcagtgttgactccggctcaagttgaggacaaggaggaactagttgctagcgaatatgctaatgtgatgcccgaatggctcccgagatcgaggttggtgatggttctgccagggttccatagagcaagaggaataagaagaggtctgggggacgaaatgtaggaagatgatgaaggaaattgaagaggtaaaggaagataatcactcgacattgaggagacctgatgaagatttgttttacacatgaaaattttgaataatctaattttattaaatggcgacaagacaaagttagtatgacataactttcttaagtttttagtaaacaacaaatcgatgtttgtggaaaatcagcacaactttctaaaacttgcttcaagtacattagtcacaagtctttgtcaacttcatcaattttatttgatattaaattcttcctcaccaagccttcgaggtccgggtagagacaggtgtggggcatcattgtcatgaaagaggcctaagtaggtatacgccaacattatgaataatccatcaaaacagcaatgtcccatgtgaatatatatggagatccatacatcaaggtctaaggagagaatcatctatatcatccttgttatttgtgatgaagattatgatcctttcttcaccacaagatgatcatataccatcaatacagtttagaactccagccagagataatctcgtctcctgatatcattaatcgctacaatagtggaatactacaaataagtaaaaataagagggagccattcaaagatataatagattacttcagttcctccatgtctgttctgtctatgtcttcaatcaccaagacagaaccgttgatagtgagcaatagtttttcaaggcatgatcataaccaaacttgtctttcctgtcggtccgtaaaataaacttattttaatttaatattttattgaaaaatttattaaaatatcccatttaaaaataaaaagtggataaaaaaataccgtaaatctggtggatgacacacatgtaataacttcgcatttaaaagaatgttatttactaatttttctcaaattgtttttccccaattgcgcaaacacatcatttttctccgagactttaatcttctattctctctctcgaaatcgaagaaactaaagatgaagattcctcctccaaagaaaatgttcaaatcatgcaccaaagtaattgcctacgtcacgacgatgaaaacaatcttgattgtggtagtgcaactattcataaattgtattcactttcttctggtctcacttttggaaaaccttttttcgtcatagcgttctctcatcataagggattaataccgtattgtatctaatttatgtaaatatatgatcatatcattattattatcataaattaatttatataaatatatatacatatatataattgatataatattataatatatgattttagagaaataggactgaaagatattcatttgtctctatcaaaagatgatattgttaaatgatgaattataagggattaaatcgaacaaaccaataaattggcaaaattcgataaaataataaaacaagaaattttcagaactttaatgtaaatatatgatcctattattattattattattattattgttattattattattattattattattattatcataaattaatatatatatatatatatgatataatataataatatatgattttagagttttaaaataataaactcattagaggtcgtctctaactctaagttttattgtataaaaatttgatatgttgtattttaatactatcgtattttatttaatttttttttttacaattgccaaaactttttaattatcattttaaagtttagatagttagtagtacctttttaaaaacaaaacctcaaaagtgataatttaaagaatattttttagttatgtacttctttccattatatattatcataaagaaaacttttaattctttcaaggaaatcttaattttattaaacttatgttctcaaacattttatgatatatgtgttgaatccacaaaaaaattgtaattataattacagcattattttgacacgcatgtgatcttatcaattataaaataagatattaatgacattggtattgaaaaatccaaatttaattaataacatatgtaaattagataggggttgtcaactactaaggacagaaaatggaacttcgttttctttgtgaagataatccatatatcatatatgacttcatatttacattaccacaaatattattgaagataaatgattagctactccccacacatgtattaacaacaacctcttctactttgagtgtttttggtacatttggtgcgtttcaaatcatcagcgatg

SEQ ID NO: 863 - DNA, 3000 bp, Unknown
  misc_feature (1)..( 3000): cDNA_ID_2127200_gDNA_ID_1620330_Annot_ID_153629 3000 nt of promoter + ATG
agaaaaacacaattccattaactttaatcgtacaagtgagagtgttagaaattgtggttaaacaatgatcaataaccactaaccatttcgtaaaattcaccgacgactttatcaaatgacgaacatgatccgatggatccacgaactaccgaaagagaagtaacctcagaactatgtagaaaaagcaatcctattattcattcgaactaattcaatatgcagctagttttttggtctaacgacttcttatcgtaccatttttcatctcttatcatttttaccatattcaaccataccaccatttttatcactattttgtacagttacaaagctcttaccgtcttgcgctattaatcggaccattaaacaacttcacataaaattttatattagacgtttgaatttaagtcgaagttttgataatcttaaatgtaacccctaaaatacagtcgatagtatttgatgaaacaactccctcattaaaaatcgattacttttataaaatagctgtaaaataaatggcaacccaaacgaaacaaaaaatatctatcccccgaaacatattacatatactccacatctttcatatatgtttgtttatcggtatgtctttaatattatctcttcttaccccaaaattatacaacaatctttcaaattacagaccactttcatggtcgttggaaaaaaataattcttccatagtcgagaatatgatttgcaaaaatgttattaaataataatcattcaaagtatcttaataaaaaaacaaaagaaaagtggaattggtccataacggttcggggaacttttctatgaaccggaaactgaaattcgtgaggacggtacacgtgttaggtaagaacacgatccgctcgtgtgtaacagccaatgatgtcgtcattccacgtcggtacaagactttttttttgtcgtcaacagaagatttcaaaattaacgaaaccgttcccataaccgaaactcacataaaaacaagacacaataaataaaaaactttaggtacttttctgtcgtttctttggtttctaacgtctattcgtgttatatttgttttattcttcatttattattgttgaatttaattctagttcgagttcagttacatgatttctctctttaatctctagtattttaatccatcaaaattatgtggttgcatactcgatcgagtttagtacaattactaaaatatgtagctttgtttagtcatatcaagactatagtaagttgttacgcatgaaagataattattacattcaaacgaatgaccactcaattcttatatcaaaaagatacaaaaaactaaagtctacaacttataggttcaatgggagcataaatagtccatatcattgaataataatggtcttcaatagagttggttgttcaattattatttttggtttataagaaatgaattgaacttttgtttgtcaccattcacattttcttctcttttttgtacttttagttttcctaaaaattaaaaaaactatgttcccttcgtacctaaaacttactttaaaataaccaatttgatgatagttttttttaaaaaacttcaacaaagattatatatttcatcctgaaacaaaaattacagcaaaatttaaatttaaactagtagcaaaaaatataggatgtgcatatgttttctgtttgccacgtctgttttccattaaatgtacgcacaacattgtttgagttcaattaactatttaagtaataaacaaaaacaatgcttgaatttcactgaatatagtatataagtaaaaatgtatacaccccaaacgacgtcgaacccatcgttcaaaagatattgaagtacttgaactagttgttgagctaatcatcatattactttataatttaactacacaaaacgagttctttgaaagatgcgaatatatatatacacacttatacgttatggagagaacagaaagctcataaaagcaatttatttctctccctttaagatcttttcttgctttgtgtccgaaacagacaaaaattgattctgttgttttttcccataattaactcacacacacacacttaacgtacgtgcaatatctgtatgtgtgcatagtatatactatagccacacgagcggttcaaaaatgttttttggagtttccgagactgttgagactgtggggcctatggtcatcgaaccctcccacacgcacgagcgggtctcgttttgcatgcatctacactacacgtacccaccgacttttccaaatcccttacttttgcacgtgtagagagagagagctttgtactgaaagtatctcattattcgaaatttttcgtgtaagagtaaaaactaaatcgcaacgtacgtgaaggaaaacgtgaaccttgaatatttaatgttttcgtgcggtttcattttaactatttaattaacacaatattagtacaataacaagcagctcttatgaagatagtgatgaaaaattgttatagatctatcttggaattttaatgatcgaatttcgattttgtacgaccaccatcgaggcatcgactataaatatagttaaaatgtggttgctgaaaaaaaaaaaaaaatgataaataaaatgaaaccgcacgtaattgtataaaaccattagcatgggattattaggccacaatttggtaattaacacttgtaattcatttgaatatgcttttacaaaactttcccttcaatttcttttggtgtgtgaataaacagctatcaattttgtttttcatgtacattaaataaccactctgcactcatcatcattttctaaaatattcttctatatatattaactagcttgcaaataaatgtaaataaaaatataaatttcaataattttttttagagaatctctctttcctcttccaccatataaacagtgaaaagccattcaagtgctctctccctctatctctcttctatttttagtttctcttcccttaatccctaaacccagaaac

SEQ ID NO: 864 - DNA, 3000 bp, Unknown
  misc_feature (1)..( 3000): cDNA_ID_2127215_gDNA_ID_1620330_Annot_ID_153632 3000 nt of promoter + ATG
tatattacaatgtatatgatatgctgaaaatttgatccagctaagtcgataatagtagaattgtaattaatgttcatcgtaatctatttcgatttcatattcttggcaacttcgattctgaaagaaatgtaaaagtaaatttaatgaaatagtaatgatttaaaacggggtttctctaaaaccacttgggtctaaaatatatattttggacttttattgattgacaagactttcatatgattgagaatgttttgaaggacttaagaaaaaaaaaaggatttaaattttaggcgttatctttaaatgtatatgtttcacttaatattagttaaggtcacatgtacaacaaccacatataattgcacataacaacttattagttgaggcaatattttaattttactagtataaactattattctgaatttgtttttcattaagacaaataaccaattaagtatacctcaatatgtggacattgcaacaattgctccattactccttatgtagtcatctatccagactccagaggttcgataactgattactttagtcgtcaaattatctatccatgaatagtgaagacttaaaactactgatttaatttgttaatccgtcatgcctaatgatgatcgacaaaaaataaaagaagttggtacatatatactatagtcttgactctagctagggtcctgatttcttaatcgtaaattttaagacacaatttagttacgatttttattttggatgaattgaaagtagtgctaaaattattgtgtgatgactagtcgccgtaactacatttttattatcgaagttttgtaagatcagttaataaaatttagtgttgttcatcgtaaaagtaaagcgaaaacatttgaacaagatatgtgtagcgataattttcagttaattaaaaaagtaagcatgcatgaacagtagacagattttgcaatcctcatatttacaagtacagttatttttccaaatataaacttgaaatttatctacacttagattccaaatttcttaacacttttttttttatgttacatatctttatcatctttatcatttttcaaaatttcgacaaaatttacgtagagatataaataggagaaaaagactaaaaataacaagaaaatcaacttataacctaacacaaacagtaaaaaatacaagcgggaacccaaacgaactttgaagtttcgaaatttacgtgatttcctcaccttcaaatttgtttgaaccatcattattacggaagttcaaaaattcttaacattaaaaaaaaaaaaaaaaatcgtaattgaactccaaaagaatatgtaacactaatacccgaaaaatgatttgatatattattatgagtactctacaattaataaatcattttcaatttttttggaacgttcacaagagatgtttgaaaaacatttgggaatgatatccaaaaagtcaaaagttcaaaaaatcaaaagcggacgaaggaaagtttgttacttgaggaaagcgaggatgaggtttgggaatattattttgacgctttcattatatcattttaaaaattacgtctaagtcggtttcgtggcgagttgtgtaaagaagctggcacaacactaatgatttggttgatttgcttgtaagttgtaataatgtgacattttcttcccttacattatacttgcattgattatattagaatatcacgtaccgtttatgcatattattttagaaaattaagacatatataacacaatagtttttgttatagtatcctcgtcgtaccacaatctatatttaaacacgcataaaacgaatttttaacattttttttctagtcgaatttaagtcttacattttaatttcttaacattttgaagcaatttcaaacatttaaattggtctttaccatgctacagaaaaagtttcacaactccttcctctcaatcaagatcctcacaaaatgatgtggcttatagtgtccttaacaataatccatttgctgccttcaaatctagaattaattcaggtctagaatctgtttgtgatgtagcttagagagttagagatcttgagaaggatgaccaataaaggcagctcaaaaggttcaagagatgtaatatactcatgtcggtggacgcagaaaccatggtcgtggagggcctggaggctgaggcaatcgtggaccattcaattaaggatctctagtgagtatatatggaggctatttcttctttagctcctccctagtttcttgagcttttgatgtttttaaaagctagcaacttgtatgcttatgcttatctctcaaatttattttgcattttctgtgacctttcatgtaatctctttgcattaaaaaaacaaaaaagattttatctatcaaaaagaagaggggttagttttattaggaaagaagaggaactcatgtggacaatatctcctaatgaaatactgagataaaagattaaagataattatttaatctaactacgaaactaaacacctcctaaagtgagaaaacttgaataacgttcacacatgtataatgaagacaattaacccttgttaaaattttatatttactatagtgccattttcatctaaatttagcaatggaaaaacttaaataatacagaaataaaacttgactgtttattgtaatgccattctctctttcactgcagagaaaaccaatcgtgaatgttgcatcacttgcatttagagcctgaccttgagcattaatttgaaagctatatccatttagagccttaattatcttcgtctacatatgtacaacactaattacatgcatacatgaacttggacaaaaaattaataacatacatgcacacatgactacaaattgttatgttaatgtagtaacgagtcaaaaaaaaaaaaatacattaatggaacgaagttacacagattaatcaatttcagattaatacatgattttgatttggaaagttgtatataatataataataatac

SEQ ID NO: 865 - DNA, 2396 bp, Unknown
  misc_feature (1)..( 2396): cDNA_ID_1028388_gDNA_ID_1620330_Annot_ID_153633 3000 nt of promoter + ATG
caatcgatttcaggtaagcacactttgatttgtagtcatgaaagtgcttcagggcactacaatcatgctctgatttaggtcttagagcacttgaatcaacaggattcgtgaagaaacccaacagaagacaagagataacgagaaggaatgtgactgtcaagtaaccaaaacggtttgaagaaaatgaaaatcccatcaatcagctaagacctggaaactcaacaaaaaacgaaaagaaacaaatcagaacagagcaaacgaagaaacagataaagtttggttttttatcagagagtcaaattgaaaaagaagatatttgggtttattgttgagaatctataaatgggtttactccataagaacagatcatgaagaaaacagattagataaacacgaactatacgcggaaagagaaagataaagcactgaccttttttaatatctggaagatgaaaaagcaaaaaagggatcgaatttcgaaacgaagcttttaaaggagacgaagcgaagaaaacacccacaaacacacaaaacaaacactttaacaagacctgacgaagacaaacgtcagagacaaaaaaaaacagaggattgaggaatactatttttttatataaagaatctgaaaaaagtttgtcactttgtcattgccgttttggggttagggtgatttgggttttggaaatggcttatgtgtcggcttcacgatgaactgtgcgtcattttctctttccattacgtatgcgaagaataggaagacgaaggagggagggttagcgaaaggatacataaatttagaagctttttccacaaattaaatattactataaggagctgacccagcaatatttagtatttagtgctgattccttaagccactaactatggaaaaaataatataaatattccggtttggttcgtaatcagttaccggtttaaggttaacttacatataagaaactaatttaaaggatgtggtcagtactgaattgatgtttgtttattccaacaagtaaaactctaatctataacagtcattttaatctaattttattagttgtgaaatagttattggtaattgagtataaaccacaaccaccgcctttattctgttacttccagtttacacaaggcagaataacttgaaatgtaattaagagaaaattaattcaataatttggctttctattagctcaaaattacttcctttatataagctgaaacatcttaattcgaacgtattttaagaaataagtatacatggatattgaatttccaaatagattgagacagccacgatcataaagagaaagttcccaaaaagaaaagacagaaagaaacaagtagaagaagctaatataaaaggaaagtatagtgtgacaagataaagttaataatgaggaaactaatagtatactccacacagtcacacaaagataattgtataatgaggtcgactgaataaagaaaagaaaaaaaagtgtggtcgacttttactactaaaacgagaaagtcggtcgaaggattaggatttaggacacgatttttgtaaaaatatttagggaatttttcaaataaaatcgaacaaaatataaagataagaggacttattacgagtgtgaattgcaaatattaaaaaagtaccgagtcatttagagcaacgcggtcttcaaacgcgttttgtttttctttacttttgtttacatctttgcatttattttgtgatgttattcattgcttgagagctaagtgagtagaagcgatccattaacacaagaatcagcacgtacgtgtacgtccccttcgacggtgatatttgtttttaccttttctagttgatataaaaatcttcgtttactcatggagatcagatactatctaacatcaaaccaacaaatcctttaatctatatattgttagctatcatttaaacttatgccttaacatataaagttgtagactagtgtctgattgtttttttaaaaacactctttttaattggagctgaaatatcttaaaagtgaacacttttagccgacgtccacctttagacaagaggctgactccaaaaagatgtcccaaaaataattgatgatgggcattcattatgataaagttggcccataatcttttttatggatccatttgtccaattcaaatttattgattactgtcacgtcccatcctttttgatgtttatgggctcggtttagatacccggatatcttaccggtatagtccggttatgggacctcaacgaaaactgagacatatgaacggcgatccctccaaagttatcacctaccttctccaatctcttttcgatttcgaattttccatctttcgattctcagtagtttcgtctcaatttcataattccattgtagccgataatg

SEQ ID NO: 866 - DNA, 3000 bp, Unknown
  misc_feature (1)..( 3000): cDNA_ID_2127207_gDNA_ID_1620330_Annot_ID_153630 3000 nt of promoter + ATG
ttttgaggattttaatatatcaatttatctgtttagtttaacaaaacatatatataggtccattactaagtgagttttggaccagtggcgagttttcggatcctccaaacattataacgttattgagcttcctaattcgattccacttgacatgaagacaaaaaaaaattcaacgagaaaatatagggattttggctcataactattcgattaacacgtgttcagaaaaaaaaactaatcgattaaccgtagttagttataaaagatttaagtgcatcaatatatgtaatatgtatatattgggttttacttcaagtctccaacgtcccaaaagcaattttgggattgtggttttggatgatgggaagtggatagagatcgtataatttgtctgtgtatggttacaatggcccttaagaaattcaatagaacgtaacataaaaaaggaagaaaaaaggacaaggagctagagaagttataaaagacaagtaatacccagttgtatcaaatcagtcgcactcggtaatataaaaatgtgtttttaaataattgcataatcttttaccgcttacaatatatgcatgatgtaagaaaaaaagaaaaaaaaaaacagctgtgcagcagacgtaagttatttagctgttttgattccttttattttaaagaagtcacgggatgattagttcacactactgctagtagtagtttggctgtttcctcatgggcatgaattctaaaagggaattctaaaacctagcaaaacaaatattataaaaatttcagtaaaagtgtgtatatattaagagtggtaggtctaatttatgagtatccgattaggttgttgtagatcaagattagactaccagtacctattcacggataaaaaaaaattcattagagattcttaaccaaaaatatcactaacaatttaagattagagaattttgaaaaaaaaaaaaaaaacacgccggataacttgatggttattattttaaaaggttgccatgtgaaaaaaaaaaaaaaaaaaaacaagataaagtaaaggtacaaagaaaacttgttttttttttgttaatatcagcatatattatatgcatgtttgaatattgatgtaaacacacaataacaacattaacacacatgacatatgtacttttagtaagatataagatcttactaaaataaaaaaaagtatgaaaattaaatatacagatacttgaacttttttagagaattaaaaaaaaattgaaacagctaagcaattaacataaatcgtcaaaaaaccagaatgcatctgaaagaaacagattgtcgcctcttgtatctttcaacactcttaaaacttttaacgtatattatatttgcatacgtacatgcacactaaccaatacgtacacatacggtacacggacagctttattatcaaataaaaggcggtagttaaaaaataaatattattaatattgtactctaaaatcaaacgttaaatgttattgtcaaaaaaggagtataaatcattttatcaaatcaatttttatagagttgattcgtgacatagcttacaatttttattttcttctttaattcgagttttggatttaatagtttaaaacacgttaaaaagacaatgatttgagttaaaaaagaagaagacaatgatgctttaatcatgaaacagatacaacgttagattttattatttttacatctgctcgtaacgaaaaagttctataaaattttagctgttttatctttcttctgaaaaattatcgtataatattttaatggatttaaatatacaccagctaaaataaggtctatccgatcatatagcgacgtgatcaggatacttaagttccattttaatccagtatttaatttgtattctaaaataaacgcaaacgaattctaaaatgtaatggactaaagatatattgattgctgtaccaccttgaactaataagtaattctcgtggatatactagtaaagtacttttcattggtcattggtcagatacaacgcaaacgtaacttggaacactaaattcaaaggtgaaacaaaatcctaagtatctatttcttgtcatttttattgttagtttataaattctcgctcaactatgatatatttaaataaattctattatattaattattacatgattttttcgagttaaatatttaaaaatgactctacgtagtacgtacatagatttttgatcggctaatgttgttatatatgtgcatgaggtattcccaaacttgtcatatcaatcaaaatctcaatcaaagacaagttctacttgacaaacaaaatctttttggcctctgtaactctgttgcatgacgtcgataatctattgtccacatttatatctaaaaagcaaccagatcgcccgaggtttgtacaattatttgctatttaataaagataaatttatgaataacttgctaaacatcttgatcatatctacagcagaaagcaagacaaataataaccggtgttttcacaattgcatgtataatcatattttgctatacgaatttgcaaattttatacattttttggggtgtgaatattatcaatccgagaacacagataaaagttgtattgtaaattcaaaactgagaaaaacgttaaccagggtttgtttgtgagttggtccaataatgcaatggtggaagcatttcttgttagttttgttatacaatcaaatgatatacaagaacagtttttaaccctctgcctctcggaatacgtgttaacatattcgaccgtgtcctatataatatttaattctaagtgagagcactaaaatagtgtaacttaatatttaaggaaaacaaaaaagaactcattgagaatctctcttctgtatatattcaatacatattacataaatcttccctcaagtaaccacaacatctcctttctctttttcttaaaatccataatccaaccaaaagaagaaaaaaaaacaagaatcttgatagcaaatg

SEQ ID NO: 867 - DNA, 3000 bp, Unknown
  misc_feature (1)..( 3000): cDNA_ID_2127180_gDNA_ID_1620330_Annot_ID_153621 3000 nt of promoter + ATG
tttaaaagacaataatattttgggttcttttggtaatcgagtttcagaaaagcaaaactagttttgagtatatataatggctatttacgttaagtgtgtattgtacaagtcatctcccacttcaacaaacataatccaaaaaccatttgttttttctgtcaagcaataaacgtttcaagtaataccatagttaaaataaaatcttgtatctaaaaacgtcactgatccaaatggttaaataatgggttagtatctctacaacgttatcaagacgaagagaacaaaacaacaaaattgccacacaacaactgcataatataaaagttggaaacatgaatgtttttcgagtcttcattggtcaagcaataactattaaataagactgttcatattagataaaaatggaaaatgaatggacatgctcttcgtggaaagagacgtggaaattttccatgagtttcttttgtcttctttcttactttttctattatttcttttccaattctcagatttttctaataatattgtggaaaaaacaaacacatccattgaataaagacaacaaaagattgtattaagacattgtgtgactaataatgtcttctaaccccaaatgaaaccttcttccttaaggttcttctcttcttctttatatatctctttcacctctcactttcactctctccatctacatataacacagtgagaaaacagagcaaaaacagagagatattacgatgtttttctctaaggatcttccttcacctacttcggttttcacagcttacgcatcaatggcgggttacatgatgatgataagatcaatggctcacgagctaatcccagctcccctccaagatttcatctacaggactctccggtctctcttcttccgttcttcttcctccactttgacgctaaccatcgatgacgacaacatgggtatgaacaacgagatctaccgagctgctcagacttatctctccaccaagatcagtcctgatgcagtcaggctcagaataagtaaaggccataaggataaacatgtcaacttgtatctcagcgacggagaaatcgtcaacgatgtgtacgaagatgtgcagctagtatggaggtttgttactgacggtggagacaagaaaggaggcggcggaggagtaggaggaagaggaggaggaggaggaagaagaggtggtatggacgatgacggtaaaagcgagtacttcgagctgagtttcgacaagaaacataaagatttgatattgaactcttatgtgccttacatcgagagtaaagctaaagagataagagacgagagaagaatcttgatgctgcattctctcaacagtcttagatgggaatcagttattcttgaacacccttcgacctttgagacaatggctatggaagatgatctcaaacgtgacgtcatcgaggatcttgatcggttcataagaaggaaagagttttacaagagagtagggaaagcttggaagaggggttacttgttgtacggtccaccgggtacggggaagtctagtcttgttgcagccatggctaattacctcaagtttgatgtttatgatcttcagcttgcgagtgtgatgcgtgactctgatctaaggaggctcttactagctacacgtaaccggtcgattcttgtcatagaagatatcgattgtgcagtggatttacccaacagaattgagcagcctgttgaaggcaagaaccgtggcgagtctcaggttagatttctactatgattggttttggtttaggattggccaattgaaccaaatttaccaaatcgaaccaaaccaaaatccgtatcaaccaaattttaatttagtgtaacaagactgactctgattagtatagagaattttagtatatttaaaattgtatttttttttgttttctatgaaaatgtgtgtttagggaccattgacgttatcggggctgctgaatttcatagacggactatggtcaagctgtggagacgagcggattataatattcacaacaaaccataaagataggcttgacccggcattgcttagaccaggacgtatggatatgcacatttacatgggacattgctcttttcaaggattcaagactttagcttctaactacttgggtttgagtgatgctgcgatgccacaccgtctatttccggagattgagcgtttgattgacggggaagtaatgacgccggcacaagtagcagaggagctgatgaagagtgaggatgctgacgtggcgctagagggtttggtgaatgttttagagaaaatgaggctaaaatctaaggaatcgaatccggtgatgatgaagcagaaagagagtagactggagatggaggagatgagactaaagagtgatactgagggttctccgaggaagaacagcaaaagatttaagaagcttgtattgttttggacataatccattaattagttcaaataagattatgaggaagcaaacaaaaatagacgtataagaggctaattacaactctttaagtgttttttaaaagaaatttcttgtatgtttattttctagggttgtgaaccattgtaagacccattaagagatatggaactttatttttccttaaagtaagaaactatatattgagatagtctttggaggtacattaccaactaccaagtatgttatactctacctatataaaggaagaaccaaagaaaaaataaagcatatagagtggagagtctcttgccttgttacagagacttttgagaagagtaaaatctttaagtgttgatatcttcttttatttatgtggtaatgaatatcccaaactgcgtaatagcttgatacgtactttgcgttattagcctaatgggctggcctttgtggcccaaatgatgaaaaagatgaataaagagagagaattatctcccaatacaaatctctatataataaacccaatttaccaaaagagaaaccaaaccctaaaagtcgaaaacaatg

SEQ ID NO: 868 - DNA, 3000 bp, Unknown
  misc_feature (1)..( 3000): cDNA_ID_2127147_gDNA_ID_1620330_Annot_ID_153611 3000 nt of promoter + ATG
aagttaccaattgatctttcgattctcattaacttttacaatgagttgttgttaattatatctcaaatctcttctgctcatttttcgcctattctttttgaataactcttaacaacaaaatttaataatcttagcaataatactgaccggtcaaagtttcacacaacacaacaatgacatagagaaattgaattcttcttttataatctgatcatcatcttgatttaatattttacatagagaactaaaatttggccggctatactctctcgaagagacttttggatacaatcgttatacgagttcattaaatcctgagctaggtttgatccatttcccatgttattcgatttaggaactagaatcgcaacacgatattgaaagaacatacaatagtttatgagttcatgcacttcagaataatgatacgctacgtctcaaccaatcttatcgtcgggaaattcactatcaaatcatcgctggatggcacagaaacacgagcttcctaccaagagatcctctgtcttatgcggagtctcatacttaaatcaaaccgatgagataacctcccaacactccaattcaattcaattccggttaagtcttcgtaaaccaaacccatactagaaatcatgaaaattccgaagaaaaatcataagattaaatgattaatagattactatctacaagatatatgaaaaaagaacataaataatttacagaattaccactctttctgctattagctcaaaaggccgtcgtcccccatgtcagtggttaggtgagccatttattttcatgaaaactatagaaagaaagttatatttatgtttcatgaaaatagaagaaaatggttattactttttttttttttagcagggaatttggtttacaaaagcgaaagtagaaaatatatattaaaatataaaattatatcgaagtgcataggaagatgaaactgtgatcaagaacatacaaaacacaatgacggtggttcttctgatactactagtattactaagtacattcacatggatgcctgcgccaaacttacaaaattcatttttttgttggatacatctcatattgccatttaataccttgttttttcacttctttttccaattcttgacgatgacaaatgttagttatacctctggccaaaaagttagatagatgagtcataagtgacatagtaaataaacaaaaatatataattaaactaaatatctcaataagtatatcacggaaaaaagtaggattaaggatttgtaatagtaaattagtgatataaagcgttgaaatgaaaacaaaacagatggaagtatccaataaaaacgtggactggtaggaatgaattgtcaaaattaaatcatataacgtgtagctagtatgggtccccgtcgtgtcctcctatccagtcgtcgaaggtgtctgtctttaaaacatcgccgatcgatagttatgagtctgagtttcttctgaggaaacgggacgtcgtttgcgtagtttgtaactatgaaattgaaaatagtaaaacacgaatacataaaagaagctaaaacattttttttatcatatctataatctatagtagtagtatttctattactcggttaaacgacacttgaaagtcgaaactttgatttgtttgaggttgtgtcagagagagaaaggaagagagagttccgtctcttattagatgctcatttactccaaagtctgaagtttgatttatttgaggatggatgcatagcatttgcatggattaaatgattgtttttggcacgtggagtcgtggacaacaacacctccacaattcaccctccacaactgtatatacgtatgtatttttactacagatttgtatttttctttgtaatttacagcaacgaaattctttgggcgtaactatttttccactaggtgaaataaaactagagattttttaacagaaagtagtgatgtttttctaaaatatatcgttttccgtgtctaacttacatgattacatcatttttgcatgatgtttacatacatcatttttgcatatgagtgatattcataagcaacgaaacgcataattcattaaaagatgatcaatatcataacatacatttatctcgaaatatagtatagatgtatcatgtactatacaaaatagaagtttcaatttatatactttccaagtataaattaaaaaagggttaatcattcgcaataataaattcgtaacttgttaatctctaattgacgtgaaacttcacttaaaattaatcagaagtaacacttagtatttaaaaattgcacgttgttaattcccttaaacaaacaaaacgacgcttttactttctaaaatgtttccacatatgagtgtatatatacacttttctattacgttgtcccaatatacacgtctagacctacttaacccttttcttttctctcttctctctttctctttctctttctctcagtcagtatatatagccaagcgttgtagtttaagtcgaccacattctcaaagagagagagaaaagatcatatcacacttattttctcttgccctcttttctttttccttttgaatatttctgggttactaatatttaatttgttggttcttcggtttctccgactctttccccttgaacctagcttaacaggtaagtgaatcacctccatacatcaataaattctttaagaaaatatgtacatatacatgcatatttagggtgacttatccgtgaagattttgtcaagagaaattaagcttttggatttaggctgaatttaggatatacttagcttctctgatcactcactggtgtttaatatttacatagtagtcttgacgaccctttgtttttcttaaacctggatgaaactttgaattaagctcaagttatctttgtggcatgtctattacagtagtaataagttaaaattctacatgtattttttatttacttagagaaaatcaaagagagaggaaaaatg

SEQ ID NO: 869 - DNA, 3000 bp, Unknown
  misc_feature (1)..( 3000): cDNA_ID_2127140_gDNA_ID_1620330_Annot_ID_153609 3000 nt of promoter + ATG
tgctctaacagaacaaagtgcattttaatgtaaaacaacagaaagattctcatatcacaagattgaatgctattcaacacacaaaacctagaaaaaaaaatacgactctaaacaaaagattaaagatttgtgtaccacaagcttaagggtttttgattctttctttctgattcccgctaattcgactctgcgacggtctttaacaacgagaactgatttgatttcgaaattctcagagtgggataacgctaagaaagatgacaaagagtcgtctgaacatatatagttctgccttcgtcgaagcagaggaaacgcctgagacgctgctaatcgagccgtagtttccacgctacgcgtttgcttttattcttcaagataatatatagtattaattacagtatcttcagaaatgaaaacatatgtcttctattgtttatatgaggaaagaaaaattcgaataagttctagatattgaaaaatgttattacgataggatctgattccagtcaaattaatacacctaatccattacagattttactaccattttaaagtcacgtgacttttacataatctaaaatcaaaagagcgaaaaataaaacaagaggtcggtacggttcggtttagcattattagaaagtagaaaccaaaccaaactgaattggataacgttcattgatcagaataggtaataggtcatgtttctggtaatagctgacgtttctggtaaagtcttctgtagattcttgcaccttcgaactctgcgtggatctctcgttctgttcttatacccatcgggttttccgttaaccacccatcctctgtgtcaactgtgtccatgtgttgaagaacatttgattcctcgtccaactgatctctcatgtcttgagccacatccagcacatcggattgcacaaatatctgtgcacaaccagtaacaaagaaaatgtatatagttaagtttaaactgtaaaagaaccagtagtgttggtaggcagtaagcaaaacacttacttttccaccgggttttaggttttgaagaatggaattcaccaaaggcttttgaacaacacgtctcttttgatgacgtttcttgaaatgaggatccggacactgcatttttacacgtcaaaacaaataagttggattatcatcaccacctgaagaaagagccggtaaatatagctttctcggatgcttacaactttcttttatcacttaccaagattgagacaatctccaatggtccaggatagctcgatataagatgttcaaaagaaaccatggcgtttgcaaatatgaagtgtctgaaacccatccatcaaagaagttatcaacagagtatataacataggtgtattcaaaaaatctttcctaaggttttgggatgcagagattacacgtttgaaagtccgagctcattcacccaaaagttggcgcgcttgaccagctgcaaagaaatgtgacaaattaaacttcattaggccaaagataccgaaagatacatcagcttaagtagatgaatgatcagctggaaaacatcaaaacagtcaaaaggagatagatccttactttctgacgtatttccagccccaagtaatttcttgattcaacattcttattggcttgccataggagaaatctgccactacctaaaatataatgacgtagccacaggttagtagaagaatccaagttcaaaaaccaattacaaggcagagaggcaagaacggaaatcaaatgggaaacttttggcctttaaaagttgaaacacattcaagcatgaaagaggcgcaagaccaggaacgatataaaggagagctatttgactactcaaaattcaaattcagattccagggaattataccaattacgcaaccaaaagtctccaacaactagtgtataatgtaacttaactaagaaaacaggatctgcataagtatatatcaattttcagaagaagatataaatagatttgagttgagacaaagcataagtcccacaagtctaagcaagctcacaagttaccacttccaatatccaccataagaggaagtgatggatccttataaacttcatcccaaacaggaactggagctggtttctatcagaaagaagaacagtataaatcagttttagtgtttcacatatcatttcaaaagtcacaaactttgcaacatcatcaacttacagagaaagaggaactgagaggattaacatgctgtctgattcttacatgacccacttcctgcaaataaaacagagagaaacacaaattatactcaaccactaattagagatactgatagaccagagtctatgaagatgaaaagctatctacttggaacaaaaagagaaaagaacactaatcgaaacaaaaacaatacccagaaagcaaagactggaaaaggaaacaaatttagggtaagcaaaaacagagggagagagaagaaaggaggatacttcagatatcttatgattgaggttaagttctgcatactccaattccaccaattcattgcttctcagatccttaaaatcgacacaaactgaggtagacgctgacgaagacgcagaaacggcattaaatgctctaaagctgttacaatggcgagggattttgtgttccctcatgaagataaacggagatgatgctaaggagaacacccttttcgccaggagcaatggtgtagctgaagacgaagagcaagcttgacatagagaagccatttttgttagagaaacagaggaggattggattcaattccagaccataaaaatgttttcttttagtgttcttctcctgcttcttaaacccaatgaaggaagaagaaagctgtgatctcaatctagaaaacgttcaagagttttgtacttaatgtgataagaatcgaaataaatggggtgtttgtgtaaatacattaaaatgcttaagaacttgtggattttaaaaactccagctttctccgcttgagctcatcatagccactaaccaaaaag

SEQ ID NO: 870 - DNA, 3000 bp, Unknown
  misc_feature (1)..( 3000): cDNA_ID_2127144_gDNA_ID_1620330_Annot_ID_153610 3000 nt of promoter + ATG
ttggacattgcggccacgtggtggtgcgtaagcgtgatggggatggggatccatggtgcgcttctagggcttaatataagctcatggtcggtggccatagccgagtttgtatatgtgtttggagggtggtgcccgcatacttggaccggctttagcactgctgcttttcttgatcttattcccatgctcaagttatccatatcctccggcttcatgctttggtaacttgcttttatttgttaatttttttcgcgggattaaaacatgattattaagcgtggaccactactaataggctaatacaaatttctaatgactcttcttttgcttctcttgtttatttattgcctcaaacagcttagagtactggtatatgagcatcattgtcttgatgtctggatatgcaaaggatgcgaatatcgcaatttccgctttctccatatggtattacttaaatccgaagaagtttttttttccatatacatatgaaaactaaatacttaattcaaaatttgcagccaatatatctactcatgggagatgaacatatgctttggcttgatgggtgcagcatggtttgtaactatatacgtactctcattcacagtattttgtttttgatgtatacatatattatttgtttaatactaaagtgaatgtttctctatctatgaatccgaaaatgtagtgtacgagtggcgaatgaattgggaaaaggcgatgcggatgcggtgagattctcgataaaagtggtgcttgtggtatcagcggtgatcggtgtgatatgttccgctctttgcctagcgtttggcggtcagatttcgtatttgttctctgatagccaagcagtttcggatgcagtagctgatctctccatcgtccttagcatatctatactcttcaacatcatccagcccattctatctggttacaaaataaaacccttatattagacataaataaattataacataaacttttagatttcactaatttgtaaccactaaatttgtttgaacatatataaacaggggtagcaattggagcagggatgcagagtatggtagcattagtgaacttagcatcttattatgcaattggtgttcctttaggtgtcctccttgtttacgttttcaattttgggattaaggtacatcatatatatgaaaactggtatccagtacttcattatgatcaatcattagaacttttagaattttaacttgaataaatgatattgtatgcagggactctggtccggaatgttggctggagttggtatccaaacgttgatattgtgttatgttatttacaaaactgactgggaattggaggtaatttacttttaatatataactcaaaatttttattagaaaattcgtcatattaaatgtataattttatctaattacaggttaagaagacaaacgagcgtatgaaaacgtggactctaaatttacctgctgtacaatcgactactatctccacaagagatgaagagagaaagtgaacatacaactaagttaatttaaagaaatcttttaagaaattctttataaaaaaagaaagaataatttatgttgtattgtggttgtgttttgcattccctaagaatgaagtatcggtgttgagattgcattattaggttaatgcaactctcataactttgaaaaaggttaagaaggatgaactttttcttttatcagagaaaaaggttgttctcttgttcttcggatatactctttctaaacaaaaaaaaaattgtgggaggtttgaaattttaacttctttcttgattttttaatggatgtatattttgtgtgtggggaaaaaaattccatttgtttgagtgcttgtaatcgtgaatttttacaaaaaaaatattctcatatatatttcgaggaaacgttacaaactttcataagctcaccatcaaataaaatactcatttatttatgttgaagtcaaaacgttccatttttccccctatttatgaaccgatcctaatgaatgttttttttcttcctttttacttctttcatatcaccattttaaataataatagtaattattatttttctaacgtttaaacaaaaaaagaactgcaaattttatagtaacaattcaaatttaacaaagcgatcaaaacatgcatcatttagtgtacaagtactaatcacaaagaaacaagttttggttggacaaagtatagaacaaacacactaaactgaagaaaatagaactttagcccaccaaaagttgaggctaaaactcgagcagtaatcacatagttactatcaagataactatactttggaatgaaagaatctgaatctcgatgaagtttatcttggagaaggactttcttttctgttggtttggatgagatattgctgaaaattattgatgatgatgttaggagatccaactaagttgtctgcctttgcagtgcacttggagacttggagtgagaatcttagtttatgagacttattttctgatttttcaatctcctttgatttttttttaagttgtaataatgtcctagttgatttccttgtaaaaggagcaagagcacgatgttcttttatttctaatttaaagaaaatgttttcagtttaatatatttttcgatttaatttaccttcacatattttcttcagtagtatttattattttcatattagtaattagaaataatctcttctaattagattataaacgttaagaatttgctgtattcaacttttcctattgtgatattaaaaaaaaaaaaaaaaaagagaatccaaaaaagtgaaaaaactggtctttgaggtcaggtcaggtcttcttcctgcaaaaacaaaaacctcagaaatagagaaaaagtttcaatctttcttcatcttcttcctccaaaatccttgatttctaaaaaggagaagaagagaagagaacgcgattaccttgattcaccctcctccttcaggtttgggaggctcgaatactcaggaaatg

SEQ ID NO: 871 - DNA, 3000 bp, Unknown
  misc_feature (1)..( 3000): cDNA_ID_3059365_gDNA_ID_1620331_Annot_ID_153647 3000 nt of promoter + ATG
ataacctataaacaagaattaccaaaattaaaacatctagaagaaaaattatcagttttgtctcgttttttattcacagaagtgaatctaaagcacaaactctaattcttaatctccgtttttttgtagacgatttgaaacgtctgtacacaaacatatgtatatcaacactgacatgtttcgtaaatccaactttgtgatcagctattagtgtattcttacccattttttctttttaagtttttctcttgttctccaatttctttcttctgatacagagagaattgagccttctaagatgcggcatttgcgggttgctagtcaagagtagagtcaaataccatttcctgcagaacaaacggatcctctcagacatatcccgggaattaaaatgaatttgtaaacaagctaaattggaactactcattatttacggtttacttagagattagagtttttcgacatacaccaaagagaagtgaataaaagaatgtaccttgttgcagacggggcaggtttcacttctctccatccattctagaatgcatgcaaggtgaaaatggtgatcacatttggctacaagtttcgggttctcgatatcatattctgaatcaaaagcacagacaatataataaataacccattctcgcagtcatgtaaggtacgattatgtttatatgtttttgagatgtgggaaaggcaaacaagcttttaccttccaaacatatgggacaatcctcctcttcctctattggtataaaaacagcttttgatagcttcgggtctatttcttcagtagattcaagatcaatctctgtttggattttgctatctgtctctttatgtgagcatgtagttggaaccccgagagtaataccatcaactgtttcttgagcagactcggtattagcagagtccaccgaaacctctcttatatcaacacaagtagcctcttcaccactagctggtgtttgaggaatccctataggcacatcgaaaggggtaggcagtggcggtggtatataagcatcaggagatgatgtctctaagtttgtgtctactactacaacaccagtagagattgcagaggaagtcctgttatgagcggaagataaaggcacacgctcttctgttgcccttgggtactgcaaaatacaagtcataaaacaagttatattcccatatgaatctcgaagcccgttggggcttttaactcatttagtgtcctgaagcacatcaagattgatttatttgcagcctatcaaagcaaggacacccaaaaaaaacgaggaagtgggagaagtatcagactaacgtagtagtacgcaggtccattatctacatcagctcttcgtgaagaagaacaacaacagcaacctcccatctcttcttctctttttttttttttctgttttacaaaaactacaaaacccgaagactcttcatctatgctaacctacaagatatgtgaagaaacaaattacattctgagatcagtaggagaatatttatcatctatatgcaagaaactcaaacaagctttatcgttttcgatatcagtttgagctgtctactaaagtctgatcagactcatcatgctagtagcaacaataaaacaattcagctactaacagttcaaattcactctcaataatcaaagatacaataaacatcaaccattaaaatcgagacaacagtgttgcgactacaagcctatgtgaatctcctacaattctcattctctttagcaccatctacacacaattgcaataaattcaaatcagttttacactaaaccccaaaaacttaaaacaattctactcagaatttaactccaacacaaacaatgaatccacaaaaagaaccaaagctccattaagagcaagctaatccgtaaaaccctaaaccgaaacttataaaagcaacaataaacatcagaattctcagaatctagcataaacacataggagaaatacggatcaaaacagtaaaaaaaaaacccacagaatttcacacaaaaatcaagctcaaaacctaaagaaaagcgatcactagcaagaacaaacaccaaagaagaaccgatcatcttctcgagattgaatcagagaagaggaattaaaaatctcaaaatcatagagagaattttactttttgttcttgggggaagctttttttgttttgtcttcgtctttctctgcttctgtgctttttgcggtgctgtgtttatcgtgcgctctatcaaaatgactttcctaagaaattacaaagactctttttgggctcaatattatatttacttacctgatttattaaattcattaatacaattattaattagctgattaattattttattttttccgttacaatgtatttttcaaaatttcaataatgaaattacataactgaaaatcggctgaaaagtgtcgaccaaaaaattataaattgggaagtaccattttcagtaaaattattactattttttttccggcaaataatttatcgatgtttaaaaaagaaacatgggctcaaacttaagaataaagcccatttaaagaatcctattaaaagcccatatttgatctgttactgcagcctttatatatgaatcgtgttcttacgtttctgcttaacaatttccttcctccgcttcaaacgagtcaccgactcgacacaggaatccgaattcgccggagacgcagcttgcttcgttgaatagcttacaacgggaaattaccacgaagacggttgtatattccctccgtcgtacaatttaggttatgtgcgaattcacaaattgaaaatacaagagaaacaatccctaaaatcgatttgattaagaggagcgaaaagaagaaaatcaatatgggaaacggtaatggtctcgaatctcgatcgtactgagttttgattcgtttattgaattatccggtgaaaagagtatgctaatactggggaaaatgttgatgtttagatgaaagaaaacgacctacaaagaag

SEQ ID NO: 872 - DNA, 3000 bp, Unknown
  misc_feature (1)..( 3000): cDNA_ID_2127366_gDNA_ID_1620331_Annot_ID_153658 3000 nt of promoter + ATG
tttggatattcttatcctgtacttccttgatagtttcagttaacagtttgtaattaacacatgtatttaatttggaaacaaaaaaatgaatgtatagatgattttttttttgaattgttggtaaatatatgaacttgacgtatatagcaatagtatactatatttaagcaactgaatgtgaatattctataacacaagtaatatcaattttttgtgatattgttggttataagttatattcgaatttgtcatttataagaaaactcactggtttatccatccaatgaaaagaagaaagctttttgggtgactctaataaatattagcggttaaataactacaaacacagtgttgtttttgtctcttctatgtatctttttatgtcctcttttacaacttggctttgatgttaactaatcaaagattatcctacttaaaaactatttaattaaataatttttaatttctttaaaattaattaatttcttgatatgtttttgtaacgccaattaattatacgtttttcataatgtggtgtttgacttatggtttgaatgttaagatgtcgtatatatctaaattctaaagaaagaaatttgcaaattttgtaataaacactatttttacaacaattaataatacatgtgccaagcagaagaacgactatattagttttctatgtcaacatttaagaaacatttatttaaaatttgaatatttgattttgtatgtcagcaatgtttaagaaaactttgattttttgttttccttcttttgcgtacatattaaatggaatttaatagaaaaccattaaatcttgatataattaacttcttcgcccttgcagttactaacaaggagacttttgttttggtactttctcgattagtttagtgaccgaccaacaacgtattttaaaactcaaaacacaatctctttcacgtactgtgcgaagtgcaagtcgaataatgacatcagtccatttgtgttgtattacacgggactacgatctctattctactatatataattactattaattaaaatgtttatatagttatgatatggttgatagtaatttaatagtaattgttaaacagtagagaagtgacactgagacatatctgagaaaagcctgaactcaactcctacttctggtttgatttcttgggattcgttctctttcatttacttacctctccatctatacaccaacatatatatatatatattggtatgttaattctccaaaaaaaaaaaaaactattttaggagcaaaactttttcacagttattcattttttaagttaacttaacttctcttctttgtttgaaaattcatttatcatcaaataattctgttataaattagacctgataataattctttaacaaagaaaatatattttaggagcaaaataggcagagccgcagaggcatacatgtattatatataacgattatttatgtatagaaagggacaccttttgtacaaaatactagttaaatttgtacattcacgtgactggttggctaaatttagaatattattattttcaattaaaaatcatcgtcaatgttcaaatattgcttgagatacgctatgcttcataaaaatgtttaaaaagtagttccaaaaaatattttcaccaaaaaaaaaagtagttccaaaaatattcatttaataacaaaatttgcctacataagcttagcaaacgacactaacaccaaaattgatatcattttcttagataacatattgtatacatatctacatacatactaaatacatatacacgtagattacacgtatggattcagcaataaaaatcaaaatactaaatacatatatacatatatatatatatatatgaacatttaaatactaaattatgtttaataaataattaaatcaacgtagagatatgtcatatgaagatggcttgtataattagtttgtgtaccgggcaaaggatctctaatttttgttttctttagttcagtttaattatttgttatctatccaatcaattttttttctaaactgtttggaccaatgtacgtacgtaccatcctttttgattttttttgtaaactaaattttcgaattagcaggttcttaataattgaacgaagaaaataaagaatagaggtagacacctgtagtattttcttggtcagaccaataatttataattcaacgtcaaagaagaagaaaaatataaaccattatttcattatgacttacgtataccaaaatacacaaattaaatgtataattgtgaggcattttatatgcgggaaaaaataaaataaaaagaatattaatatttcttttgaaaattgtaaagcattttgacccacttgtgatatatatatatatatagatatatatagagagagagattaaaacattgatggctagctatagagtctatggcagggtcatgatcacctgtcttctgatctctgaagagataccaatctgattttttctcttcctaggtttaattttattttaccattttataattctttatttttgcctgtagtacaatttacagacccatactaaaagaaaaattaaattttgtcaaagtacaaaacaaagagagaggtgaagccacacaatctcttttcttctctctctctctgttatatctcttctgtttaattcttttattcttcttcgtctatcttctcctataatctcttctctctccctcttcacctaaagaataagaagaaaaataattcacatctttatgcaaactactttcttgtagggttttaggagctatctctattgtcttggttctgatacaaagttttgtaattttcatggtatgagaagatttgcctttctattttgtttattggttctttttaactttttcttggagatgggttcttgtagatcttaatgaaacttctgtttttgtcccaaaaagagttttcttttttcttctcttctttttgggttttcaattcttgagagac

SEQ ID NO: 873 - DNA, 3000 bp, Unknown
  misc_feature (1)..( 3000): cDNA_ID_3059344_gDNA_ID_1620331_Annot_ID_153660 3000 nt of promoter + ATG
ttaagaattttgaatgaaatgtgatatgtaaaaataaattaatattgaaaacttacactcagctccttttggaaattcgtcgaacaagaaggtgatgttctttaacaggctctgaacaaaatattatcaataaaaataaatgtaaaaatatactcaaaaatacctctcatctacattattcatttgtaaaaattgaaaataactattttaccaatgttattcctcccggtttaattggcgattcaatcaaaatcctcgcgtttctgatttttttttgtcaaatcaattacaagattatttgttaattagtatagatatgaaataaataaaaactgagatattttttcactaaacatatcatttatgtatgcagtgtaccatcctacatatataaatgcttgttgttagaaaaaaaaacaaagcactatgttcatctcctacttattagtacatatatatccctccaaaaaaacaagttaccttataaccagtcttcctccttcatctataaattcatagaagctacatcctcttgtaaagggaatttttcgtcctttccattcttcatacaataaacacaaaacgaaaggaagaccaatgcgactattaaacataagtatgtataattaggcaataagcatgagcgatatatgtactaaaacgtaccaagatgccaattaacagcagcactatgtccatcaccttcacacacattttcaacacaaaacttaacgttttgtcccatactcttcacaagttcttcgaagaactccatagcttcctgcaaaaatatgtcaattcattcacaaaacaaatcttgaaatgtataatatgtatacacatcgtatagatttaaaagtttgcggagagatcttatagaaaaaatcttacttgtttccctcgaaaaggctttggaaaggagaaatcatcgataaaacaatcgctggagatgcaactacttaattggtcttgattcttctcgtttatagaggaataaaatttcataacagcatcatacccagagatttgattcggcctagagttaggtcgatccaaacatgaaaccacgatatttctccttgaagcgtacttatttatcatttttattggatcattcttgattgcattcaactggctagaatgttgtagagaaggtagatctagtttgagccgtggagttttgaatttggtgatgagatttctcgtaactattatactcgtaacattaaccatggaggccattgttgtaatatgaatcgcttcagcaagcgacaaataaataattttgttatttttggtggagaattttaattatggtaaagagaatgtgaagatcattggaggagtttgcgaactatgcttcatatatgatttgttaaagttgtttcttgtaaagttctttacttcttgttgtaaccttttaatgttcttagttactttatgtagcaagaaatcttagcatatcccttactatagtaatacgattaacgtatcaagataactaagcatatctcctccaaaactttccggttcttttgattgcatcacatggttaaattttgtagacttatttattttaattttgaagttatccatagttagatcattcaatcaaaagcaaagttcaagatcagtctcaggccaagatcacaacttcaaaaggccaatttttagaccatgcaaagtaattaaactcgaacatctctaatcaaagaatgaaaggttaaaaaaaaactgctttctatttttaccctaatctggtggtcaaagtttactctttgccgcaacgtcgaagctcctgacgtcgtgtgtcattgtcggcaaaaaaaattgaagtctctttatatcggacatgtcatgccccaaacattattgaagggcagatttcaatattctttttaataaaaggataataacattataacaataacgaaacatctcatatctaaatcactgaagtatcacaaataatttgactaaaaacgtcggtacatgcactgtaattaaagaaaagaaaaatgcttaacaatcaataatgttttgggccttcaattagtaacagaacccattgattttttttgaatgtgatttccacaaaagtagatagaaataggcaaaaaagaaaagagctagaaattttaaactctctgatgaactcagaagctcctgaagagtagcagcatggatgtaataaaattgtctcgtagtctgcaacaacaagttgtcaacaacaccacccatgcccccccataatttatcattttcataaattgccccaaaaattatagttttatttctaaaccaacccctataataaataaaatagtcctagctcccccaccacctccaaagttctgctactaccgacacatattttccactacaatccatacacgtgtccatgcaaaaatacttatcatagtaaaacgaaaaaatactagtagttataattgtatttcttgtttcccacctaattaattcttaaatctccttaagcaaaatttgattgactgtatattttgtttgtcggtttgagtgtaaaatacagtaaatgacaacaaaaaaaaaaaatcaaacgcgaggatatatcaattgtttatcagagctaaatatgacaaatatcgtataacgttttttgttaattactctactcatacagataattccaagatcaatctaagagtaacaattagaatctaacctttatcatatcgaaacaaaatagattagattttttgctaactaaaagtataattttctttttgactatgacattttaatatattaatatataaactaagtaaaatgagtctctttcacaagacacttttgtcttctcttttagaaaatcagaacagagccactgcatgttcttcttctcaatctcactttcttcttaaacccataaaatttgtttccatcgaaatatttattaccaattatttatatttcttagattttgatttcgtttccttttcttcatctttggttcttaagatg

SEQ ID NO: 874 - DNA, 3000 bp, Unknown
  misc_feature (1)..( 3000): cDNA_ID_3059340_gDNA_ID_1620331_Annot_ID_153661 3000 nt of promoter + ATG
attaactaaaaagcattaaatacaatgatcaaataaaatctagttgtagttaaaactacttactactaattaaccaactgaaacaaaacacaaagattcgtattaatcaatcaaaatatgttatttagttagaaaatcatagaattttcatttacagattgtgtttggtgtaaaagaaagtaatattaataatctgaacatgttttacagttaattaaccaacttaatttaactagattcatacgaatctatgagaatatttctttactaataagattatagtaaaaacataaaataaaagtgataattactgacctggtgaaaaccgagttctttagtgagtggaacaccgagttcagccatgcaagcttgcatccgatcatcggaaccgtacaacgccggataccttttaatacaccgatcttgcattttgctcaaagccaccgctaatggataacttatagcaaatcctccaccgccataagccattccataagagaaataaatgttctgaagatgactctccgataaactgccgatgtaatacatttgattatgatcgtattttctcaaaactctgattagattctcggcgacaaagactgtatcatcgtctcccataacgaaccatctcacatctttgagtcctaatttaagtgtctccgtaacgattcttgaaattctaatcgccgatctgtgtccttgtttgtttttatacggaaacttcgatgtatcgccggagattttcaccggcgggaggctaatttcgtcttcttcgtcttcttcagtaactggtttttctaaccagacataactacgcatttggtttggtttgtaccaaatcttgatgtactcttttctctgtttccatagtcttgccgacgcggcgataccgaaaaccacgtgttggaaaccggtttgcggtggcggaggtggtggtggtggtgaaggtggtggagaggcgtatgatttgattacagccgtttgatttgtgtggaagagaatcaacggttgagatgagttgacaatgtcgttgagacgacgaacaacggcggagaatggctccacttgacaagcacgtgagtttgagataagctttagtgtgtagacaacgtaagtggcggagacgaggaggaggagcgttaccataagtttggatacgggtcgggtcggtgaaccggatccggataaagtccgttcccacattagcttctctgctggatctttctggttattcagcttcatcttaagaaccaaagatgaagaaaaggaaacgaaatcaaaatctaagaaatataaataattggtaataaatatttcgatggaaacaaattttatgggtttaagaagaaagtgagattgagaagaagaacatgcagtggctctgttctgattttctaaaagagaagacaaaagtgtcttgtgaaagagactcattttacttagtttatatattaatatattaaaatgtcatagtcaaaaagaaaattatacttttagttagcaaaaaatctaatctattttgtttcgatatgataaaggttagattctaattgttactcttagattgatcttggaattatctgtatgagtagagtaattaacaaaaaacgttatacgatatttgtcatatttagctctgataaacaattgatatatcctcgcgtttgattttttttttttgttgtcatttactgtattttacactcaaaccgacaaacaaaatatacagtcaatcaaattttgcttaaggagatttaagaattaattaggtgggaaacaagaaatacaattataactactagtattttttcgttttactatgataagtatttttgcatggacacgtgtatggattgtagtggaaaatatgtgtcggtagtagcagaactttggaggtggtgggggagctaggactattttatttattataggggttggtttagaaataaaactataatttttggggcaatttatgaaaatgataaattatgggggggcatgggtggtgttgttgacaacttgttgttgcagactacgagacaattttattacatccatgctgctactcttcaggagcttctgagttcatcagagagtttaaaatttctagctcttttcttttttgcctatttctatctacttttgtggaaatcacattcaaaaaaaatcaatgggttctgttactaattgaaggcccaaaacattattgattgttaagcatttttcttttctttaattacagtgcatgtaccgacgtttttagtcaaattatttgtgatacttcagtgatttagatatgagatgtttcgttattgttataatgttattatccttttattaaaaagaatattgaaatctgcccttcaataatgtttggggcatgacatgtccgatataaagagacttcaattttttttgccgacaatgacacacgacgtcaggagcttcgacgttgcggcaaagagtaaactttgaccaccagattagggtaaaaatagaaagcagtttttttttaacctttcattctttgattagagatgttcgagtttaattactttgcatggtctaaaaattggccttttgaagttgtgatcttggcctgagactgatcttgaactttgcttttgattgaatgatctaactatggataacttcaaaattaaaataaataagtctacaaaatttaaccatgtgatgcaatcaaaagaaccggaaagttttggaggagatatgcttagttatcttgatacgttaatcgtattactatagtaagggatatgctaagatttcttgctacataaagtaactaagaacattaaaaggttacaacaagaagtaaagaactttacaagaaacaactttaacaaatcatatatgaagcatagttcgcaaactcctccaatgatcttcacattctctttaccataattaaaattctccaccaaaaataacaaaattatttatttgtcgcttgctgaagcgattcatattacaaca

SEQ ID NO: 875 - DNA, 3000 bp, Unknown
  misc_feature (1)..( 3000): cDNA_ID_3059358_gDNA_ID_1620331_Annot_ID_153649 3000 nt of promoter + ATG
ccttagggctaaggtgtgattttaagtattataactcatcacattttgcgtctctcctagagttcctcttggttgttggatccaacacgttttatttctccgtgatcaaaaacagggtaaacttgaagatagaatggctggtggaaaagaagagtacaatgcattcttctactcgcttgtttctaccgatacacaggtaaatcactttattgttgaagtagccataaaaactgaaattcatcagaccaaatcagaaccaaaatataattcagttctagtccgcactcgtttccaaaacacagaaaaaattttgctttccagaacccgtgacttgaattcctgaaccgataaaaatcgaatgactgattgaatggagaatgactgatgtaaggatcgtgaatgttgaaatgcaggaaatgtattattcaacgaaaagacagcagtttttgatcgaccaaggttatagcttcaaggtaataacaagcctcccacctccggacgcgggttcaagcttgggctaccacagtcaagaagaacagttgtctcttctcggaaaggtgttgaatgctggagacgatatggttggtttagaacaacttgaagaagacacagatggaaaggctctaaagacgcgacgaagcatgggatcgatgagtgcaatgtccggtgcaaatggaagggtctacatggaatacaactcaggtcgtcaaaaatctggtaaccaatccaagaaacctaaagacccaaccaaacgacacaatatcttcaaaaaacgttatgtttgagacaagagaactcatattcggctatatgttttgagttgtaactttggtgcaaatttgtttcaggcacaaaatcaagaaaacctaaacgaagacaccctaccttaaaagaccgttaacatttgatatttgttttattatgtgaattgattaattgatattagaaagttctttccttttttttgatatttgttttctagcatatcatgatatcgcctcgagaatacctttgaaaattattttgttattgtcaactgtcatgatatctcgctgaaccaacatataaaacacgattataatttggttgacagatcctgaacaacagtaaaacgtacttagttttcgaggttaaaaaataattacttgtcatgatttcgaattaaaaataataatgggctcaatttgagattaaagaaagcccacgctaaaagaggcctactaaatgcccatattggatccgttattgtagcctttctatatatgaatcgagtttgcatttctgctataacgttctctgcattcacatgatcacatcaactcagtaacggactcgacatacccggacctggacccgacaccgaatccgaatcataatgcgacggagacgcagctcgcttctcggtctagcttacaacggaaaatatttacggtaccgtttgttttccctctgtcgtagaatttctgtcttcgacaccggattgatataatcgattgaaaagacaagagataatgtctaaaattgattcgatgaagagaaaaagatcaatatggggaacgataaaagtctcgatcttactgattttggttaattttcatattaccctgcaaaaaaaagtattgtcaattctggggaattttgttgttcaggtgaaagatgaagaagacccgactctgtgtgttttttcttttaagtgtcgtactgatgaagaagatctgggtcaattagtcatccgttatggcccagttgttaagatgttatccaaatcgtaagaagaaggcccgacatgtttttgagacgttggtaagaagaaggtcttgcttcttttgtgcatccagataatgtctatatgaccaaggtaagagcatcctcattgcacatcctccaatgaatgtctttcatattaaataatattaaatttaaagaccctctctcttttgacaggtaaaatgtctactattaagacacatccatttattattttccacttttttaagtagtttaaaagtttaaagacacccataaaagatatgcaatgaggatgctctaagggaccgagattatatactgctgcagatggggtaatgtaatgctatttgtcttgtgcaggagcgttggatgtacattggtctcctcttggttcatactttgtgtcacttgagaaggagaagaacgtggcaactctttgggcattgaatcgtctcccattctcagaccatgtacattgcacaatttttatgagtatcataagcccaaaaatattaaattaatgaataaaataactgatttgggtttaagtagtatcactggagtgatttctttgataccagtctctgataacgtggcgggttatgattagttgggaaaacatgtttttgtgtgaaaagagagaaattttttttttcgattagtcgggaaaacgcatcttttcgattttgcaattttttttttttaatgatactaatacgatttcaccggtggaaacagatttattatcaatattataaaaagtttcaaacaataaataaacattaaaattaatagtaaaatattattaatggtactctatgagtaccaactatgtgcatgctctcatgcgctttccttcctcatcctatggtttgtctttcatctcccattttgcatatgtaagaataatcttagaggctaaaagaaaaaagaatgggctcaacgtgagaataagaaagcccacattaaaagaggtctattaaagcccatatttgatccgttatttatttgtagccttttgaatcttctactttacatttcccttccttgacattaatgattaaaccagtgatacccgaacccgacaccgaatccgattcaaaatccgccggggacgcagctactccctccgccaaatagctttcaacggtaaattttcacggcgccggttgtcttccttctttgttcttctcaggaatcgctaattgataacttcaattggaagatacaagacaaaaaaagaagatcaat

SEQ ID NO: 876 - DNA, 3000 bp, Unknown
  misc_feature (1)..( 3000): cDNA_ID_2127224_gDNA_ID_1620332_Annot_ID_153667 3000 nt of promoter + ATG
attaaaattattaattataaaaatacataaatttattacccaaagttcccaacaatattttcccaacaaaaattttcgacaatagtttcccgccaaactattttgcaggaaatataaattccgtaaaaaatttcccgccaaaaacaaattacacccatattttcccgccaaacaaaaggaaagtcaggaagaatattaaaaattaaggaaagattctacgcaattcagtaagggttcacgaaattcagattttttttttttgtaacccttcctgaattttatagaatatttcttgaatttggtgaaatctttcaaataatcatttctgaaatttataaagaattttacaaaattcagtaaggatttcaatacagattttttgcgaaatctgtcctgaatttcgtagttaccttcttgaacttttttggtgggaaaaatttgacggatattttttggctggaatagttttacggatatttttggcgggaaatttgtttgcagaaaattttttggcgggaaaatttgacgaaattgttttgcgggaaaagtttgacaaaaaaaattggcggaaaataatttcttttatttacttttttaattaaattacttatttatttttgacatataattaaattttgtagtgatatttttgaaatatttcaaaagagatgatatttttggaagaaaaatttattagtgttatttttgtcaatcctcctagaatatatatactattttatatagatgtagttttcctaattctgaaaaatttaaaatttcttataaattaaaacggatggagtaattaaactatcatttgttgagattaattttaaatttttattactccatccagtttttcttctcctttttactttaacttagtatatattctaattgaggcagtaaaagtaataaacctaatttgttgagccaaaacagcttagataacttctaagctgtaattgaataatataatgaattttgtatttgggttagttattagtaaaatataaaaagcataacagtaaaaaaacaaggatatgatcaaaattcaaatgcttatggaaactgattcacacgtaaaaatatataaatgtatgaaaactagatgtatttaaaatagaaattaattgtttgatctaaaaataagaaattgattgatatatcttttaacatgtgttacgtagtttttaacaaaaacatatgtgttacgtaatcttaaaattctcttaactgcaaagattgattatagtcatttgatatgttataatgttaactatattttttttgtatgaatgtaaacctatattcaacacaaaaacgtttttctcattaaatgtaacatagagagtagaaattttgaataattgcaaagcagcttagaagttatcggtacgacgggagtgaaaccaaaaccgcagtccgtcgtcaagtttagagttgcttagttgttgaatggtgctgaatctgttccaaacattatttttctaatgatttttgtgacttttggagccgggatttgcaggctcaccgtggcgtctagcgttctctccacatgatatggatcaatgcttgaaagacatacctgagagtgaagacatagaggttggcttggaagaatcgagtagaagggaagtgattgatctccagctctcgaagtgttgactacatttatatcgtgcaacatggttactttgcaacggcactgcatcagggtccaatttctgcccccaaatacttttgttgaagtactgctaaggatttgtttcaccatcaacagacaaaaatatctgcattattatgaagctcgcttagcaaaattctctcgattcctctctcacgatcacaaaacaacaatcacgaacgcatactcaattgtacatctcttgaaatgttgtcacttctctattcgattggtttgtaactccattttcctcgtttgtgaaagcaaaaacaatatttatttacaaatgtatgcatatcgaataaataaaagtataatattaaatcatactaaactgaagaaataccatttgtgttaacgttttcatgctgagtttcaatggtttttgataatgtgatgagagtttagaactggaagaagttatacttactctcataagaataatgattaggattacataggtttatatagtaaagagatttcataaactagatgaatacaaatatgtaaaatatcttatatcataactatacaatatttgattatatattgagaatcttctagatacttccatacccttctatagttttaactcaaaaatcaattggcaattggatttaaagaatataatgtgggattccattacacttacgatggatttgctcaaaaaaagaaaaaagaaagaaagattccattacatttaggatgtgagattcgtaacacgattcaaaataatagctaagaccttttatcttaccgaattcccttttaaaactgcaatataccctacttggatcaccctaaactaaagtctaaactatcattttatggttataaacttaattaaaaccaactgacaatgaattgaaaaaataatgtgagattccaaacattatttaatttttggttgtaaaatcccaaaaggtatatttaccgcctttaaaaaaaactaatgaaagcaatttaaattgtttctgtgtattctcatcatttcccgtcacttttgtaacaattccaacgttagaacgatcattcactcgcgtaaattgtttttattttattttaaagcgttttaaaccataacataaaaaagtttaaggatattataattttttatcaaaaattaatgatattaggttatcaagtggtcgagtaaatcatctggttatataaaattggagaaaaagattttctacctatataaatatagatatcatctgtacatgcactccacctcattgcaaaacaatttccccactatctatcctccataatatagtattcttcttttctctcctactttctctatagta

SEQ ID NO: 877 - DNA, 3000 bp, Unknown
  misc_feature (1)..( 3000): cDNA_ID_2127272_gDNA_ID_1620332_Annot_ID_153677 3000 nt of promoter + ATG
agttgttggcagtaaaagtaagatttttttttccaacttttcctggtaaaaaacgcaagacaataatttggcacaagcggcttgacgtcactatccttatattactgtaacaacacttactaatacgaaacttaaatcgtgcatgttagataatatagtaattagtacacatattatccatacaaccactacaggtttccaacaatccgtcattaaaaaaagttaaacatacaacaagactcgatatcaattggtacatggatacttaagtttatgctttatagataggttcaagtaattgtctaacacttatagtatggtttatcatggaaagatgaatgtattcaattatacaactattcattaatagtctcgattcagtacgaaatattctcaaataaagattggtgtgacgggccattaagaggaatacaacattcgacaggctttgtctttgtatatcaaagaataaaatcatactgttataataatacaaaggaatgtataataatgttacaaataaatacgtaagttatatagttaggatcaattgacgtcataaatagtaagatatgaaataggtctgttctgattctcttattagttgtcgggtgcagagtaaacagaaacctgcgaactgacacgtcactccggtgatggtcctgctagtaccttccccttcttcgactctccctcactcctcttacctttttttttggggtcaaaagtcatcctaccttttacagtatatactttaattaatgatgtcataattcatcagtttatgtacatttttagtaagaaactaaaatattaatgaaccatttgtcttttgctttgtaaggaactatatatttaatgaacaaatcagttatttagtacgaacagattaaaatttgagactgggaaaactagagtctattaaataatttcatcagtttatgttttttctactaatgacaaagacaaaacatacaaaccaagtcagttttccggttatcaattaaccgaagtatttcttctaactggttaccgaaaagaaattcaatttggtttggttttggttccttctttattttctaaaatcggttcgtaatcatttgcgaaacccgatcaaattttggtaaaaaacggtctaataatggtataatccgttctttaagaaacaaataactatctgagaaaccaatgtcgaaccgaaccgaaattcgcaggttactgaaggcaaattgaaagtacgccaatcggttcagcctagagaaccaaaacctagccgaaaaccaaaaatctatgtttggctcagtacagtattctcggttcgcgtcagaatcacagggcaaatgttaacaacactaaacaatgattgcattgtgtttatggaaaaacaattacaccaatcaccaaatttatccaatctacaaacattaagattcctgtaagtcatcgaatcagatgctttgtgtagacctgacccaccatgcttagtcaagacacaagtaaacacaaaacaaggaatgcttactaattacatctgaatcacaagtgtttttagatcgtgaaacactaactaacatatatcatactaagagcatataaacagagaacatacgcatttgcaacttacaagggaatgttaaaaggatgttgttttttcttgcctaacacttacccttacggtttcagttagctttgcggacttctctggtcagtttctggatgttcaggttgaggaaccgaaacacctccattcattcttgcacgtgcttctgcaaacatacgttgttgctcagctgctgcttcctcctcagtcatttgagctccagggttccatttcacgctcctctgtgtgtcctgctatagagtcacaaatgtaggaaacggttaacattaatcgttttttcgtctcctcgttatcaagagtaggagaagaaagtagagaatcattaccattgtttcatacttatgttgctcatacgcagcatagacttcttcaatgtattctccaaaaccaagaacctgtaatgccttgagaacatgctcaggagcaatcgtccgtttatcctctttgttacaaacatcattagattctgaagatacaagatttataaactctgcaaaaaatgttttaaaccacagtaagaaaaccaagaactctcacatatatagatgaactcagagagaaactatatgatcttacctacacaacattcaatgagaagatcttgagcatctcttgcaacacgaacatctggtggtaacatctcctttataattttagtcatcgtagctaaaacaatagagaacaacaaaacatattcttagcaagataataaaaaaatgaagtttatgatgctcatgaatcctataaccttcaagcagagttatatatagctaggtttacaaatcctcctatttaatgatcaatgagcaataacactaaccttttggaagagaagcgtcttccttggatttgccgactatatccattggatccatagtttaatctacagaattcatcaggttaaaggtgcttgtacacgaagatctgcataaagagcaaatcaaggggagatcggaaaaaaacgagaagatagagataatcgactcaccgtaactgagtcaacacgaaccaaatcggaaagtagacgagtcgcggtgagatctggcgccgggaaatcgatcggattgtacggaatataatcggagggattttctctctccttcgtcttctctagcagagtcgtttagggcaaacggaagaagcaaagcgcgtgaatcacactttcttttacaacgcttagagacggcgcgtgaagataactttaacttccttatagcaattggattttaaaacaaaactaatgggccgaaaagagacccgaaccaggcccagatatctcctccataattctctgattctgcttcttcttcttctctctgggactcgttcagaatctcgaattgctgctgctcctctcggtctcggtggtgaagacaatg

SEQ ID NO: 878 - DNA, 3000 bp, Unknown
  misc_feature (1)..( 3000): cDNA_ID_2127299_gDNA_ID_1620332_Annot_ID_153684 3000 nt of promoter + ATG
tactacaaagaacattaacacttcaagaagaactcaaagactctaaagtcgcattcttacttgagcaggttcgatatacaattaaatcctccttacttaaaacacaaccatgatcataatgttgattagcaaaacatgtatgtctggttttcttgcaggagagagcagaggcttccatgaaggaagcagagacggcgaaatcacaatggctgtgtcagatatgtcagacgaaggaggtggaagttactattgtaccatgcggacatgtcttgtgtcggcattgttcaacatcagtctctagatgtcccttttgtcgtcttcaagtcaatagaaccatccgaatcttccgaccgtaactaacaccaaaagtcaaatattaattacccaattcatcaaaggttttgtcctctatacattacaacagtttctgctaattcatttgtaaatacgtttaggtgttttcacttttgtatatttaagtaaagaaattttttattttaagccgctatcaatctatcatcattttaagcattgagtagactgggtattcaccctatcaaatatcaatatctcaaatcaaatttgaaatgagccaaactaggcaaaatcttcagagaccatcacaatatcagctaacgagtacaaaccaaaaaagctttggcttatcaagttttttctgacacttttctttttctagatgacatcaattgtttcttgttgtttatctacttcttctttgaatttttcttcttaacaaccaacatttgagcttccactgtttcttctgcatcgttcattaggttattatcatcaacattcaattcattttggaaatgattcaaaaagttgtatgtctccgaaatataggtatcgctaaggattctttcttcacctagggacaagactctcaccctagacaaaccaggggagtctaaagcttggtggatttgaagctccagacaccatccatagctatttttggtttgtctacatcaatgcttgtaggaataatttttttttccggagaagctgatcaccgttgtgatagagagacttgccaatcatatgtaagcatatggtctcatcaatatcataaattaataaatttataaatttatcagaatatattatgtatatgtaagaaaagttagtgaaatatgattctagtattgtttgtttttcttaaataatattaagttttgatcaaatattcatttttaatatgtttactgtataaaaaaaagttgtgctttttttaaaaaaagagaatatgttcttttacttgtatttgtatctaaaaagatgttggttatgacaaataaaacttcttttcatataggaaagttaaaaaaaattacaaattaaccaaatctctctataaattaataattcaacaaattaatatctctataaattaataaaatttcacgttcccgacattattaatttatagaagttttactgtattcctttgtgaatttccttttcataatttaaaactaagttggcaaccttttcatatcataaataagtaaattatttcaaactatttttctggatttttaatctgttcattggagtcatatcaagtcttgcttcgtatgatttgttcttcctactcataagagctttgtagacatacttagatttactagactatgaattgtgcaaattttgtaatgattaattttaatcatcttattactttctcgattcaagatgaattacggacaaagatgaatgtctgaacctttagcgttcaatcttttatttcttatcttttcttagtgatgcatataatgctaaaagaaaaagatgttagcaaaggagagacttttggattatgtatgataatggaaaaaatgtcacatggattcatcacagtgaaaatgatgaagatgaaagtatgactcaaaaggattgagtagttaaaaatttgagaatgaccagggagaaaggaagaaaatcaaggaggaaaatattttagtaaatttagatgattacatttgagtttttttttttttgtcacaagtgtgttttattgatattatagagccaaaagtaacaggccaataattcacaaagactaaaataaacaagcccaaagaaaaaaaaaaaaaacagcccaaaagcccaaatgaataaaccctaaactgaaggaagagaacaaatgattgttgtgcgccgcatagaaaacacgtgtcagtgggaaacattttgaaggacacataggaactggaagagaagggagtcgccgtcagaagcttcaattccggccgaaacaccggaaaacttgtttaattggcatagctcactcgtcgctcaaaagattaatggcgaaatttcagttgtagcttggacgagaatttgactccacgaagtgcaaatcttcttcttcttctttttctttttcttcctcttcttcttcaatcaacatctttttaactcttagggttcatcaatctttgaactacaagcagaagataaaaaaaaaacaaatcaaatctaaatccggtcaaaaaaccggagaaaaaaccggctaaagacgccggagaaaagcccgacgaaacaagaaagagggtatcttgctctcgggagataagccagccaccaccgctaaaagtagccggtcgatgccggaagctgagccagccaacgcttctaaggaagccagcgatgccggagtagaagccgaccaaacactgctgataaagccagtcattgctggccaaaaaagctgaaactctctgaaagatgaggagagagaagagagagaaaaccctatcaacgtgaaaataattacatttgagtttatatactcaaaacttggaagtaaaggtaaattaaaatatgattgttagaaacaattacaccaataataaaacgacacgtgtacactacgtagacgttagataaccacagcaaaaggatatgtattctcgaggcgggagagagaaagagaagagagtgagagagatcgaagaacatttacacacatca

SEQ ID NO: 879 - DNA, 3000 bp, Unknown
  misc_feature (1)..( 3000): cDNA_ID_4359744_gDNA_ID_1620332_Annot_ID_153686 3000 nt of promoter + ATG
tttttatttactatttaaaaattgtcaattactacatataaataaatttggtatgcggtgggttgttgtccgtggaacggtgactgaaccgaacaatgcggtgcggttcaaatagtaacgaatgtttttgcatatatatgtttttgttattatttgaactgcactgcactttatccgcagttgaacctaattgaacctaatgaaacttaaactggtttagtttgctaatattatttttattttatttttgaataacttttttttcttttcttttttgtcatctgatcatttttcttttttgctttcgttatggataagctgtaacgcggtttttgttttgaacattaataataattaattctattcttcgaaaaaagaaaaatatataatagtgtgtcgttttccggtggcgacgagagggagaaccggagaagagatctctcgttcgtttttttcccggtaaatccggcgagaaaaagttcacattgaatctacgagaaaatttccttccatttcactccacgagttttcacctctcttgttcaatctctcaacgtctctccctcgtttctcgttttcgctttttccccttttcctcttctattttaccggaatccgagaatttttgatcagatctagtttcagaaataggttagttccaacaatgttgacggaacgaggaaggcgaatttctggtttcaatgggagtttcgaatttagcaatagaaaattccgtggttatggattcgtagatcgatctcaaggtttccatgaaaggagtccttcaagatcatgttctgtttcgaaaatccttcgtatcacgccaccaacctcgtctccaccgtcttcggcttctacatgcgctggttatatcgaacaccgggtctccaagttcgatactctcgccggcattgccattaagtatggcgttgaggtatgtattataatatatgagtgtatatgctttggatgctggattagttttttttccttgtgttcttagaaagtgctatttcaggttgcagatatcacgaagctgaatgggcttgtaactgatcttcagatgtttgctcttgagtctctccgaataccattacctggaagacatcctccttccccatgcttatctaatggctctctaaatcatgggtacttttaagcctctttatcctctcttcttagatgacaaggctgtagtctgttactttgatttttatcttcagtgatggatttattcatatgttacttgagttgtgctactgtgcatttcccaagttcattcaaagaaacatagaccaggttatagaaagaagtttacataagatggaaaatgcttagtgagagttgtttatgctggaaaatgcttaagggagacatgatagaaaaccaagtgggtacaacaggtccttgtaaaagagcagttttgacgtttcaaattctggtttcctgcacagccaaaactcgaaagtttctatgcgcaatagtttgtgcctaatgggctatgaaccttaagtttcttggttagtgcatacaacctacgtcctagaatttttttcacattgatataagaatgaggacgtaggtaaggggacgagtaaagatgtcgagaattgagacagttaagtagagccttgaatgatcatgatggtagtatactgatttgcattaaagggcatccacatatcaaagtgatcctatccccatgactgacatatgaaatctttttgcagagaggattggtccgagcaagcttcatcctcagctagcaatggcaaccaccaggacgtatttgactccttccagtctttgaggttgaaccattcagaaaagaagatttctccagccatgaactccttgcaaggttattatggactgaaaccaaaaaacagaagagcttctgaaggttttgggatggcagtctacaagaacgaagcttctcaactccaagacaatgatcagtatctcactcccttccccgccaccagtactcccttatcccaccacagaaaatcaagaagcttggtagatgcagttatcgccgaggttaaccaatcacccaacccttcaaaagcaggaggaggagaagtgaactctactgataagccaatgagaagacgccaaaaatctgaagccgattttagttcacgagctccagaattgctgttgaaggaagagaacagaagcagcagtggcgcgttttctgcaatagctggaaaaaatttagcactgagatccaaagcatcaagcagagctaacttatcagcagaaaccagacatctcaattccataccaatcaatttgatggatgctcctgtgggagacagcttctcaagcgtgaggaaatctgttagcgcatctagtctacaagaaccaaactgtaacagcaacggttcatcgctatggccaacctcaaagtggaccctgaaacctgagttactcacacaagtagccatggctagttctatttttgacggattgcctaagccattaactggtcggagaaacaaaaaggctgtggactaaggttagttaggtacttaggttccgtcggtctcgttatcgactgtccacttttggtttttgtaatccaaaagcaagaagtcaatggcttttataatagattgaggagtaaatagaaagtaaaaagtgtattgctgcatttcattcattcaaaacaataaggcaaaataggttgtgacattgagagtcaaaattaggcattaaggttttgttgaatttaatttgtacgttagatgaataatcgaatatcagaatactgtattcaaagtttcaaagtatttattggttaagtagtttgcaaaataatcaaaaaatacaaaaaacaaaattttgttgtctaactaattttccactccaataaacaattaaaaaaagaataaaaaagagagtaactctttaataaatctgaaatccctaagctcaagacgagttttcatttctcgagcaatttcactcttccgagaacaaccctagattccg

SEQ ID NO: 880 - DNA, 3000 bp, Unknown
  misc_feature (1)..( 3000): cDNA_ID_3059382_gDNA_ID_1620332_Annot_ID_153682 3000 nt of promoter + ATG
caattacactttgaaagggcattaatgtcatttgatggacagaatcagttggacgtacaatgtttttactggtgagctcgtatgtcttttccctagttttaaggctttaccttttctagctatcaaataccaaactctatttttagtatttaaatcccggggagcctctgctttatttacattttcattaagttttaatggaaaaactgtaacaacaattcataactcggctctacttgtcgggttatgaagtcttagttacttgatgtcgagaaatcatctctcattgtgatgggaggaagcagttgttactattggttggctatgcgcagctttggtaaatcgcattcacagtttcttcaaaaaaaaaggtcttctttggtgcttgggtcaagtgttttcttcggattttagtttgtatgtttctatgcttaggttttggtttcgatctctttcgatttcggcttttaaatttctgtttatgtttctctttcatacgattttagacttcgggaaattcacgtttttctccagctttagtttccgaaaacttttctctcgtccgtcggctttagtttccgaagatttttctttcgtccgtcagcttaacttccgttatttgggatttgtatttcaccttagtttcaaaacaagtttcataaataaaatatttcagatgataaaaaaacaattcataattcggaaataaaaagttacaaacaatgtttaaaatagtacttaactgtttccatattttaaacattgtttttcccccacaaaaagcaggttcttgtacattcacaaagcacacacagatccgattaagatttagactgcacaatactcaaggaacgtgtcttcttcttctttttctttaaagaacatgtttactaaacaagaaagtgaaatttcttcatgagaatttgcaaaagagacaaaagctgatgcctacaacaactaagattataataacaaaattatgaactgaaaaaagagacatgttcagtcttttattgctttatatctttctgcagttaataaacgaatttgactacaatgagaagctttttctttcctattttttttattgtgatcttgtaagaaaaaatagtgtttaacactgttatttactattatagtttgaattatgttcttgatcaccaataacaagtaaagttggagatgtggtgcagtgataatgaaaatatactaaactaacaaaattaatttaaaaggctcaatggtttaagcatttaagtgtaaccccaatgtaaactcatttttctgcaattgggccaattaaatatagacaaccacaaataaatatcaatgacatcatcactgtatatcctaatgcttctcaaagaggcatataatactgtaatctccaatttttttgtttgtcaatttcttttaatcccaccctaccattgacggctgtggaggaaaaaagagagacaactaatgaagtaatgagtaattatacttttgctttagttaaagagccggctttagccgttttttactttcttttgtttagtttttgttttctactttattcttcttaagtagaaagtttacccaaaaaaaaaacccatcttaagtggaaagtaatagagcataaataaaaaataaataaaagagggttacaaaatatgcatatttattaaaggatcacatgtattctaaaatctgatatacgttagccatacgacagaacctcgtatagccttcaaatgtattaaaatgtaaatgcttcgtcgaattatgcgatatcacagattatatcttgtgcactaaaagtatggactatttcaaagaaatattcaataaccaaatgtacttcaaataatcattattagatgtaaaacccattacatggataatgtggatttcttctagatcgctctccttgtagaaagaataattgacatagtataatagcaaattgattatggaatagttaaggatgttcaaaagggttttaacttttaaggccaactcgacctgattctaaattagctcagttctgaattaactctaacctgtttttggtccgctaaattttgcataaataatatggttaagcctttttgtaacatggttttagtctgccagtttttttatttaattcttttttacaatatttttgtatgtataaataaatagctcagattttcttctcttaactaacatttaaaagttattatgcattcatagatcaggtatttgtttcatattttagaccctaatgcctaaaccccatgtagcgagctacaagagcaacttaatgtctgtacaattaaattaattatcgtttatagggtttttagaaaggcggttaaaaaaattatttatatataaatctaataaatgcttatattgttcaccaaaaagtaaataaattttaataagttcaaatttaaaaatttatttttaaaaaataacaaaaatatgttaaattttattgtaattataagttttactctaaatgaaatgattaatatgatatatgtctaactttatctctaattaattaatttttaatatgtgatttaacattatcaaaatatatttatatttacattagctcggtaaattttctgtgttttggattaactacaactttagtatagtgtaattagaagtggacaaatatgtataaattttaataaatacatcatctgaacttatctctttattttcaatattcttaataggccttgaattagaggcccaagtaaaaatgtcgaatattgtttttttttcacatttgtaacaatcggctttaataaaagttttaattctgccatttcctttcaaagtaaaaactaaaaagcttcccttgaggcaccacttcttctagagtcgatcttcttcaaccttgactcgtgagtcggtgcgacccagattcttcatgatcgtaatctcatcttctttatatattcatgggggtttgatcatctttctgcagcaacagagataacgtttaattcgaag

SEQ ID NO: 881 - DNA, 3000 bp, Unknown
  misc_feature (1)..( 3000): cDNA_ID_3059396_gDNA_ID_1620332_Annot_ID_153673 3000 nt of promoter + ATG
tggcaacgaagtcttcactatctgcaaaactcactcttccttcttcttctactaagaagacactgagtctgagacaagtctctgtttcacttccaacatcaacttcaatctctctgttatctctctttgcatctcctcctcatgaagctaaagctgctgtttccattcccaaggaccaaatcgtctcctctctcactgaagtatatataataatctcactttacttcttgaaatgaccaaaatgtctcctttttgttgatgagtgttcttgtgtcttaacaggtggagaaaacaatcaaccaagttcaagaaactggttctagtgtatttgatgcaacgcagcgtgtgttccaagtagtaggagatgctcttaaaccagctttggacactgctttacccattgcaaagcaagctggtgaagaagctatgaagcttgcttctcctgctttctctgaagcttcaaagaaagctcaagaagcaatgcagagctctggttttgattctgagcctgtctttaatgctgcaaaggtcagatttcttacattcaaatatgtatgagaacataacaatttaggttttggggtttagggtttgaagtggtttgtctgtgttttggttgggatgtagacagtaacagatgtagcacaacagacgtcaaaagcgatagaagatgctaaaccgattgcttcatcgaccatggatacgatttcttcagctgaccctagtgtcattgttgttgctgctggtgctgcgtttcttgcttaccttcttctccctcctgttttctctgccatctcttttaacttccgtggttacaaaggtacctcaagactccatatagatcatcttgagaacatatataagtttttgatttggttattagtgatctattttgtatctagagtctaattcaccatagcaaaatgctgacaattactctgtgtttctggtttgtgtttttttaataaaggtgatcttacgccggctcaaacgcttgaccttctttgcaccaagaactacttgatggtggatataagatcagagaaagacaaggagaaagccgggattccacggctcccttcgaatgctaagaaccgcgtgatctccattccgtatgtgtctatctaactttgataattcttttcattattattatactcaaaacattgaacctgttcttgtgattatcagattagaagaactaccaaacaaagtaaaaggaatcgtgaggaactctaaacgagttgaagcagagatagcagcattaaagatttcttacctcaagaaaatcaacaaaggctccaatatcatcatcttggactcgtgagttttgattattactcttttacaagaccttttttgtgaatcttgcttaatctttattggtctttttggctcgtaggtacacggattcggctaagatagtggcgaaaacgttaaaggttctcgggtacaagaattgctatattgtgacagatggattctctggtggcagaggatggttgcagagccgtttaggcactgattcttacaacttctcgtttgcacaagtcttgtctccatcgcggattatcccggcagcttcgagaagctttggcactaggtccggaaccaagttccttcctagctccgactgaaaacagaggatatatatagttttacaagtgttgtttagtattcctttatttctcaactttgagagatcttttgataagataagattttcgaattacttacttacttgtcttttacattgatgatcatatatggaaaagattacatcaaactgaagtagtagctaatcatctaaaagaaaaaatgtatgatcaaaaaccgggatgagtttggcctatagtggtaggaaaaaattgggataaagactaaattcataatgagttatggacaactaattgtaatatcacatagatgcacaatcattttggaccatctggtaggtgtgtgtgtgtggcctagccttatcacttagtgggattgccaatagctttttgccgaaaatccattttacaaatggttgaagataataaaaattagacaagtttttttttttgtggagtttagtttagtgctttcaatcatgtgaaaaccaagatataaattttgaaaactattataaatattgtgcaatagttgaagtatatacaaactatttttaatcaaaatgttgtctaattaatattaattgtaacaccggtcactccgaattgtaacaaaattgtctattttgctaacggattctacaccaaattaaataaaatttatatagactaacatatattgctctactgatccatacaatctaaattgatagtgtatatagactgaaatcaataaataaaagacataaaccaaataagatgatgatcaaaagtcgaaaagagaaagcaaaaaaaaaaggtgtaagagatcagtaccactacataatgtatatagactgagaccaatttcaagatacataaaatcatataaagtaaccaaatgtaaagtgttatcttcttttcctcaatatatcaatcaatcaacattttttttctttcactttcattatgattcctaacatataaataactaaacttagtttgtcccaaaaaaaaaaatacccaactaaacttaaggtaaaaaattggtcatagtaacatatcgacaatgtatataatatggagcctagattctgaaatgattcatagattaagaatacaagttcatatctcatacaatgtatatagactgatatcaataaaaagattcatatcataatataacatgaagataaaaaaaaagtaactcctatcaccaagaagaagaagataatccaatcagacgtgtaaagagcgaaaaaaagctatcaaatatcagaatcagattgacacgtggcgatcacgagctctctttatattacgtggacaattttgccactcttctctctgccactctcatcattttttgaatcattcatgatttcttagctctctcaaaaaaatg

SEQ ID NO: 882 - DNA, 3000 bp, Unknown
  misc_feature (1)..( 3000): cDNA_ID_3059391_gDNA_ID_1620332_Annot_ID_153675 3000 nt of promoter + ATG
taacattaattctaacttccatataatagaatgatttttagaaggaaaaagatatatatgatttattgttatttatttgacaaaaagtcttgtttttttttttgtttttttttgtttttagcttatggttaaagagttaggttttggtaaagtctattgtttatcttttgtaatgcgtaggtaaattttggtgatatttgataaattttaacaaaaaaagtgaaaattatagagttgataaattttggtgatatttgataaattttaacaaaaagaagtgaaaattatataaaaatgaaaagaagtagaaaagaagagaaaaactagagtgagaatcattagactgtcaatcatagagttggattttttattgaccaaaaagtacaaaagacgaggatgagagaaaattatgtaatgtacggtaaaacggtgagtcatcagattcctctttttcaaatttcattgattccaattgaaaaatctcctctccttccacttatttctcacatgcattctctctatatatatgagcagctcctagttttataactctgcatctatccacctctctctgtaaatttatctaaatgtttcttttaatctttttgagattaataatgatttgtgtttgttcatcaaccgattttctcagatctgtcaattatttttgtttatttatttatgatttatgaatgaggaaagagtgaagtcgctggaggcagcggttcatcgatcaattcctgtgaatatttatttttgtttacaaaagcaagaatcgatcgataaacctctgcatccagcgctgcttgctcttcatgacttttgtttaattgatatctatttgagtattgctgagaagcaggacaatggattcgataaagtcttctcagctgctgaaactaaatatttaaaatttatcccaaatctaattcaaagtattcatcttttagctgttgagatagtgagggaaaacaaaattcttgtatatgaaaaaaggataaaatgaaattgtttgtttgttattgttttgggtaacagatcaattatcatatgtgtttttgtttgtagtcatgtcttcataattgactcatattcttaaatcttacaacttcagttttgtcttaactttttttttttattgatctgttttttaacaatggtcctgaattctgatgatgcagttttacttttggtttacatgtatgtatcaaggtttgtgttccatatggtctttcttcatctagcatttttgtttttgtttgttgagccactgaatccaacttgtacttcttcagctttgcagattagtagatcggtttttttcctggctatgtcttttgtcactacagaccctcaacgctaattttgttcctgagcatggctatgttgttatgagttcctgatatgaaatttgctgtgatctcttggtttcttgatgcaatgtgtgcttttgcttacttctctggctcttttaagtattacctacatagacattgcataattctaaaacctttgcttttgcattactatgttcattcttggcaagtgataaggaatccacgtagaatagtataatacaatcaaaaactttgatacattgcgcaatgagtgcgtgatgataaccctttaatcaggatccaagtggtgatattcactgattaataaccttctagagagccatgctatacttcttgttcttttcgtattactatttatgaaactggctgttcaagaagaatcaaattcactccttaaactttcttgttgtaaaagacacttttgttataagtcattggtcttcctgtgtcctctctttttttccctcacctttggcagcacagagaaaaggtgagggaatcttgtgaagtgaaaggattccttagctcgtgggttttaaaattccttggagcaaaacttcaaatggtatcatgattccattttcaaattaggtaagaaaaggagaatcttgttctttttcaagatcaagacttgttatctttcttatattcctcacacaagaggggctgttaaaatatgagaaaatactgtttctctacaatgttcttatatagaatttgtgatgatggtagcactactaataatatgataccactctctaggctgatgctttaacaaacatgaacttaatagcatagtttaaatggtgagcttgcttgttttaaggtctagtaatggtactactatacattttgtggaattatatacttgtaaatgctatggaactagtgatcatgtgtgtttgctcgtcttccttcaatcatgggaaagttaataaagtgagtctataattttactagtagacggttgaccaagtgtaggtagtttacttcacttgatcagcatgctcaaatctgttcaaatttttaggagagtaaacaggaaccacaagaacggaacctaaaccaacatcagtccaatttaagatacttggttttgtacggaatgaagtttaatagcagttttcggtcttggttcatacaagatgatgtttattggctttgattggtaacacaatttgaggcgcttggagcggaggttgaaccgcttctttgattaccaatcgaactgatggaactcattgttagaagaggcggctaaaacagatagctacttcgtgtacaaccataagcatgtttcaatgtacagtattcattttttgttgctcttattctgtagtacacctctgatattactgctacaatgaaattcttgtacgacatatatcaaagtattggattggcaacgaacggctaagctttaacacaaaaatgccacgtaggattagtctgaccaataagaatccatctttcaaatccccttccttcaatcttaaccagaaaactcaatttatttataatctttagaaaaaggtacttgaagaaacagtttgcagacaacattgaagagaagctctaaagattctttgtctctttctctgtcgcattgatttgtaaaaaagtgtggcagagagaaaccatg

SEQ ID NO: 883 - DNA, 3000 bp, Unknown
  misc_feature (1)..( 3000): cDNA_ID_3059451_gDNA_ID_1620333_Annot_ID_153694 3000 nt of promoter + ATG
catgacaactatatggtgattgctaaacttcttcagctaacatattccaatgtagttccccagatttgcctaaactttaaaaccacaaataggcgatcttacatcctgcaaatattcccagccaggattgcgtttagccaccaagtcccgaagttgatcatatcgcatagattcctgatcacagaagacataaatagttaaactctcattgatgcttaaagctgaagtattcaacaacaatagttcctattgaacagaaaattctatgcaatacagatccctgagtacatcagtatcccacaaatgtctccaattccatagcacaaacctatccagatatggaatcgaaactatgttggtgtagcaaaaccatcccaaatgaggattaagaagattcaactatcaggtaattgtagactaaaccttttacggtatgcatgctttaagcctctagaagaccataacctcaaaagtgaagcctggcaaataactcatgctgaaggagatctacatatgtagaaagagatactaacctcatattgccaccatattttcttcttgacatcttcatcataatcaaacccacccacaatctgaggcaaagtgatcaaccagaaatttgcaatgctgggatctttcatgctgtgaacaatgtgctgaaatagaaaatatgactcataagacggtaaagatgtagtaaacatagcaagctgttgggttgataaatagactttgtggtgctcacctcgtacggataatccatcttcttcagcacattataggctttccatggaggttccatgatctgcaaaatgaatcgtcagtaaaggtatttagcaagtgatagttttgttcaaaaccaaactacctctccatgtgcatttcatttctaataactagtatatatacatcccacaggggatttatgtagatgttaagctgagaagacgtaatagcagactcaaaacatacatcatcagctgagattctgacttgcagcttgttcttgcactcagtacagctcatcgcacccttcaatatcaatagatgttccatcaaatttctaagcatacactgatgaaaaacagcctatcgcgatcactcttaacacaaacaagcacctttttacgtggatatgaaattagcatagttgacaatttggagatataaaccaaatcagtatcaaatatagcagtgcaaatacatttacagaagcctagagcattaagagcgagattaaaaagcttaccgttccatcacaagttgggcagtcttttgatggcaatggagcactatggttgaaggaggagggaagatgaactaactcagctcgattctcaactatagcatctgcgacacaatctgctgttggtttctctccactacaagtaaagacagaaaggataaatctttaaatccttttatctgttagaatatcactaggatagcttaagcattgccaaatggaactgtcgacattaatatacagagaacacaaagagaccgtcagaataaagtggatctattcatgaagcctagtagtttaagcgatataacttgggttaaacaagagataatcccaccttctcaagttgtaatctttgatttggtaatgaacactccctgttcctttgcacatagtgcaccgtaatgcctgccacccattacaagttttgcaatccctgaccaacaaaaaatgttttcatctcatcggatgaactcaaacagtagaaccaaaaacatagcgaggaagtgtgagaactgaggtttctcaaaaattctctgacccagaataaagcatcaaatcttgaagctgacctttggcatatgactttctttcccaaatccaatgcaatgtcataagttccaagcgtagcaaccgcctgcaatcaatggaactccaatgataaaaagattccatatagaacaagtaaaacatgcattttccagtttcctaaactgattttgatcttacaaaacttcgacttagaaatcaagttgacaaactcagacagaaattcagcacaatataggcacactcaaattaaagctcaaaactttagcaaacattcgaagcgtaatttccccggaaacatcagctaccaaaaacccagaaagaaaatgatagtttcaagctagaaactcagcaaaaaccaacaaaagtttcaacctttaagacaactacatgtcaagttctaaacccagaaccatataagtttcaggagaaaccaactcacaaaaacagagagatacgaaattttggagatgaactcagggatgccaaaaccacgaggtgcagagccagcgatatcaaaggcgagagtgaaaggagacaagacgagcttgattggaaaatcgagaatgtctataacttgttgtccataacgagtagagaattgtttgaattgagcatcagcgaactgtgtcacgttctgtattaaacgacctggtcctctcgacattggagaagatgaagaagataagagcttttctcgctctctggtatttttgaagaggaggtttcaagagtggtttttacactattcttatctcggttttggattagacttattctttgttaccaaacatgtaccttctaattagactacgtgtcgtttctttgtaagaaaaacgacaaggagtttaatttgagaaatccccaaatcgagcgtcttttctatatttgcggcgatgacggcgaagatacggcggaggaagcgccgtggtatagaaaaaaaatattgaaatttgctatgaaagtttttttttttttttatgtttgttctaactctaaagcaagaaacatgctgtacttaaaaatgcaaactttacgaaactttggacctttagattaaataaaaattaagggaaattgtaaaaaggaatcatattctgaaagcagccaaaggaaagctcgccagataaacctgcgtttcattcccctacaaagctctaatctttcaatctctatacctctttctctatctctgagaatctatg

SEQ ID NO: 884 - DNA, 3000 bp, Unknown
  misc_feature (1)..( 3000): cDNA_ID_2128077_gDNA_ID_1620333_Annot_ID_153702 3000 nt of promoter + ATG
aagattgaaaaggaggatggaggagtagaagaagtgaagaagcagagaggtctgactctgctgtctctgaggatatggcgggagagattcttgcacggaaagtgtttgatgaaattccaagctaacattttcttctttttttttcacctaattatcgaatttaaacgctgtcaagtcacaaatagagaaaaattaagaggaaatttccaaaaatgtagatagaaagatattttcgtctaaatagacacacaaaagcttagggtttaattaattatacaaagatatacataataaaaaaaagaaaccttaaatataaagtatatatttaatatttaatctgaaaaccatgaaaatcctgaaagataagttttatcaaaataggatacgctttaaatatattattactatgaataaaattaaatacaaatattgagtggttatcctaaatctaggttgcgtcatatatatacttttgttttctcgtagaacactcaaatttccaacctttacaaataacattgttttcttttggttgtagacgtaaccaacataacgtttgtgaacttatctattattttcattgtataatacaatgtccgtagaaaacaaattgaaaagctaaagtcgatacacggaaaacataagaaaatatactaaaatcaagagatgaagctctcgaaatcattggaaaagtaataatagatataaatattttatttgtcaacatgcgtgcattatgcatgattgaatatggatggtgacacaacgacaacactagcacaaattaaaccactaagttatcagttatgacgaaagatataagtgtcttactcatttcaaaaaccgtataatattgatctctatacctaaaattaaataaaaccaaataaagcgcttaagtgttaatgtatgttagttataaatctgtagttctttgaggaatatgatcatcttcacgtggtaattcgaagcgacacaatggacaattgtagcgaaccttaaaccattccataatacacttattgtcaaattcatgaccacaaagtaaagtagcaacttctcgtccggttttaaactcctgaaaacaaattgcgcatttgtactcaccactagaataggtctctcgttttctcatgtatcttgtgctcttgttagcaatagagctggtcttttgtttcctcttgtatattctcctgctcaaggctccgacccttaaattgctcgcgggtctatactcgctattcctctcatattcattcaaaggagccacatcaagagtcaaccacactgacaaagcataacgtggacagtattcaaacgaattagaagttaaatcacgtgcaagttgagtgagttttagtattaacgtgtaagcatcttgtgaatcaactgctgaatctgttaagaagtaatagagtctttgtttgtggggagaatcttcgtcgtcagttaattcattggcaggtaatgaacatgagaagttagaccgggttagtatcggcgacatgttggctgatccgacgaaacttacatagacttggattgtgccaatctttttgcgttcaggattgacatcaatatggtagttgaatacaggagtagcttccatgatgtgggtagaccaaagagatttgtaatgtgtaaattcagagattcttatatttatactctattgaggcggtggaatagtccacgtaggattattatttggaaaatttatattaccttttatttatttttcggtccaatatttcctttttataattggtttccaattaaatatttgatttacagtagtgaattctttccatgaccaaaacttaccttacattcttttttgttgttgacttttttgtttcctcattggcctttttctttctaagaagaatcttaccaaaatatgataaattatggaatatatactaaagtattaatactaattaacattttaaaaaataaaatactacaatttttatagtattttaacaaagtatgtacatatatttatgaacattatatgagaagtaagtttgtaccacgttaaaagaaggggcaatgaaactcttttgttgaaatttgacgtcaaaactcgaagctatccttaatgaaaagtgtatgaatttcggtttcgattttgtaatgagataatgataaaatcataagtatttgatatagaatatggaattttgcgtttcctctatttttaaaatttagagataaaacttaaattatttggtgaatatttttatttgaaacttttctaatttaaaaagtcaaaattttggaagataattatgacggcttaccctaaacattaaatataaaaatatcatatgtattcatacttcttaggccatagccgctaaataaatcattacagttgttggatttttttaattatttcggttcctttgaatcgaactatttttttttgttcgagatgatatcgatttcgagaattaattttccgtgagttcttcttattttactatatatcaatattgttttgctgatgattttaaattcgttggtttatgttttaggtttattgagcatgggagtttctatccagaatcatggttgttcgtattttgtatgagaaagaatcaactagtgaatggagagaattaaagaaatcgagattgaacgtaacgagtggataaagaaaaaaacgaggtattattaatgaaaaaaacagcgtcacctagtttcattataaatcgaaattgtagtagatatgaacataaggtccgttcgatgatgatgcttaatggataaagaagacaatttattttgaaaaggaagaaaatacaatctttgaagacgatgactatgatactgatgaattgattatcatacgactcggtaattttgctgcatggttattgctgtctagtataccctatggggaaattagccttaatttgtgttcatggttcatagcctttgaccaacataaaaattctaccatctcaaaacaagtttcatttgcaacaaatg

SEQ ID NO: 885 - DNA, 3000 bp, Unknown
  misc_feature (1)..( 3000): cDNA_ID_3057935_gDNA_ID_1620333_Annot_ID_153708 3000 nt of promoter + ATG
gcctttaatctaaatatatatcataaattaagatatttacagtatacaattatttatacattacagaaaacagagtccatgtagccatataatgctatattaactgctcttctccttacctactcttcgactgcttgagcttgaccatcgagataacaaataatttggtttttgttttgggaaagtctatctgaagtaagatcctctttcgaaccataaaaattacaaatatgtattatcaaaaaaatgttgaccacaaaaagaaattaaacatagattgggctattagtttactcaagtgagtaggtcacaagggaatatctactgtttcttaatactgtgttaacctcctgcatttataatgctatcattatttattttattgggttctcttacgtcaaatagtttattattggcatttgttcatttgctttttgcagttattaaaaaaagatgatatgcggtattaccaaacattttagaaaataaataaaagttttgtaataaatgattgataaaacaacaacgaattttatggtaggacatatgtttttctgtagagaaaaacaaatccattttggtgttcgaaagcagccataaatttcagatcaatagaaaaatataaacaatttggaaaagaaattgaaaaataaaataaagaggatgatatgtatatagaatatcaaacactctactattgtgttaattaatcaaaaggggataaatgtggtatttaaagtgtcaaaaatatagcataaatggaatgaaggtgatagaaagtagggagtgtgcattttaaccttgaaaaagtacggatattagatatttaaagtcataagaatatttttctcgttatgaaaaaaatgctaagcaaacaaacaaattaaccgtgaaaaatatatgtttaaattaagataaagtaaagcaaatttctaaaatttggcaaggtcaatatcaacattgtaatctgtttggccattgttttcagtttaagacaattaacactttggcacactagaatgtattcaaaacttcataaattcaagtaattacaattatataatgttattgcttcggttcatagcttggtgataatcttttacttcaactatctgtaattaagacaggaaaggatcttattaattagatttagttactgtcatatgcagatatgtctaaaaagacgtatagatagacctacaatttctagatagtaataaatactactattaaacagtagtagcaggtgtaatagtcttagcatgtctctgataatgatttttaatgtataattattactttgcatactttataacatcttcttttttttaactaatagttacacacatgataagtccgtagatatgaatactcgaaggggagagttattttgatttaagtttatacaattttttcatacggttaaaatagtcaataagtctgtagttaatttattagtagaaattgatcaactcactatctttttagtttgatcttaaggtctttacatttttgggtgtgtcttttattctttagtttattctttagtacatttttgggtgggaaattttaaaaaacaagtcatgtcaaatagggctaaaattgaagttccactaaaataaataatttgtatgagataataatcaaaatattggaagtaacagaaataaattaacaattgtgaaatttacgtttagtcatgtcattttggtggacctgtaacaatcaacataattgataattagttatttgatgagccataattaatttatataaaaaaggagaaaaaacagacttgagatagtaattaagaaaactacaaaaccaggcagcataaatatcttctctgatttgcaacctgtaacttcttgattaaattatttttcaatcttacatcataaatctcgttgcttgaaaataatgaaatttaattttcttttgctgagtcttacaaatgaatatgaagcaatgaaaagtaactaaaaatccatcacaggagtaaaaaattggaaaatggaaaagatgaaacaaaaacgaaaagaaaatcaaggaaaaaaaaaagagaggtgaaaggtgtagaaggtggtggcgtgtagtaacgaagtctctgtcaaagtttttgataaattaatcatgtactgtgctgacactccaagatttgaaacagccttatcgatataatatccatttttctattaaaaataaaaattgaaactcttcactttccaaataactagtgtatatgtctaataatgtatccctcactatactactattgtttcgattagtcattgtacgtataataaattattatgtatcccaatttccaaacacaataataaaaagaaatttcaagttcgtagataaaaaaaaagatacaatctgaatcctctcttttattttcatcactgacagagaataccactgcactttttctcatgcacgcacgcatactcagatagaaacaagagcccattcctcgtttctttaataatttaattcaaagaaatacggacacttcatgattaattttaattttgtaattttaaaacaatctcgagttatgtaaaaaatatatcgataaactcaaaaatgtgatgtaataatctgctttggctttgctctctttactacaagacaaggcagagaaaaccacagattcctatgaaagagtagacgtacctgtctttttattattactaaatttataattatcttctctacgactttctggtttttaatcttttaataattattttactttcactaccccaaaaaaaaagcttccctctatttcgccgttttagatttaccaaatcccaatgtataaaaaaaataaactaataaaaccaaaaaataatatccatccacattattaccacgccccttactcaagaaccatccattatattaacctatttatcttcttcttcaaaacatttgagtctccttagggttttttctctctcaaacaaaagctttagatctttcttcttaatg

SEQ ID NO: 886 - DNA, 3000 bp, Unknown
  misc_feature (1)..( 3000): cDNA_ID_2128097_gDNA_ID_1620333_Annot_ID_153710 3000 nt of promoter + ATG
ctgctcttccttgcgtgagatctacactttctcagactcgatccctaccatggctgcctctacatcgcaactggaagatactacccgtgagattatagaaggtacttccatactcaacatcgacgatacttccatactcaacatcgacgatgtgatgacatcgcaactggaagatacgatcgagaagttaaagaaaggtacgcgaatatttgtttattctgttattcctagtttctaaaaatattaaaactctgattctgttcaattttccgttttagtggtgaggagtttggaagagataaatagaaattcaaccatggcctcactcacatataagctttaccgttttatactggagaaagaagatgaggctgccgccgaactcaacgctgtggacacagactctatcgagacaaaggttgtgaaaagtctaaaatttattgtcgacatattattgattgagacaacagtttaactttaaactgtctggtgcagctggtgaaactagaaaacaaacagagatatatccgtgaagttgaagacaacccgatcgacatccgtagtttgtacaggcctaaacttgttaagcttttaaaggagagagggtttacaccattcccatctgaagataagcctttctcacactatgactacctagatgttgctttacatatggaattacctattcaaaaatacgaggagctatgcgatcaaaaaaatgtgttgcaagacatagtttctattttgaagaggattattgatgcctatcaacattaactaatctgcggatttggttcaagattggtcaactagttttttttttcttttatgaaagctgcagtctctcaattgctatggaaagatcaaaatagtagttacaattctgcattgtaacacgaatgttttcttcttttagctttcagtttttgtgtgttgcaaactcttttgttaaatttttatggtttcttaactcgtttgtcatcattttcttcagccttgagccgtagaaactaaaatatacatagagtttatgtataaatcaaggcttccgcctatcgtcaatgagctcatgcttaatgggctaatgccgtattttccctttcattaggtccagtggcccattgaccggtttgattgtccgtccatatgtttacagagaaactatatacttttatgaatttatctaatatataagatctacttgtaaaatacacctataatgattagttgccagagaactcctggatctgtacaagcagattcacattcttcgtatagacacaatggttataggacttctttaacatggagaaacaataacctgctggaagtacacttagattctcctaggtcttgccattttcatatttacacgcatttagtttctttctaggtgtaatcatacagatagtgtttagttaaaatcgtgaagtcagcccttaccatattatatatatatatatatatatatatatattgtctatcaaaatgtttgagtataactttctttataattttcacaaaaatcattcttcaattaccacttttagttttttaaaaatttgaatcttgaattgaaaactttcgaaatacacagatgtcctctagtagaaaggaatgcgttaaaaactatgaaacaaataaaaaatcattatgagaaaacagtgattcaatgagttgtggtctcttctccatttggacagcgatagtgagacgacgaatacgatgaaaaataattttcttttttccgttgtgttagtttaggagagggagagggagaagagaggacaaatggaagcagcttgcgtaccaaaagtgcgacacgtatgtaaagagtcggaaggagacgtacggtgtaagtcatctcgtcttcacaaatatgttttggttttatcttatgctttgtcttatcctacgtggccattaaatcgttccattcgtctaaaccataatatcaaatcaaacaatcgtataatatcttatcaaccgtaaagatggtgtggtccgtttctctttaaaggtttttggtttggatgattctaaaacgtcacatgaattcttttttagattaccaaaaagttatgggctgaagtccataatgttttcggattagggattagaacattcaaacatgggatatatattgtgtcctttgtgtgttgtatcaaatttgctattgtttgctgcatatatttatctgaaattcgtaagtaaacctcacataaatttcaaactcatgcgtgtgtgcttctcatttctcatttggtttaaaaacaaattcaccctcattaccaaaattgttttgactttattaatatcattaacaaaccatcatcagtcaaatatgattatttagacatatacattgcctcggattttgaactatggccacgcattttttcatggctatgcaaatttcttttgatagctaattattaattattagttattataatatataattgttttttaatttagttttaaacgatgatatcggtaatgaaacaaatatttatgggctaaaatcgtaatttcaaccatttcctagtttggtatatttgtttgggtagaatatataaaatcttaacccatctcctagttgggttaaaatgtataaaattataagaaatttagtgcaattcgtacttaaaccaaaattttttgggttaaatccaaatttcactcctaataaaacaaatccatatataaacaaggttattttctggtcaataataatgttatttttttgggtcaaaataaaataatgttatatgaaggagaaaaaacgagtggctggaaagtaaacaatattttcttagttttcttctccaatctggcaaataaatctcactctctcaatcaaaaacacacatcaaaatcaaaaccttctcttcttcttcttcttgcgagttgcaccgaaacactcaacaaaaccaaatcatccaaattgggtaaaacaaaagaaactaacaagaagaagatcgaattcaagaagaagag

SEQ ID NO: 887 - DNA, 3000 bp, Unknown
  misc_feature (1)..( 3000): cDNA_ID_3059447_gDNA_ID_1620333_Annot_ID_153695 3000 nt of promoter + ATG
tcactttttacccgaggccattctctttcgtattgtgaatccttgatctgtgaatgtatggttctccggataggcccgtggtctggggtagcagcatccagacccagttgatgaagcttaatggcagcatcgaacagataatggtaacattcagcctggaagtgatagttaaagtttataaatagaaacaaacaaatatatgaacataacataagaaaatggcgtagaacttattgttggtttctcaactttcaaccaaatattgaagtaacttgcacaaacctgtgtcttagcatggatccaagaatcaccccaaatgtaaactccgtgattgcgtaccaacactgctgttgcttttggataggcttctatctgcaaatgagagtgaaatatgtcaaaactaattaaaaccattattttgttgcatatattcaattcaagcttcctcagaacaattagacttacagctttggtaagtgaatctgttagttcattctcatatgctgtgttctctatgattgggacaacaagttcatcatagtatccgtgaccttgaatcccttttatcatctccatgtgagttatctatgaaatgtcggacaggaagaaacattaaaatgcaaagtcctaactctactggggaacctggaattgtctaccaaataagcattacagcttacacggaattctttggcttgcggattcagcatcgtcacaagacaagattccatgccatgactgtgaataacagctccagcatttcgcatctcatatgcctgcaccacaacaaggttttgctatgaaacttattgataacgtcactatctcaatgttattagagattggacatctataaaatgagaagggaaatcatacaaacaaagcaagtcaatttggcattaaaacaacccacatacaacttgtcgaaacacaactcactgaaggaaaaagagattgtcttaacatacatgcaaatcatatataagtttacacattacaagcaatgatcatgcaacctcactgatcaactgaacccaggaaagatatatttgatagtctaaggtggttctttaataagtaaagagaagttacaaccaaaactccattttcaagagtgtttgtgtaaacatcaatacgctctaaatatcaattcatttttctgagcccattgtgtttagttctaacacttcactactgaatccatctcaaccagtgcaacctagtgggtattctatgggtcgaagaaacccacttgacacatccaacgaggggattattgctcaaattggacaagttttaccttgtaaccgagttttcgcaagcgtttccccaaagaaagtcgcctgttctgcacttttttttggattgtaatccaacagtcattagcaaacaacgtatttgccattccagtaaaagatcactagctaaatgggaggaaggacaaaataccactagaaaagagcgacgagctcttaacatatttcgttcataaccatgtgctctaagaaaaatccttcttaacagaaaacattataacttgaaatccgtaactgctgctcaacactttgacgaaatccaacattgctcaacaatttgagaaaacaaaaaatgcacaatcatcaaagaaaataccataagataaagaaggccaatagcaaagtgataatcaagctacgtatacagaaatccctaacgcagaatcaagtattactaccttgaaagcgacaaaaccataccttcatgaaaagtggagcacaatcggtacacttgggaggcttatttgggtatggctttggagagggtgtagatatgatggatccattagcagataagatgtacatatcctcaggttgcatcctctccttttgaacaccttcaaacacaacaagaatcagtaaaccgtgaagcaaataaaataacacatagaatcagcattgcaagattttcctttccattcaacatcttgcattgttaagtcgctaatgattcaaatacacaaagagaacgcttctaagcattgaaagaccaaaccaattctccacaaaaagagtgttaccagtgattttaaatacacaaagatgatctctagaaacagaaactttaactgataaacgcattacgcatagctcatatagcaaattaaaggtccacgagaacaaacacatcaactcaacagagcaacgacacatacatcagttcaaagatgcatcaaaatgagaatcaaggagaaagaaagtgactttaagatgtagagaacctgaaggagacatgacgataagttgctccggtttaggaatcgaagcatcatgaactttcatcgttatgctaccgccagtgccagacacccaaccttgagtataaaagtgacggcagagttcagtaaccaacgaactcgtctccttcacctccttcccttccagatacgcctgtggcaacccgatcatcgccgctgcagccaccgccatagattctcagagatagagaaagaggtatagagattgaaagattagagctttgtaggggaatgaaacgcaggtttatctggcgagctttcctttggctgctttcagaatatgattcctttttacaatttcccttaatttttatttaatctaaaggtccaaagtttcgtaaagtttgcatttttaagtacagcatgtttcttgctttagagttagaacaaacataaaaaaaaaaaaaaactttcatagcaaatttcaatattttttttctataccacggcgcttcctccgccgtatcttcgccgtcatcgccgcaaatatagaaaagacgctcgatttggggatttctcaaattaaactccttgtcgtttttcttacaaagaaacgacacgtagtctaattagaaggtacatgtttggtaacaaagaataagtctaatccaaaaccgagataagaatagtgtaaaaaccactcttgaaacctcctcttcaaaaataccagagagcgagaaaagctcttatcttcttcatcttctcca

SEQ ID NO: 888 - DNA, 3000 bp, Unknown
  misc_feature (1)..( 3000): cDNA_ID_2128059_gDNA_ID_1620333_Annot_ID_153697 3000 nt of promoter + ATG
ggtgtatgaaaatgcacttttgagtatattataagatattgcaaagaatttactagaaaaaaatgaaaatcgttcataaaaaagatatataaatcagagtagggcggccatccacttggtttgaaagagaccgaagtggaatccaaccatatgataatacacataaagatccaaaagtaatatagtcctttttcgaattattatcaatcctatgaatatactttttccaaagaaatatgcatgattcatgaatatacgtaaaaagaagtaaattagaaccaagtgttttcccacatgacatacattacattacatagtatcagttccctccattattctgtacttccattaccatcccctttataaccactatcaaaatcatcgtttatatgttatacaaaatcgatttcattaaaaaaatgtttgtgatctaatggggttgcaccgtttaggtcaaaattgtcattctctgatacataatgtcaaacggataaacgaaagcatgcatccgcagttcgaaaatttatgctacattacagttaaaaagaccattatatataagatttgctaatctcccctaaaactaaatgacagttcaaactataatttcaaagatggtgtgaatacgtaaggaaaaactattatggaagttatctatttagttataatacacaaacaaattggccaccgtcagtacactatcactccagccgagctaaagctcgtgtgtcttttgtgtatatgcggtttacaaagaaacatgattgaaaataaaaaaagaattggttggagaatgatactaaaattcaatggagtgggaccaaatgaaagcatcattattaaacgagaagaaaaagacagaattgttagagaaatgtcaaaaaagcacagtaataagtaacccaaaaaaacaaacccaatcaattctctactttcattaaagcttagtaagcaaatgtgttatgtgtgagtgagattgtgtgagagaaaagaagaagataagtgagagagaaagagagaaagagagaaaatgaagttcttgttccagtgtccatgttgctcttgcttctgcttcatgaaaccaaagccgggcaaaccaaaagctgttggagatacaaaaccaaaggaggagaagaagaaagaggtgaagaaagaagagatcaagaaagaggagaagaaagaagagaagaaagaagagaagaaggaaaccaaagcagagaaggctgagtgaaaactctactttgagaaaatgtaattaattatcccatttttattattatttatctgctatttgatgattatgcaagtaataacatgttatttttatggtttggtaacctttttaggcaaattatggtttaatctcttatattatatcattctcttgtttgaatttactcttatgatcaagatgtggaagattatgtttatcgtttctacgtaattttcctttaatgaatttaattaaatcctacttatttaagtaagtgtatgaaccaattaaaaactgaatctagttctttttgggcttgagctaaataaaattcacttttatctttgttgttcatagagtttcactgaaaagtaaacaagaatatcaatcaaaacatgttttttttaaggattatctacatcaagaatttataagattctaaatatatatttaagtcttggttttgttttttctcttgttttgaattttggttactttaatttggatcggttagatttcactctatctttttttttttgtctaaagatttcactatatctaaaaacgccaattcatgatataacaactatggtctggaaagcgatacatgaattcgttttcttagtgcaaatacaaaaacactccgatccaatttgtctatgttagtagtatatcaactaccataataatcaccgaaaatgaatggtgtttctaatagaaaaagggcttaaaacatatactcaccagtcaccaatgtagtttaatcaacagtgtgactattcttctatacccacatctcaacaagctcgaccttattgggtctccctcactaagtgtgtctcctatctttctctctcaatcactccatattttggatccatgtgatcgcgcgtattcataaaattagtagggtttaagatacatgttaactttttttttttggccaagatacatgttaactcaaatgtgtttattcaccaaaaaactaaggtagttttcggaagaaaatagtttaacaaaaaagaaaagaaaaatgtgatctcgacgtatttaaaatctgatatgtttggagaaaactgaaatattgtatttattcaaagcattttccacacgatttattcaaatcacatgcccatcttcgtgagctattcaaattaacttgggcttcgaaattaacaatgcccaccacatctcactaaaaaaatccagtccccgaagtccgttccttacaagttacaaataaggaagtaatagctagcacctagctggctagtttagaattcagaaacaacaatccgaaagtagaatcatataaagagctaatcactactatacaagtagactcaatagctttcatataaatgaaatcaaactaaaaatggaaaaccagcccattttgtcaatagttttaacaaatttaaatcatcattaacaaaaatactaataattaaatagataaatccattaatcaaatcaatttttatgggaagtgaattaatacgtgagtcaaatctcacacgtcttcttaacataaatgccttcaattttatttcacaactttcaaaattattattaccttaccaaacaaaatctctttgatataaagaaagaaagtcttctgtcactaatcttcgtattccatttttgtaaatttcagagattttctttgattcttcgtaatctcataagttcctatatatattcattacataacttcactcattccacaacacaaacacaaaagacaaaacacaaaaaccctaattttcagatctccgaaaaccatg

SEQ ID NO: 889 - DNA, 3000 bp, Unknown
  misc_feature (1)..( 3000): cDNA_ID_3059473_gDNA_ID_1620334_Annot_ID_153731 3000 nt of promoter + ATG
ttcaaaaaaaattcattccatgtcatatgcatgagaaattgattcaaattgatgtttaatcaaaaaagaaataaaattgcacctgaatgaaattcaaattgttgcttccactcctctgcctttacgtcccaaacaacagcagttctatcaacactaccggttagaagatagtcccccttcttgttccacttaagggaaaaaataggtcccttgtgtttgctaagagtacttatcagttcacctggaaatgtgaaaaagaaagacgtaatttgtaatttagaagctgactctccaatacataacagaaggtggagtaaatgtttttggccaaggatatgatacccaatgcagagttataatgttttttactagctgatagcttttattgtttcaatcttgtgtcgtgttactatcaaaagcccacacaactcgaacatcacaatttgtagctcacgctagaaggaaacatagagatattaatttaggcataaataactaagcatattcattgattcatagtaaaaataagattaatttcaagaaaatagagatgctagtgatacaaggggatgacacatacaaggagtgaaaccaaaaaatcaacgtggacataccatttaaagtccagattcttgcttggccatcacatgaaccagttgcaagtaaagtcccttcaccctgaaattcagaaatcagaataacttattagcagaatctaaggcacaaaaaaggaatccagaaatgcttcaaatatcctatggcttttgaaattagcagtaattagcagtgaccaggaatatctattttcatttaaaaattcagtagcccttacattccagtcaagagtggtcacatccttgctcttctcgtttgacttgccttttgcatgcttcaggattaaagcgttgatattacgaccagtatgcacagctttgaatgatccttccggaatactccagattcgcgctgttgcatcaccagacctgattatatgcaaaagatgtataaatggaataagagaacaaattatccacaagtgcattcatctttctcaacaaacaatttaccctgacgcaagaagtgaagctgagggactccatgcgcaagcacaaacctaaagtagtaatgtagacaaaattgttataaaataaataccagtgaagatggaaaagacctatagaacatgtttaattatcggataaagtcacctaataaagtacctcagaagtatgcccttccaaaatcctcacatcagaattaggaatgtgacttgtctgagatgtgggagtcataacaatatccataggttctgcgcctgttcaaataaaaacacagattcatatttgaaatagaagtttcatgaaaagttggcaaagaaaagtatgaagagttacctgtagaaccatccccagcaatttctttgtcagtttggtcaataaccatttccctatcagcatctccaagctgtttttcatggctcttttccctctctatcttctctctttccctctcccgttctatttctctttctttctctaatttcaatctatccttctccctctcaaatatttcccgttccatcttctccctttcccgttccttttctcgttctatcttctctctttccctctccttttcacgttccaatttttccctttccctctctcgttccttctgcttctcgtgcctatccttttccttagctcggttgcgatctccttcatgttctcgttcaacccctttatcgttttctttagatctgtctctttccttctccatatccctctctttcctcttcttttccctcagcatatcctgcagttcctttacatcctttgaaatcagatccaagggttgaaagaatgagaaatcctcatcaatgtccacttcactctgcgaacaaaaagcacataataactcagtctaaccacaccaaacaccatgtgaaaaaaaaaaaaaaagttgaaaaagtatgctaacattgctcaaattagcttccatctccatgtactgaagacctttctgaacaaatttgataagagcaccaggtggaaccatattcccatcaatgttggatttattaatccctgcctcataacctagagtgaatgcagcgtgtgtaaaccctgcaaaacaaagataggattgatatagaaaaacagagcataaactacttcaatcatctaaaataacttctagtgaagaaagtcttcagatacagaaaactcaagctcccagactgacctcgacatggaaaaatcaaaacctagattcgcgagtagcagtacgaactagaagatctaaatgatcctgagctatggagacattacgaagatccttaaaactacaattttcggtaacatcgctgaaaccctaagccgaatccacgaaaacaactaaaacaattctaaattcgtagaacaaggcaacaacattcacaattcgaaatcaaatccaaaacctcagccagtagctaccggaacacatacaaattcaaaaacaaaagtacaaaaaaatccgcgagaacatagaaagtctatatttatcgtacctgattcctgaagatatcggaaaaccagaaaattcaattcgacggaggtaagtgaagacatctccacagccaaatcctaactttaaatcaccgaaaatggagacaaatcggagaaagagctccgagcaaacaacgtcgcccaaaaagatttctcgagattataaactcttctcacatgatatttgcaatctccgacaaaaagtaaacctttactgggtaaccaaatcactagattatcgtaatgggcctatcaataaccaataacttcatatttttcggcccaacccatcgtatatttttgactagtctctccagaactatgtacactttcttttctttttttcgctccctcgtatattataatagtgagacctctggtatttttttgactactctccagaatcatgcgactagtctccagaattatgtgttcacgaatgggtgagatg

SEQ ID NO: 890 - DNA, 3000 bp, Unknown
  misc_feature (1)..( 3000): cDNA_ID_2128025_gDNA_ID_1620334_Annot_ID_153742 3000 nt of promoter + ATG
taattattactgtattgtttttgaaagaagacaatatcccttgcaaaaaggattttgtccaaagcacccacagttgtcaacattttaatttttcaatcaaataatttatcaaattcatgttagtaaaattactgtattatagataatatgcattatacagatttaaaattgggtgatacttgtggatgatgctaacaaatatatttatcaaaaatttactttgatacaaaaagaaaaaaactgaaagttattcttctttctagttttacctgacctatatccaagatgatatcatcaacgacttgtcggaagattaagaaattttatatatcatacatataaaaaagttgatacaaattgaagtcaatgatgtttaaagaaacggataggatgatgactcgtgctggatgaaaaaagccgtagttgtaattggaccctcgtagggcccattaagtcttttgtccttcaccttatgtctctgagcccacttgctgacttaatattaattagctttatccatttgcatcaatgatatatcaactttctcataatgagtaaacttttttttcttttctaattgttatcaaagaacgaaactcgaatcgatcttacatttcatcggaatggaaaagtaatattttacatcaaagtaagagagatatgaaatgattgggttaaacgtttttcgtgtttatatatattttaaggaatttagtcgttgagagatttgataacatatgacgtaagatggtttctaaagacaaaagccatgtcactagcgttgtttttgccactaatgaacaggcaaaaactaataaaagggggtttacaaataaacgatccttcgtcgtgggagagtccaagagacatatgccccttcaacgattttattggtcgtatcccctaaactctttttcatctcctaatccacgcactttgtatttggttacattaatacgtcatccactacatgtatttttaaaatctagagaaaataaatgagtacttaatctactagtagtaccttgtttattgattccttccacacatgtcggatctgttttaaagtaataaatatacgtttttaaggattataattccattgacttcagagtgtgtgttcaatgattttttgtttgtgagttttttgtcggtatgtaacaattattgttttcatattggcaaatacatacaccgaaaatacattaattaaaataaggttacgtaattattcaaacaaaaaatagttataaattattgtcacacacttttcttttcttttactagattacagaaaaaattggtattcacttgcatgatcagaacgctgtttcacatattattaaagaggatcgagaatgttcggtaatgtcgggggtaatttggtaaatcaaaggatgggaggcgtaaagaatctggggacttgggaccaacggagatttgagagcgatcgagataaggaccagacagtgttcgaacacgtgatcatcacgtgactgtttcccgcatcgccggaacttatatccagacttggcatctttgggcctactatgaatttgacaactttgactaatctttccccatacatataacttagctgcatatacacgtaactgtaagttgtatatattttgagtaatttcaagtacaacgattttttttatataaaataattcacattcaattttatttatgtaacaaagggatataaaaatgggcccatgtcatcaagaatcaagtactaacttcgtttattgttcatatgttttacgtcaattctttttgactggctatcattgtagcccaatgctctatgggcccataatggattttaatcattgtatgctatattcaatgtgttttttgagcccgttaatatttctattaagcccaacagccaatacccaatagtggtagtagaaaaatacagtaatacacgatcgagcgaaatactaatttttgtactaacaatttcagtgtctttctttattgatctacaaagtgctcaccaacaatattagcattttaaaactattgtaaatttaatctttcaaaaaaataaaatttgttagttggaactcactttaacaattaattttcttatataaacgtattattagaatttctttctaattgactccttgacattgtagcccaagaccattgcttcctatatctacttgaatagtacttgtcaaaatgcacagtgcacgaaacgaattgtcctttcacacccgtcttggcatataaagttcttattataagtgtgattggcccactcaagatcgtctctaccttagcttatcatatataatgacaagggtaagagataagagtgattaacaataaatatcttctctaatcaaagtatccaactaatttagcttatcatatataatggcatatcaactcttatggtcgaaaatgttgtatttgtcgtggtgtttaaatcaacgacgccaaatccctaggttatatgtcttctagtccctgttaatatctcaaggcaaaggaatcctcccccaacattggatttgatgtgcccacctaatcatatattctttggtcgaatatctcctcaaatttttgtcttatacaagcaaaatatatatagccacggggcgtggtaactacgtcaacaacaaattagaaaatcattagtttaaagatatgaaaaatagtgaaaccttttttaaaaaaaaatagtgaaacttacacactgagtttagactgtttataagcaattttttgtgtttttttcctccagtaattatctaaactggtacgaactaacaaatatctatattatacgagaacttggaggaaaaaaccacgtaagaaaaatgtacaaactgttacgaataataaaatgttttgtccatatacatagagataccaccataaatgcagaagactactataacctaaatttagctatttcagacatataaacgcctatatgaattaagacccagagaaacgaaaacgaaagcacacatg

SEQ ID NO: 891 - DNA, 3000 bp, Unknown
  misc_feature (1)..( 3000): cDNA_ID_2128021_gDNA_ID_1620334_Annot_ID_153741 3000 nt of promoter + ATG
ctaaacgttttttgtttaaataaataaatcatgtattagaacttatttacaatgtcatgacacaacattaattatttaggaattaaagatttaaatcttctaaatccttgcttttagagttattatatcattacctaaaaggctcaaaatataaaaaatttaaatattattatttatatatttaaactttataaaaaattattaatatttaaacttataaaaaggtttaatatatcataattttttaacatcattatataatatatagagtttaaaaaaatctcaattcttccgtcatattttgtgactcgaaattttaaaaataaacatatattaaccaattggcgaaaaatgtgtgagttcaacgtcccacatcgactaaaatatttagacaatgattcataaacatatcataaataagattaacatcaggaaaaaaaaaagattaacattaataaaataatggtatttttacgggacgggtttggcgggacgggtttgacaggatgttacttaataactattgtagatagatacaataatagagtatggtttagagttaaccatacatttgtttcagtaatgtaaaccggtataagatacactattactagatttttaagacatgtgaaatatatataagattcaccatttttgcagccattttaacaaataaatcttggagttggacttatttacaacccaatgccattagcattaaatctttttttcaaaataattaattttactttaaattcttaatttaaattgtcaatcacattatcaatcaaatttaatccaaacaaacttcacatcaatcccttaaaattagcataaaattattttgttaacaatattttaaaacaaagttttttgtttaaataaatattgttcttactaaacgttttttgtttaaataaacaaatcatgtatttgaacttatttacaatgtcatgctactgatattaattatttaggcatgaaaatatttaattaaagatttaaatcttctaaattcttgcttttagagttattatatcattacctaaaaggcaaaaaatataaattttttaattattattatttatatatttaaaattcataaaacattattaatatttaaatttataaaaagtttaatatatcaaaaaaaaataacatcattatataatatatagagtttaaaacatctcaaaaaaaaattcgtcatattttgtgattcgaaattttaagaatgaacatatattaactaattggcgaaaaatgtgtgggtttaacgtcccgcaacgaataaaatattttgacaatgattcataaacatattataaataagatcaacattaataaaataaataaattttttttgtggatggatttggcgggacgggtttggcaggacgttacttagtaacaattgtaaactataaaataatttacaaattatatatatattaatttaaaaaaatgaattgtctacgcggtgtaccgcgggttaaaatctagtagtatatacattcgtaacaattattagcattcagtttgatttttgctaataatatatatagtatggaatttcatactgaaactcattctaaaatttgaaatatgtagaaattaaaacagttaagtagacacctgtttccagttttgctaatatatattgcaaattcagaatatattttcaccggctaaccatatataacaagaaaacttgataattagtcttctaaatatgtatgaatcaaaaaatttagtaatatattatgtatatatgcatattttgaagaaacaatatacgactagtactcataaaacatagagaatgttcttgaagattggcatttgccaaaataaaattcaagtgcaatgaagaaaaaaaaagctaaagtaatgttgtcattagcatttttatttttatttttttccggagcatttttattaatttattaagggcatattttgcacatcagatcaaaggagtactttattacagaaattgaaaattcgtttgaagacatgttgagaaaatcaaggatcacggccttctgaaattctgaaccttgggtttcccatttcataatcacgagcttgattattactagtattggaaagtaaaataagatgattaaacaagtgattttctcaattacgtgtcactaacactaagggtaattatgatgaccaatgggtgacatctcgattttatcaaacgtcccttaacttttttcgacgtcgagattttataaaccagtaaaggcattctctttcacttttttcattccctcatttttatagaatcagtttaagtttttcaattgctaagggaatcgatcgcctatcaggagattcttcacatcccttataagctcatctgaggcaagaaaacaaaataaaatgattcaaaaactacatcaaaaaaaagtaatggacatgaaatgattcaaaaaaagtttttgttgctatttttgctctgcacgaatgtcacgtttgagaatcttatcccttcataaattccccaagtgtcaaatgtcatgcttcttgttgctcataaagacccttttagattccctgagatggatcccccaaaaatatatttcttattaggttgagattctctaacttgtcctttcaaatgtctatgggcctgaaagcccataaaagtcaaaatttccaaagttggcccaaaacagaaagatacttctgcgtagacattctacaaagtcaacgcttaaatatgtcatattcttttactaattcaaatcccaagttactagagaagcaactcgtcggccatcaccaagaacgtggctccaagttatatatgattcggccgaattttgaaaacttcttcaaaaacatatagaattgttctatcattttattgataacttccatttcaccattcctataaataccattcaatagttttcttcattctcacacaacttagacaatatctcaccattcctgtaaacacaaaaacttgtaatttccaacgaa

SEQ ID NO: 892 - DNA, 3000 bp, Unknown
  misc_feature (1)..( 3000): cDNA_ID_2128001_gDNA_ID_1620334_Annot_ID_153733 3000 nt of promoter + ATG
gactcccaagaagaagactcgataatccccaagttacacgttctctcgacttattgacaaatctatccctgcgcttatttaccattcacatatactgccacttcttattctgacgtggcgtaatagtattggataaaacggtattatctacccctaagtcgattatagtatatatataaagcaacaaagcagttgcaaatttcaagatagtcgtcactttagtcgcagcaccaccaccaatttcgaatttagcatttctgaattccgactctgagaatcggcggttaccgggaaatatgtcggagactgatagagagcgtccgttattagcatcggaggagagagcttatgaagaaaccgagaaagttctcatagtcggaatcgacgaagaagaagacgctgattacgacgatgaccccggaaactctcctaaattctcatggaagaagctttggctattcactggacctggttttctgatgagtatcgctttcctcgatccaggtaatctcgagagcgatcttcaagctggagccatcgctggttactctttgatttggctattgatgtgggctacggcgattgggcttctgattcaacttctatctgcccgtctcggtgtggcgacgggtagacatctggcggagttgtgtcgagaagagtatccgacttgggcaaggatggtgctttggattatggcggagattgctttgatcggagctgatattcaggaagttattggtagtgctatagctatcaagatcttgtctaatggattggttcctctttgggctggtgttgttatcactgctcttgattggtaagtgtttttttttttctcaatttggttattgatttaggaaaaaccctaatttttggaatttagggttctttattattgtttgtttggtatctttagttttgatcctaacattgtgtgtgatgggttaattgcagtttcatctttctatttttggagaattatggaataaggaaactagaagctgtgtttgctattttgattgcaacaatggctcttgcatttgcttggatgtttggtcagacgaaacccagtggaactgagctccttgttggtgagactctaaatattcctttcttttgtctagtgtgtggagatgggagtacaaaaatggtaactgttcatgttttttaacaggagcattggtccctaagcttagctccaggactatcaaacaagctgttggtattgtgggatgtattatcatgcctcacaatgtgttcttgcattcagcacttgtgcaatccagagaagtcgatccgaaaaagagattccgggtcaaagaagctctcaagtactactccattgaatccactggtgctcttgcggtttctttcattatcaacgtctttgtgaccacggtgtttgccaagtcgttttacgggacagagatagcggacaccatcggtcttgcaaatgctggacagtacttacaggacaaatacgggggtgggtttttcccgatactgtatatatgggcgattggagtcttagctgctggtcagagtagtaccatcacaggtacgtacgccggacagtttataatgggagggttcttgaatctcaagatgaagaaatgggttagagccttgatcacaagaagctgtgcaatcataccaacaatgatcgtggcgcttgtctttgattcatcggattctatgcttgatgagctcaacgaatggctaaacgttcttcaatcggttcagatccctttcgctgtgatcccactcctttgcttggtctccaatgagcaaatcatgggcagtttcaaaattcaacctttagtccaaacaatctcatggatagtagctgctcttgtgatagccattaatgggtatctaatggtggatttcttctcaggagctgcaacgaatttgattttgcttgtgccagtgatcatattcgcaattgcttatgttgtgtttgtactttaccttatctcacgaggactcacgtacactccttggcaactagtggcttcttcacataaagaaccacagagggatgatgagtgagtaaaggaaaagcaaagagaccttttcattgaagaataagaataagagagattgctctttttagtgaaacaaacaatagaaagttgagtttcagtatggtaacaaaacaatgtcctgatgtatttgtattatagtgttttatggtttttagagtatagctttggaagaatccgaatcgtatcgtttgtgtaaaacttccggcgtttcttagaattttggcagaaataaaacgtaaacatgaagttccttcttcagatgtgcgttatttcattttcttttagatagattttttttttttgggtttaagtatataagttaaaaaaaaaatcttaatatttatacatttagatatcttgatgtttttcaaagtaataacgtgaactctggttttgaatttcttagagaaaaaaaaaatggtcaaaaatggggaagaaatggtcaaagattaatggaaacgcgctcgcatttaatttgatgtttaaaggtcacaaacaatgtttagtcgtttaggggaaattcatgcacaatttctttgatgccacgataagctttgattgcaaatttaagttaaaaaaaattctggaagctagttttatcatttgataatgaaaatttcctggcaaacgagagtcgagtcgagtcgaggtatttaaatacatcacgtaagtttcgttaactgccccaaattaaattaaaaacacaggagcagcttctcctaatccaaaatccaaaaaaacaaacatcaaaaagtcaaaaattaaaatatttaaatacataacctacctaacaaggtttgacgcaaaacccgccacgagtctaacgcatttattaagagaaagtatgcaccaaaaatatcgttattaattgactaagtagaccgataaaactttatttaagagattaatggagctcataataaatagcaacaaaaatctttgacgatga

SEQ ID NO: 893 - DNA, 3000 bp, Unknown
  misc_feature (1)..( 3000): cDNA_ID_2128013_gDNA_ID_1620334_Annot_ID_153738 3000 nt of promoter + ATG
ttcgacttcaaactcgagataattcatgagaatgcgttgaacagtgtcagtatcaaacatggagtgatctccagtgaatgaataagaaggaatcaagagatcatcgagcacggcttgtcctaattgtaatcccattctgttttccaagtcaagtctacaagcaaccgttgtttcgaggaatattgctgcgcgtagaagcatagagagaaagctaaccgacattgcatttttctctcgaggaagaaggcttacgattgtttcaagaatcactcttttctcgtgttcttgttttggctcaatcttcttcattcctttcccgaaaatttcctgcatttgcaaagaaacgaaacaaacttttaacggatacccatcattctttgtccctagtttatggaacttcaacaaaagaagagactcaaccaaaatggtaatgtgtgtttgtaagaaactcaccaaccctcgaagagatttctgagcatagagcataagcactggaccaagtccatactgcttaaaccctctagccatcatcgcgatcaggacacgttgaaacgaatcaatcctaagaaccgttaagtcttcagcccaccaatcaacaacaggctgcttgctctgctgctgaaccacaacctcattgttaccgctattacttgaagaaggactgcaaaaatggctctcttgacaagtcatataagcaattgcatcgatgcaacggcttacaagtttgactctttcagcaatgggcaacaacttctctgatttgtgcaagactgtgatcgaactcgataagctcttgagagctacttcattcaagtaagcttcggctcttacaacgagattttccacagagtgttcctctgtcatctctagatactccgctgcacatcgcaacatggcaatgttctctgtgctcatatcaaagttaatgccgtagcagaacttagccgctagctcaaatgcttcagagcctcctggaatatctggtatcttgataacagtggaatctgaatctttgcttgattccgacacaagtttcttgataaacccacattttgacatgagtggaaactgcaagattcagagagaaaacaaccgaatcggcacgaatgtgatcatgtcattggctttacatcagagagattgatcgctaaatacagatctataatctaccttgtgcagtgaaaacgaagcttctcctacatgaacggtgacatcactagatacttcttgagaagaaatcctgaaacgatgtaataaagagtattataaacgatttctacttcaggactggaaacaaaaaatggattgagaaacaaaataatcttatgaagagaataaaaaaccattcactggttcttttcatagctgaggacaaaagatctttcttctttgctgacatattacgaacacttagctcgcagtttcttttcactcaagaaattcaccatggaacactatttcaagtccttctcatgaagaagacgtgccgtaatgtactactaaaagagagagaataagatcaagaaaatgagcttcttcctctcttttgataattgtgaccaaacagaaaaagagaactcaaattctccaaacaaagaaaaccataaactacccttaccaccaaaagcaatgaacaagacagaacagggtagttatgtcattctaatggagagtacaagatagggagtcagtctaaggagggagtgtgtgtggtaatggattggtttaaaaattgagaagagtccaagtggatcagacacacatctttgtaccaaactaataattccaaattataaaaaagagagtattgattcctctccacaaatgtatatatcccttacaaatattagctataaattggtttagtggtaagaagaagagaaggaaggagtatataagtaagctgcagaatcttggttttgtgacagaacatgaatgatgggatatttgtccctacagagagtcttatcatctttttttctgataattgaagtcactatatgcctcaacattttgattgagactctactcaatcttgcaataaattgtgtctcttgaataatataagacgtcctcaacgaaaaattcaaaattttcaaataattgcaaacaataaaaacagaggatgatacatgaatctgagtttttacctctagttgtttttcatggcttggtcagctaaatgagtaaagacgacagaatcttccctcgagttctcaacattggaatcaaaaatcagtattgttaaccaattcaaccccttcaagatcaatagctttttgcagtcttccacactatacattgagcctcttcatccatcaaatgcctcaactcctaaaacaaccatagcgtaatcttcgcgtgtatcaaccaattagctgttacatttgtcggagaacccattgatagtgataggagtctgaacaatctttaaatggctttgtcgcagcctccttgatgaatcgtggggacacagatagaaagtttccaccttttacttgcccattattgcagactttctcgagacttagctccattatcactgatcgaatcctcgcttaatgcaaatccgaaatttcaaaagcttcccaaaaataagaaccctaacatgtatataagcgggtggactatttgggtccaaatatattgggccataaataaagcccattatactatgtcaggcctttatggcaaatttagttggcgcaaaaataacgcaaacgaaaaaaggaaaacaaaaagttaatctggtgcggaagagcgtagtgaatgatagatacgcttttcttcttgttcttcctcttcttcgattctcctcttcgacgtctcttgttactgtgcgccgtcttagccttacgtgcgccaacggcgcactctcctatcctacgctcatctatcgtcactcccacagcgagagctgtctcggaagtttccggttgtactacgatcgatccagattttctcgtagagatctctgattctaaccagacgcgggcgatg

SEQ ID NO: 894 - DNA, 3000 bp, Unknown
  misc_feature (1)..( 3000): cDNA_ID_2128017_gDNA_ID_1620334_Annot_ID_153739 3000 nt of promoter + ATG
ttatggcaacgaaaatataaaacaaagatttcattaacgaaaatacaaaccaaagtttttatttaattaaggttttaattaacgtattattaaacatggaaatttattttccaaaattactggtactttaatgtaaaagattctaattttattttaataatgaaaaaatattttcttataaaatcatttaaatattcaaaaaatagttaaataatattagtacgttttttgtttattttggtaaaaacaattgcgatagtagtaatacgaatgagcagaaaaacattaaaaataattaaataaaactagtacgtttttttgttttattgtaattctgtttttttttttttggtttgatacaacatacatgaaaaatatatttaaaatataagacgtttcagacattcgaattcaggacaaattgtttaataagttggacagaagaaacatcaccttgatttaaaaaaaatactttgaagaaaagatgaacattaccatcatcatcatcagtaagtttatagacagagagatctctgtgtttcattgacttctcattctgctggtttctgctgccctaacttgggcgaagtaagcgtgcgcctgtcaacaaatcaacaaaccatattaatttacctaatatgtgatttatatacaaatacaaaggcttctaatttgttttctgaagcatgcgtaccatggcttcttttgcagttaatctgtcttgatgatcataccgaagtagcttgtcgaggaaatcaatcgcctacaccgttttaaacaaaacccttaagaacccaactaaaccattttctatacaaggagttaaggactcaaggaaaggagtaaacctcgggtgaaactaagtgctgattgtctgcgttgatgaatttggaccaaggtttcctgctatgcctgtaggttgtgttccattgaaccagagaatgatacaacactaattctcagcttcagctcattacatggcaatgccaagctcggagattacaatataatgtttaagtttcacataccgcccaacaagtgcttccagttgtggatcaagttctaactggtacttgttcagataagcattcaattcgtcagtcccaagcacctggtgaataagaaggagagttcatgacgacaatggaacggagatctcccatattctaatactgaattacaagtaatataccttggcgattttcactagctgatcctggttgtcatggccgtagaagaaaggttccttacggaatatctaatatgggtaatgaggaaaaattaggtcaaaattagatcaccacaagttcatttctcagaaaagaaaggaaagccgttcaaatgttatatcatgaacttaccatccctgcaaacatacagccaagactccacatatccaatgaatagtcatagtcttgcaagtccacaagaagttcaggtcccttgaaatatctgatacacattaggagagataaacattagagtgaagctaggcaacagcgaaaaaaataaaataaagggtatgaagtaaaaccataccttgaggcaacacggacattatactcttttccagggtggtaaaactcagcaagaccccaatctataagacgaagcttacgcagctcatggtcaatcataacattatgaggcttgacgtctctgtgcattattccttgtgaatggcagaagtctagtgcctgcaacaagtagtcttaccaaatgtgagtatgaagtcaaatggaatacttatataatccaaccaataccagaatttataccttcaacagctcatagatgtagtaacgaatgtcgtaatcagtcaacgtaggatacaaaactttaaagtctgtgctgttaacatattcaaatatcaagcttggagttttcgaatgttgatctctaacaacatcaagcagcttgacaatatttggcccaccgcataggttctgaagtattttaatctctcttcttatctacgaaaaaaagatcatagagagattcaagaaacaaccccaatcatccaaaacaatgtaaaacaattcaccttctttttcttaacaggtttgaggattttgataatgcacttctccttgctgttcacatttataccctcgaaaacttcactatattttccacgccctaccttccttactacctcataatcatcttgctccctgagagagcaaataacaagatcaaaatgttaaactaaaaaatcattgctttacaatagaagaactaaaaggcaaaataagcacaactaaaaaatcaaattcatcaatagagataaaagtaaagttttttacattagcagcatcaatttgattagattagcttcatcaagaagcaaatccagagcaagctgaattcaaattcaatacaaacactacaaaaatcgattaaattactttagcaactaccaattcagctaattctagggtttaacaatcttacccccattgaacaatgagtgactcgtaatcccaataatccttgggtcgaatcacattgacttcggtgtacacacgagctttcgacatcgcccgcgtctggttagaatcagagatctctacgagaaaatctggatcgatcgtagtacaaccggaaacttccgagacagctctcgctgtgggagtgacgatagatgagcgtaggataggagagtgcgccgttggcgcacgtaaggctaagacggcgcacagtaacaagagacgtcgaagaggagaatcgaagaagaggaagaacaagaagaaaagcgtatctatcattcactacgctcttccgcaccagattaactttttgttttccttttttcgtttgcgttatttttgcgccaactaaatttgccataaaggcctgacatagtataatgggctttatttatggcccaatatatttggacccaaatagtccacccgcttatatacatgttagggttcttatttttgggaagcttttgaaatttcggatttgcattaagcgaggattcgatcagtgata

SEQ ID NO: 895 - DNA, 3000 bp, Unknown
  misc_feature (1)..( 3000): cDNA_ID_2105155_gDNA_ID_1620334_Annot_ID_153740 3000 nt of promoter + ATG
tacatgcaacattatagtatatatggagcttaaactctcaaaatatggaatcattaatttaattaatcgaaagagactaagtaaaaaacaaaagaaagagtataaagcgcgtgatcatagcgtaggaggagggacaagacattactgcagaagtcagtgtctcgtttgctccaagaacctacgaaaacactcttcacaactctcaatctttcattttgttgggtctgatccacattttatcaaaactcggaaccaggggttgatataatattatgtggccattccaaaaatacataaataactgttgtaacaacaatttccgaggaaggaatgagcactccacaaacgcgggcgtcgatcggacccacggctccatgccattgccgctcctctctccggcaacgcgtgcctctctctctctcacatccacatttctaagcacgtttgtttctttagtttatttggttaattatagaaataaaattagtagctagttgtcacatgttttctagctaacataacagatggttataagtaaataacgataaaattgatacatggtgttagtagttaggttgacaaaatgaaatgagagatagagaattagtggctaggtttaaatctaatttcaactcaacatgttagctaataattcccacatatttttgttaagagatctaagagattgcgattcgaacttgttatatatatatatatatattgttatgaaaaatgttaacattctttgtatactttctagtttctatagctaaatagttaattatatatttctgaagtactttaggccaagtttaaactttgtataaataaacataacgacttctgacatttatgctactttatatttatatatatatggttttatttcctaaatcattccttatcgtaacatataattatggattagtgagttgtaaaggatttgacattgttcccgttacacattacataagaaattgacttaatatagaagatcaaatcaacacaaaacggccaactctaaagccatgccttgtattaatttaaatttgacataacatgcaaactcaacgagataataaaattttattgttgaaaaaaagtcggtccaggaacatttaatcagcaaaactttttcatataaacaatactaaaaataattgtgataattacttatagaagaattatttggtcacttttatgtgtgtgttttatagatacggtggagatcagatcctgttgggtcagtttttaagacttttgaacagttcgaaaggacatccttaacaaatctaacggctaagatctctttctccccccatacttgcaggacccacgacatgccacctatttctcagattctgattcgttcgctctctaaataccaaatttattctctaaaaagtctcttctaattattttagaatatctactaattaatcatacttcttctttgtataatacatttattaagacaactgggtttgttgatttgttagtctgggttgcatgtgattcaagctcagcaagatataagatgttccccgaaacactttattatatcttaatcataattattatcgaatcattttttattgattattataaagtttataagatatatataaagtctccaacaaccactaaattcacatttatttgacaatgtatatacatattccggagatttaaccaaaaaattaaagttctacgaaaaactccaaaacaacatcggtattcatgatgatgatataatatataaaatttcaactaccaatataaaaaccatgaatcataaatcccccaagccatgaatattattattctatggatgaatttaattttatgaatatgtgagggatccgaaattgaatctagtattgtctcatctgtcaagcatgtatccatgtacacgatttttgtagacatatatacttacatgtaaaattaatatagatcatattatttatatggattgtgtaagtaaaagctttgctggagctgtctgaactctgaagaggtggcatatggcatatttcttagaagaacctttgaaggctattggctaaacacactcttgttttatttgggctttgagttagtttgcaacaatcactctggttcttgtgatatgtgagagagagattaattaattgttaaacaaatgattacttaaaccttgtttttataatcattaaatttgtgaactttctttttaaataatttttctgcagtatatataactatgaagaatgtgacgcaccaatccatatctcttctctaagctcatcataatcatctgcttctcaagctcattattctcttcttaaaacaaaaacaaaaaatatctcttttaattttcttcatcatcttcttccatcgtataatcatcagctcctaaaccctaattggtttcaggtcagtaatgataacctagcactacgtacttattatctcttcttagtttgattttatttcttcatcagctttttaatttcagttttttttttttttttggatttaattcaattcgattattttgagattggtttgttttcattttagatagaacagctctattattattcccaccaaacttgacatcaattcttactgtgaaaaccacaaaagtccataagaatgtaaaagaatctttattgatgaaaagacaagattgacatgcgtataagggaaagaacatgaaccaccaaattggttttcaaagtacgatatctatatgttatgaaattttgtatgtatagatagatgaagatatttttgtgcatgtgtgctcagatttgttagcattagtggctaaaaattgcagaatctaaatcgagtactactagcagacaatttttttttaattttttttctgtccctaacaactttcaaatctcacaggttattacaaaaccgaagttccaagtttcgtcatatcaaatctccttgagatcttgatgaaataaaatcctaatctcttggaacatatcaaacatg

SEQ ID NO: 896 - DNA, 3000 bp, Unknown
  misc_feature (1)..( 3000): cDNA_ID_2128005_gDNA_ID_1620334_Annot_ID_153734 3000 nt of promoter + ATG
gagcgtgggaggagctgggacttactcggttaaagtaacttcggagacgacaggagtcaagatttcggttgaaccggcggttttgaatttcaaggaagctaacgagaaaaaatcgtatacggtgacgtttactgtagactcgtcgaagccgtctggatctaacagctttgggagtattgaatggtcggatgggaaacacgtggtgggaagtcccgtggcgattagctggacatagtcgtaaattatgagaaatgaaaggggttttatggaaaagaaaaggtgtttacagatttattgtaatgccgtttttagatacgaagaaacctctgtttagcaaaaacgacatgcagtctgttaagacttgcctagtttgtttttgggatgtcttgctgtttttaattttaaaaagaaatatattctccggctacaacagtagctgggtctctctaggtgttttatcatgtgacttgaaatagttaatgaagagaaaatgtttgaaaaaataaaaagttaatacaaaaagtcaacgattaattaccacaccatatacttgagatagtattaagatgtttctatcaactaagctataaaagtgtatataccgtaaataaccaaagtagagtttctgaattatgaaactttaccataggcatccagagattatcaatgattagatttgctggtgagaaaactcttttctgtcacacaaaaaaaaaactaatagaaaagcatgatagatttcggtcaatttatgggctttacaaggaccgtataatataatgggctcatttggccttattatcagtttccaatattttcccaagcacttgtggaactatttttcctgtaaatttctcaccacttcaagaaaatcgaattgtataatatatgttttcagacttcaataaatgtatttttcttaaactaaatggtggatttatttaatgtctaagttaacgattgtcagagatgatagtgattacacacactccacaagtctaatttgtatcatgccttccatggccaatgttttttcacgttgcatgattctaaacatctttagacttcgaagccaaatattaggcgcacgattaacgatatccacatgcgaaaattaaatacgcattatgtagttatatacacatgtgtgtgcattcgttaacatttagtatgtgtaatatgtgcagttcgatattttgaatttattatacaaaattagacgccaaaccaaaattaacaaaacaaaaagtgtgttaaaggtatcatttacgtgataacgtcccaatgcagattaacaggaagtgattgaaaagtatcacttattaagtaccaccaataagtgaaaaaataatgcgattatgagattagaagatgtgtataaagaaaaagtataaacgacaatatgatacgtcgtttcttgcggccctttaatcatacaaaacaaaacaatggcataagcgacgcatgagtcacaagcaatgaacaatagtggccatcatcttaataaataaaaagttgacaaaaacattttcttgttttgatttgcaccgcaagtttcaactatttttggtaccaccctctctatttttgctttttaagtcaaaatcttttataattatacaatttcgatctagacgtatcatatgatttcaaatccattctaccttttattttgtatgtgacaatattgtcttgactcgcggtgtaaagttcttttctcatgaaacttttatccttctggaatttgatacatcaatatataacttatcatttatataaatgcaaagagtcattttcattttatttatagtttgtaattatatatgtagtcaaagtctaatgtttctacaacttaagggaaacaattgtagaccattaatacgcgtttgacaaaaaaaatagatcaaactcctaatttctagctacatttcaattagaaggatcttttctgcataactttctgtctcttctctgttactaaaacatggaaatgatacttgatctatcctcccacgcatatgtaaaaacaaaattaaaacgctcgtaattaacaacaaaacaccaaaagcaatgataaaaatttactaagaatcatgataaaatgtatgcatgttgaagatgatggtgatggtgctgggtaaagtgtacccatcgcgtgccagaaatagtggcctaggcccactcctccacagacccaaccttctaagctattcttattcttattattattttcttggtttttcagtttggtaatatttatgttttcaatttatcggaaaaagtaaggtagaaataaataaaagcaaaaggctgccatatcttacagcctttcagctttatcatgtgtgttctttttcttccttaaaaaacccatagcaatataagcattttaatacgctttgttataataaattgtggctaaaattaaggttttaaaatttaaatgacatatggacagttttgaaacagactagtcttgtgcatatgcaagttgaccatttaaaaaaaaaatcagtctaagcattattttcaggattcaaaattaggcaagagaacaaaacacaaataaataacaaattttgaccatgctgtcactttactgtatacaatggtcacgatactgatagagaaaaggtaaggagaaaaaaaaccgtgtctagtaaactaggactcatacttctcatgattttctatttttggttaaaatttctacaacataaataaaaaagaaaaataactttttcttttattacgattgcttatgtctcgctccaagtatataaagatgtataaatacatgcaattatatgtatcaaggactataggttatgtgagaaataacaataataataaaaggttatagtcgtatttgacttttccaaaagaaacttctcttcttgtcttctttaaatattcaaattcgtcttcctctctttcgttaatgtgtttaatttaaaattttgtacctctctgtctcttcgttgggaagcttcgaaaatg

SEQ ID NO: 897 - DNA, 3000 bp, Unknown
  misc_feature (1)..( 3000): cDNA_ID_3059469_gDNA_ID_1620334_Annot_ID_153732 3000 nt of promoter + ATG
ccgcaagttgagcatcggccgttttcggctgaggaagacgagacgatcgcacgtgctcacgctcagttcggtaataaatgggcgacgattgctcgtcttctcaacggtcgtacggacaacgccgtgaagaatcactggaactcgacgctcaagaggaaatgcggcggttacgaccatcggggttacgatggttcggaggatcatcggccggttaagagatcggtgagtgcgggatctccacctgttgttactgggctttacatgagcccaggaagcccaactggatctgatgtcagtgattcaagtactatcccgatattaccttccgttgagcttttcaagcctgtgcctagacctggtgctgttgtgctaccgcttcctatcgaaacgtcgtcttcttccgatgatccaccgacttcgttaagcttgtcacttcctggtgccgacgtaagcgaggagtcaaaccgtagccacgagtcaacgaatatcaacaacaccacttcgagccgccacaaccacaacaatacggtgtcgtttatgccgtttagtggtgggtttagaggtgcgattgaggaaatggggaagtcttttcccggtaacggaggcgagtttatggcggtggtgcaagagatgattaaggcggaagtgaggagttacatgacggagatgcaacggaacaatggtggcggattcgtcggaggattcattgataatggcatgattccgatgagtcaaattggagttgggagaatcgagtagacaaagtgagattattaggaaactgtttaaattggagaagaagaaaaatgctctgtttttttctcctttggattaggcttaagaattttgggttttaaggaaatgtatagaggaaatcgagtgaacaaagctcgagagctggggacgtagtgacgaagacgaagatcaaatttctcttaagctattcaggaaaataaaataaatttttatttataactacgcttaatgatgataatagatcaaattaatacacaaagtatcacaaagtgaaagataaatgatccagttaaagaacaagtttgtcgaggattggtaaagacttgcatttggcaactaaaggcacagatttgggcatggtaagaccctttccttccgacatgtcaacggcaacgtcattgtctctctcccaatcgaaacactggatcaatgagcctaaagctaagctcagtactagttgggccaggcccataccaggacatgctctcctaccgattccgaaaggcagaaacttaccacgatgggtctctgattcaaacctctctggtttgaaagtttctgggtcatcccatacatttgggtctctctgaatagcccacgcattgataaatagccaggtgcgacgtggaatgtcaaatccagcgacttcacagtcagtggatgaagcgtgtgggacaagtaagggcgccgccggaaacaaacgaagagtctcagagatcacattgttgagatagggacacttgccagtatctgattcctcaaacacacgcccttctttcgaaacctcgtttagttccgttttgagtttccttaaaacttccggatgatttagaaggttagccatagcccactccaacgtcactgcggttgtgtccgttccagcaagcaacatcacctgcaatgaatcctttgaatctttgatgaatcaatcttgatcactcctattaacgattcaaaattataggaattaaaaactcatgtacctgtacgagccctttgatgatatcatcagtgtaacattcaggttctgattcttgaagagacagcaaacgagtgatcatcgttttctcaagctctgcttttcctctgtttttccgatgctcgtcgactaatttctgcataaacttgtccaatttcgaagcgagtttctttgctctctttctgtatccatcaagatcaaagagcttcagagtcgggagaaaatctccgacataattaacaccagcgaaatcgaacacctccctaatcagcttccgaacttccttagtttcctcgtcttcctctcgttttccagcgaccatgctcattaggatgttatacgtaagcccataaagaaacggctggagtttcaatctgacactgcctcctgatgttaccagttccacgttgatcttccgaatcatagctctcacttcgtctctccgtatatccgaaaagtctctgagacgagcggtggacaagatatctacggcgcagaaacggcggagtctgcgccaatgctccccgtacggagctgtgctaaccagcgtgttgttgtaacccatgtattcagttaaagtagcgagaggcctgttggcgaaaacaacatcgttttgctgagataagaactcctccgcagctgaagctgacgttacaaccaccgctcgacgagagcctagccggagaataaacacgtcgatgccgaggtttcgagagaggtcacgaagggaacggtgaacaggttctttgagaaggtggaggtgtccgatcaccggaaaacctacaggatttggcggtaaattcttcttctgctttgatcggaaaacatacgccactgcaatgaatccggccatgagagcgagtagaaacaaatcaatcatctcacccattcgtgaacacataattctggagactagtcgcatgattctggagagtagtcaaaaaaataccagaggtctcactattataatatacgagggagcgaaaaaaagaaaagaaagtgtacatagttctggagagactagtcaaaaatatacgatgggttgggccgaaaaatatgaagttattggttattgataggcccattacgataatctagtgatttggttacccagtaaaggtttactttttgtcggagattgcaaatatcatgtgagaagagtttataatctcgagaaatctttttgggcgacgttgtttgctcggagctctttctccgatttgtctccattttcggtgatttaaagttaggatttggctgtggag

SEQ ID NO: 898 - DNA, 592 bp, Unknown
  misc_feature (1)..( 592): cDNA_ID_2128149_gDNA_ID_1620335_Annot_ID_153757 3000 nt of promoter + ATG
ttttttgtaaggaaagtcaaatttgggtaaggggctaatgacttcacactttctctctatatacatacagtacgtctttttcgttcttgaagttggctttacttcttccctaatctatggaccatgacgaatgtctgtttaagcgccacgccatatatatatatcatagtgtttcttcgcgtatggtgaaaagggtatttcttacttttattattgaaagaaaaattacaacctttatatgattatgaggattgaggagacagttactattagttaacaataaaatgatctcactcaaatatgcataaatggaatctgatatctacatcaaatggtatgaataaataagcaaaaaaaagaagaagcttatcctaataagagacaatctgatataaataataatgatatcataatccacagtggagagtgatttggtcacactcaaacaagcacacaaaacaagaaagatatttggaagctctaaaaagataaatcttgtttttccctcctaattgtaaagaagagggctttagacttttagaacaacactcgagggaagtacgacgacgaagaagagctaacaacgataatg

SEQ ID NO: 899 - DNA, 3000 bp, Unknown
  misc_feature (1)..( 3000): cDNA_ID_2992285_gDNA_ID_1620335_Annot_ID_153760 3000 nt of promoter + ATG
tatctctgaaagtgaaatcccaatgataaactatgtgatctaacatctaaaacccttcaggtggtagctttgaacagttctcaagaagcagaaggtgaactctacatcgatgacggcaaaagctttgaattcagacgaggctcttacatccatcgtcgcttcgtcttctcaaagggtgttcttacatcaacgaacttagctcctccagaagctcgtctctcttcccaatgcttgatcgacagaattatcctcttgggacacagctcaggtccaaaatctgcgttggtggaaccgttgaatcaaaaggcagagattgagatgggacctctgcgaatgggtgggcttgtagcttcctcgggtacaaaggtgttgactatccgcaaaccgggtgttcgagtggaccaagactggaccgtaaagattctgtgattgaacggtttgaaccagtttcactcatggccgttagagtggccgaaatctgcttttccggcgacggaatatcacactttttaatatatgtttggagatttagacttaaatagttgtaagagctaacagtttgaaagtcactttgcattgttgtttatcttcatataaatgagtttagattttgataatttcagaattcgtggaatcataattaacaattttgatagggaaaaataatttgttttttttagtcagagggtcaaataatcttaccttccatcgttgcctaattattgtcaaatccttttactttttacctaatcaacccatgaaaaatcttgaattacacgttttaagagtcatgaagaaaaatcaatctgattctgttggctagatttgttttttttatactgcttagtgtttactgttatagaaagggttctaagtatgcaaagtttgccctaattagataatgttagatccgtgtaggtgaaacaagaagccaaaattctgtgtaaaaagagtcacgtaactacctaactcttgtaggtctaaagaccatcttcactttaaattagaacctcatgtttcccaaacaatatattccgttcatgaatctcgtttcgaattaaaactaaaatattacacattttagaatgtaagaaaaacacactcaaaattaagaatcttggaattgaaaacgagattttgaatgtgttcaaagatactctttagaaattataatggtagataatagcacttgcatgacaaattcgattctctcttctcatcatgcatttttgctttacattttgttcctttaaaccaagaatattttgactcacctaaaagataaaccaaacatatctgaaatctacaattgacaattaacttctctttttcttttctcttattcttactgaaataaaaatagtatgcaactggtctttataaatttcagttttatatatttaaaaaaaatcttctataccaagtttaccaactcatggtagtccaatgattaaaaaataaatcattatggggttaggacttaggagatcgaattcgaatcatttcaaattttcaatgcgatttcaatcattgtttttcactgttaacactttgaaatatctaagtgtatctaaaaatttcaagccttagagattaatttggacttcgatccggaattctgcgacgactatcaaacaaattttgttttaaccgaaatatagattatttgcatctctgattatcaaaccattcattctttttattattattcagtttactataaagtatatgtccctccctttatgaaccgtatcaaatactatacatagtatgcatgttcgaagaaatttccaacatactaatttgaaatcaacgaacatatcaaattataatgcgttgatgcagaatatatgctttctatatatataacttaaatacaaaaacctaaattttccatatgccttcgtaatttagtatataaatattcattcattcttaatacagcctaggactcggtagcattttgaagtaggaacgaattttgttaattaagatacatgagtgattagatcgaatccaaaaggtatggaggcgtagaacaagaatttggttctctttcattttacgtatctttcactaaagaatagagagaaaacaaaaccatgcaaaaacctctcaaaaattatatattgaacgcttagacaaagagccaaatttattcgctttttgatgtttacatcagtatttgtttctagctagttcatattatttaaactccataatcatttgaaagacataaaatacagatgtttaagatctgtggatgtttatataggatcttcgaattcggataatgaaatcatttatacactattaagtattaactttgtagaggacttaagtattcgaaatcttgattcaggttgtcaatcaagaaccgtaatgtttgatctatagagccatgggattaatggatgctaaaagaataaaacactcgagaagaagagtacacgtaaaatcactcacacacaaagaatgagagatgggagaagaatactacaaagtgtttgttttttttaaatcggctcatatataaatttgggcgatactctactacccacattattcttttaaacaatgatataaatgtgtatggcctatgtagccgaactttttacatatctgacctgtatatatataataattatttatcaaagaaattagagaaagattcttccacttttgatggcttataaaagatgatgacccaaaacactcaaaatgcagcagcaactgctctctcaccacccatctcctcatttctcttttgcatttctttctttttttctgcattgcattcttttgaggggtttaattttctgcatagctttgtctaatctcttagagctcaataagagaaggtactataactgatctctccctctttcaagttttttttttgtttggtttatagaaaactataaccgccattatccgttagttttaaccgttttttgaaactagtgaatcctcataactttggtttctcactaaaaacag

SEQ ID NO: 900 - DNA, 2374 bp, Unknown
  misc_feature (1)..( 2374): cDNA_ID_4255186_gDNA_ID_1620335_Annot_ID_153767 3000 nt of promoter + ATG
cctgatgtttgagcgtcacgagatagtcggtggacgcatgaggaccgtcactgtcgccggtgatactttcgaagccggcggttcgattctccatccgaagaactaccacgttaaggatttcgtcgaaaggttcaatctgacggttcgattaccgacgccgattgaagaatcttcagcgattggaatctgggatgggaagagatttgtcgtcaagacattcggttccggtaccaaatttccgtttttggatacgatcgtctcttgggtgaatgatctctacttgttcttacgttatgggttatcactgctgagaatgagcagcttcattgaggtatttaaatgtagaaccttttgatttcagaattggctatcaattgttgaacaatgagtttgttgttgtaaagtgattttaatttgttagctagcaatgaggatgttttcgtaacttgattttgcatctaggtttgtgtttgtgtgtgtgtgtggatccttttgtatgttgactgatgttgattttttatgttcgtagaatacagttgataatttcttgaagtactatgaaagcttagagtcaagacctatcttcgacaatgttgaagggatgcttaaatggtcaggcttgtacaatctcacaaagctcactctacaggagaaattatctgaagctcagctttctcctttgttagtcaacgagctggttacggtaatctttcttacaatactgtccttcaaaggccattttaatctcttctttgcttatatggttcaacatataactcttctccttaacaacttttgccaattatcatcctattacaattttgagtgtgtttattgtgtttctccaggttattacaaggataaactatggacagagtgtactcatcagtgggttggcaggtgctgtctctttggcgggttcaggtggaggattatggtctgttgaaggtggaaactggcagatggctgcaaagctcattaatcattcagatgttacgttacacctgaacgagaaaattgaatccatttcatatctcgaaaaccattacgagcttaaatccactaaaggaaacagctacaagtgtgatgtcacagtagttgccacaccattagacgaagtggatattcagttctcacccacgatctcaattcctaagagagaactacaacacacgcacacgacatttgtgagggggcttttaaacccagtaagtatcaatcactgtctgtagttttaacgttatcctgatcatgattctgactcgtaactaatgtgtgatcatgttttctctatgaaaagggatactttgggatgaaatcgctttcagatgttccagctttggtgggaacccttgaagatcctctaattccattctcatgcatctcaattctaaggaaatatagtaaaacagatatgacatacaagatttttacgcgacaacctgcatcagattcgttgcttgatgagctcttcaggtagttacaacacaatctctgtcagatttgaagcacatctgttcagtttcattaaaactggttcaatttctcttctttcttaaacagtaggagaaccgaaaccgttcgaatagactggggtgcatacccaaagtaccacgcgcctgaagttttcgcaccattcatattagatgaccatcacttgtactatgtgaatgcttttgaaaacgcggcaagcacaatggagacaagtgcagtggctggtgagaacattgccagactcataatttccagattcatgacaaaggaatcattatcttcctcggacaaaagaagctgtagttctggtctgcactcagactcataaacaactttggtccccacataaacaaggactattggctgtgtgtgttttgaagaagaatatgatgtttatgtatatagacacataaaacagttttgagttactgattgtgtttgttcctcgtaacctaagcttcttcttttttttaatctttttcgagttcttgaatcagaccattggcattagcatacaaaaacaaaaacagagaaagttaagaatcttttagtaccaagacagagacataaacagctacataagttgattcaatattagattttactacgtaaacaacagcaaagttgttgattcaatagcattttatataaataaataaaaaactttatttagtagtgcataaatgataaagcaaattttctaattagcttttgttgattaatcgggttaataaataaatcattaatgtaaaagattttaatataaaataagaatccccaaaaagagctaaattattctgcagaagacgcgtcttctttcttcttcggtaaacttcaaatcagaagcgaagaagagatcaaatcaatctgatcgtagatg

SEQ ID NO: 901 - DNA, 3000 bp, Unknown
  misc_feature (1)..( 3000): cDNA_ID_2128163_gDNA_ID_1620335_Annot_ID_153763 3000 nt of promoter + ATG
gagaaatgggagggactgattgagaacgcaggctcggttttcataggaccatggactccagagagtgttggggattatgcgagcgggacaaaccacgttcttccaacatatggatatgcaagaatgtacagtggcgtctctctcgactctttcctaaagttcatgactgtacaatctttgacagaggaaggtctgagaaacctcggcccttatgtagcaactatggctgaaatcgaaggtttagatgcacacaagagagccgttactctcagactcaaggatatcgaagccaaacagcttgcataatccaattgagatttatattcagacaaaagaggcaaaaattctttttgtattgtatgaacatatttggtttcctgagatggaataacaataaaataagagatgttggaaaactcttaccataatcttgtttttcattctttaaatctaaatccttccgtatgtttgaaccaaagagtaagttaattgtgctaactttcccgaaacacaatgggattccaaatatatcttgttctttacaaatgacagcgacttcaaagattatacagaaaacttcagagagcaccaaagaaaaaactggtaaaagaatgataaaatcgtattgctgatcagtttcttctagctcaagccggcaaaggttcttcgagaactgcaacacgaaagtaacagaccaaataaaacatgtcttgagtttagttcttgcaattctaacaaggaaaagaagaagaagacgaaaggaaaaaccttttgtttttgtggcggactcagctggtgtgatttccgcattggaagcgacaggagtttttgttggcacatccggaagatccagcttctcagattcttcagactcctttgtaggcacttcaggcatctcatcaacaataagctttaagcaaaacacacatcaacattagtctctttatctagtaaagataataatacacaaatttattttgtaaacccatacctgactttctaggttgtcaaattctgctaatatatcttcctcatcctctgctgatagtttctctcccaatatagcgttcagctcctgacattcggaaatgtaaatagagtcatcaaacacaaaagctcgacaaaaaagattatagaggttttcacactagacgagctcagaacaaactgtgccacacaaagcagtgatcaaataagaagatatttacattctgacaaagcggataacgtaataatgaatcataaacaaatgatacgaaacccgaaagtattttgactcacatcttgataagctttagcatcagcagtatcatccattagtttttgaacatcatcaaggtccaattcgctttgaatggccttaatagcactattaccctgctttaagctctcaaacactgccttttgtttgctcgtaagttcaatatctgttaactgcgagttcacatgaaagtttgagaaagccataattatgcatcaaaagagacgatgccggatacaaaacatacacacaaggagaaggatttacttgttgttcaacattgatgacccattgatccacttgcttcaataactcttcttgagttcgtttcttcctcaatgctaacaaagctctgtcctttcgcttttcacggattaagtctcttgcagcttgcttttccgcttcaattactttctcaagctaaattagcaaaaaaaatgagaagatcggttaacaaagagatgagccaaagaactcaaaagcttgagtctttcttttccatcacactactaacaatcataagacacatattgtgaaacgaatcaaatccaatctccaattaggattttggatgaatcaaaactatatgatctgggttccaaaagaaattgtaacaaaagaaaattaagatataagaagagagaataaaaaaccttctgctgatattgaccaagcttgcgtctttgggttttgagagagagaatcgctcgatcaacctccgtgatctgtggtttcttcacgaacaaattccccatcttttcttcacttatcgaaaccaacgattcggaaaatcaaacgagcagaagaaaatttagcaagatttgatcttttgacgaaattgattattagtctctagatttcccaaaaatgtcgccaatttcaaaccaaagtccaatttttgtgtttcttctctctttctgcttttcagtacaaatatctcaaaatagaggaaaagcatgaaccggaccgaaaaaatgtaaaaatcgatatcgaaccgattttagtcggtttgatttcatccacactgaaaaataaaaaaatcgaaaccaaacaaaaattccttggatagtaccgtaaacaaaatcaagctgaaatcgataagtaaccgaatagaccaatgtataattcggtctcccaattttgttcaagtttatatcaaaaccagaacaaaccggttggccacctttaacaaaatctcgaactcgcgttttcgatagcgcgtgattgcaaaacgctattgcagcgtcacgacaaaaaaggtttgttcgtttattaaaccggccggtttggaatcatgaatttgatttgaatccttttagctggttaaccgacgtcgtttgagtaaatggatccaaagccagacagatcctaaatctcgtcgacgacggtgtcgggactgaaagcagagagaaagcaaagtaagctagcttagctaggtccaagatccaagctttggaattttgtaaattgtctccactcttagccggtgagtctcactctgttccgaattattctttgtgatatggatttcgatttcccatgattcgattttgtactttttgctcttctcttgagtttaaagatgtacgaatgaatatatacagattcgattttatgttctggtggctttgatcgctgaaatttgaaaactttgtctatgtttcgattgcttgatactcttgtttcacatgttcatactctggaattgattatagattagtgtttttacagttttaatg

SEQ ID NO: 902 - DNA, 3000 bp, Unknown
  misc_feature (1)..( 3000): cDNA_ID_2128157_gDNA_ID_1620335_Annot_ID_153759 3000 nt of promoter + ATG
ctgggaaaagtataatacgtctacgggcactgcttacattgataactacatcactttggaggcaatggatccgtcctgcaactctgtcttctcttttcagactgtgttcagtgctgctggatgttataaccaagatacttatcatgtacaagactggagggtcttggcctgcagaccaacatgtacgtatgcttttcttctttaccactgtcttttctttcgagatcaatcaccagagaggactaactgtttatagagatcaggtggcaagtctgtgaatgaatattttgaccggcatgaggcaatggatcccttctacacaggtaaaatgcccaaatggttgtctgatgacgccttggcctttgacaacaaaaagtattacgtggtaagatgtccagaactggagtttaatcttcttttttagtttgagaagcagttagaggtgaatgcatttttgtcacaggtgcaagaatcagacttgcatgagaatgactggctgcttgtattcatggaaatggtattcttacaagaaaaatcctgtaagtccttgaatttcttcttcttctttttcttcatgtttcttttctcttacgcttgcttgccagtgtgactttaggaattgaaggtttccccacccttggagatcaacaaggtagttgtagaaactaaagaagattacataactgaggcgcgtgagaagctccacgcagagaatgcaatcttctacataagttacaagtatacaggtgtttcttcaagtgatcacaaagctatcataaggaaaaccatggatggggtaccagaacacatgagtcttgaaattgctttggtaaagtaagtcgagaacaagaagaagaagaagaagaagaaggagaatagacagacacctcttgtatgcatctggtctgttgcaatcaattattaagcgctattcaacttttatcttgttatatgactatgcacgatgtgtaaagataatgctgggatctatatgactatagcgagttgggatctatatgtattttaaccttcgctaactgctggatatctgtttgcaatgcataatagtactttgtatgataagttgataaccaataacacaagctgtaccaaaccgtggaggttattgatatgatcagtatgtggaaaggcaaggcatagttaaatggtaaagagattggcccaggagttctccaaatgacgaatatgttaaaaaatccgattagaggcaagcaaattcgtgccactggtcactggatgtggagagccatctctgagatggtaaactagaaagccattagagttctcagatttttcattgtttttttggctaaggtatcgtcaagttccaggtacgatcatgaagatttgggattcatatgctaccaagggaaaccaagcaagatatatatatatatatatcgtttgcctagttaacacaccttacattttttaattaggaacaccacaagatattcatttgttaacataccttacatcatcaagctatgtaactacgacatcagaactcattctatctcctcaatcaccacgccaccaccttttcgaaattgatctttcttcttcatttctggaaaccctctgtaatcgttgagctcaaccaccgagttcttctctgcccttacagatggttccagagcttcccatacttcagaattctgctcattgacccaacacatcatgtagaacactttcctctctgcaagctttagtttcttcttcagatcacgccctgatgatgattttacttcctttattgcaccaagaatcaacctttggagatcaccgagcagacataccatagctccagagccaagagaaagaaaacaaatcacatcatccaccagattcaatccgaacttcagaccaccaccaaggtttttataagctgaagagcatgtctgttccaagcaaaaggacaacacttcctttatggtctctggttgtccattgtgacccaaaactgatgaaacagtcaacaccattgttgctgcaccaagcgaatcagattgccactctccattatagatacggagcgtaaagcaataactatatgcaatgtcaatcaaatggattggtaagagaggagatggattcgtggaggtaagcttgcttagtgagatcaaaggtgtatcaggccctcgtgggatttcactcacaactgtggtctcttcttcgtcttcaacgcattgaacaagttgtgtacctccgagtccaagattgatcgttcgagctgaagcaagtaaccaccaaggatcccatggttggatcattttgcttaattctccagaagctaaggctctttggaatccttttctctcttctaagctcaaatcatcaagactcacttcatctccgttcattatcttctgaataatctcctccggtaagctcaaaccttcatcatccgtgatgctatcaattcccccatcatcttcctcttcttcttcgtgaaaccttttcaaaatttcgagcatcttccttttcgtttgatcatcagatcgaacttgcttcaattcatcgtttacattatctctcatgaatgattcagtacattggacactgtgagatttgtaacaaggaagggaacagtaccggaagttgcagcgaggacaagtgtactgcgagaactgcttattacatacatggcagataatccgcgtagaagaagggtttaacggagacgaatttgaactctccgacgaaataatcgtcttctccggcatcatcttcagaaagctattccaaattagggttttgacttttgattgaagaagacaggtctagaaacttacatacaccaattttaaaatcgagtttgggccgaattatggaccgtactttgggctatgggccttcattttaataaacaggtcggatatatccaccggacccggaatgatcgtcttcctcagtgttgtattttggctttcctcattgcttcctcaatctaaggatttccatgaacaaggaactaaa

SEQ ID NO: 903 - DNA, 3000 bp, Unknown
  misc_feature (1)..( 3000): cDNA_ID_3059531_gDNA_ID_1620336_Annot_ID_153782 3000 nt of promoter + ATG
ttttggaatctaataacaaaacaatctcaagtatcttttgaacttctcaacggttacgttttttatcgcaactttcgctcaattatttacggtcattgttttacggtagtgtttttttgtcgtatattttcgttatttacgggttttttggacagttatatttgttcaactacagtcgtatcttttctgttttgaccggttgcatttttcacaaaggaaccaaaaaagtttcataaaatttatttttaattgttatagagtttaaatattattattataaactttttatagaatgtaaatattatgaatactttaaatattttaaatatttataatgtttaaacttcttataaattcttataaagttaaactatttatattatttgaatgtcattcaggttttaatattataaatatttaagacgtttataaagtttaacaaacttaaaatagttataacagttaacttttagtacctctattttaaattatatgatgttttacttaaaagctaacaatttaagacaattatttatttcgttaaaaatatcttttaatacttgatttagcaaactcaactaatgatatgcaagattgcatgatagaaataatcataactcataagtcataagataccaaatcatttataaattgcatagaaagttgtataacatcatatataatgaaacaaaataaaatctctaaaacatcctattgagacataaaccggtttaatcgggttcgttcaatttgataaacaccgatgattcgattctaagggaagaagatctctctctactacgacaagctcaactctttcgttttcgagaaaccaattccaaagatcatcctaaacaattcgaaaccacaacaatgttcaacaacaacagtgtctcgatctcagtatctgacgacgaatctaacgatttgaatcggatccgagctcgtacccgacgaaagcggaagaaagtgagtcacagaaccagctacgagcttcctcgtcatgttctaaggctttttgtgagatactgggtcgtcttagtttttcttctcgctgttgggttgcttgtatttgaatcaacgaggatcggattcaaatctagtgacttgaagaaaccagatttgaatgggaaagagagtcctagtaagaaaaatgaaggaaatttgaatcgattggatcctactaccaaagttattggtggtgttagacaacgtaagcttgattaatttgtgaagttgtacaaaaaggatctgaattttgagatgattatgtacgaattggcttatgtggaaaaagagtgttactttaatttgctattggtttgtgaaaacttgggtattgtttggttttattcgttctctgatgtggaatgataagttgatagttcaagtgtgtgtggattgtggaaaaaggacctgaatgttgagatgattatgtatgaataggccatgaatgtggaaaaagagagtgtctttaatttgctattgattggttaaaacttgggtattgtgtggttttatttgttttgtgtcgtggaatggttattgatagttcaaatgtgtttggattgtggaaagaggatcggaattttgagctgattatgccggaataggccatgaatgtgggaaaagagagttgctttaatttgttattgattggttaaaactttggtattgtttgattttatgtgttttatgttgtggaatggttaagttaatagttcaagtgtgtatggattgtggaaaaaggatctgaatttttgagctgtttttatgtctgaatgtgggaaaaaagagacatctgtgataaaatttgagtattgttgtgttttatgagttgtgtgtgttgtggaaggatatgttgatattgaaagtattgtatggattgtggtaggttgtttgaagcttttaccacctgaggagcttgagcatcttgatatcttagagcgtaaagattcaggctctccggttaagagagttgtgtatctaactgatacggatgtgtcggtgggagaaatgagaggtgttcgtggtaatgggacgcggtttaatttattcacggggaaccagacttttgctgagagagaaaatagttttcaggtcatgatttggtaactctacaaggcttaagaacttgagtttcctataattttaggaattttttatatggatcttgaactgagtattggctttattgcatcaggtaagggaaacagtttctttgcattgtgggtttttcaatgaaaatgggggatttaggatttcggataaggataagaagtttatgacatcatgtgaagtagtggtctcgacgtgtgcgtttggtggtggagataacctttatgaacctattggaatgtctaagacatcaagtcaaaaggttggtcactctgattttctcctgtccactgtttctcttgcatatcgagtacggagtttgaacaaatcgtgattctctctctgctgcatccaatcctgaatgagttttttggatgcaggtttgctatgttgcgttttgggatgaagttactcttacaacacaagaagcagagggtcataagatcgatgagaatgatcacattggaaagtggcgtattgtgattgtaaaggatcttccttttacagaccaaaggcttaatgggaagatcccaaaggtactactcatctacttcagaggcacatgtgatgatttgtactgcacgtagcaatcttattcgctgggtgttaaacgtttctgattatgcgttcatggtactgtgtaaaatgtttccattacaaccaaatttaaccttctttggttttcattttgtgctgtgtaaaatggtatgtgctcgatttgaattagctcactgttgtcttttttttttccttacatcttttaatcttgtttaaatatggttggagtcacaatatttgagtttccgttttgctttcaagcacatgtatgtctgatataagatgcttcataatgatactaatgaatctacatgctgtcagatg

SEQ ID NO: 904 - DNA, 3000 bp, Unknown
  misc_feature (1)..( 3000): cDNA_ID_3059514_gDNA_ID_1620336_Annot_ID_153797 3000 nt of promoter + ATG
agctttgtggaaacatgttattcatgatccgcttgctcatttgtttgctggagagacacatttgagaaacctacacacaaagattcagactgaccgtctcaacaatgctcgagaggtttctggtgtgatcctagccgttcgaactctctggtttgacacaaggattcaagctgctctggagtctttccacggcgatgcagcacaggttgttctacttggtgcaggtttgttttcccctgtttagacattttaacttatgtgtgtatatatatatgtggagcatgagtttaagataagtagccaacatagaatgatgtaattgaatttcaggaatggatgcaagatcatacagactaaactgcttgaacaaaagtgacgtattcgaagtggattttcaagatgttttggaaaccaaagcgagcctagttcaagctgcagtaaactctagagatgagcttaggatgacagcgaaatcactagtcagagtagcaattgatatcagagacaacgattggtttgaacagcttaaaaaatcaggttttttgccagagattaacacggtatgggttctcgaaggtattctctattacctgtctcacacagaggcaatgcaagtactaaacctcatagctgagaagtgtggactaaccagcacagttctcttggcggatttcatgaacaaaccatcagctacacttccaaactctgtgttccacttttacagtgactggcctgatcagctcttaccaactttgggattctctcatgtcaagctttcacaaataggtgatccagatgcgaatttcggtctgctccacgatccacggaatctcttcaacaaacttctccgcctgccaaggactgcacaaatccatccagatgatggaaaaccatgctgccgtttgtatttggtcgaagcttccggttcaccgcctcaagataaccaagcgagcttgtaagctccttccggacgtgcatttggcactgcacgcttttgcagaacagatatatatgtgagtctttcacactagagaaattgtgtaggaggttaatgtaatttgatgtataaacgattgatatgaacaattcattatattctaaactctaaagttctatatttctatctgcttgaaaattacaacgaagaaagaacgcttgtcatgcctttcgataactagcatgatcgtccttccttactgtaactcaaacgatgaatgaagctcagcatcaagcataagagtatattcatatagaacgagatatcgtctctcacttagacagttgtaaaaaaagttggtacacctattcagccataatgatttcacaagaagaaaaggaagagagaactagacttcatctcaaatctcaagacagtctttgacacccttctcaaatttgtcaagataagagatagtctctgtaaccccatctgcaactttttttctgcaaaacaagttaaaacattgtactgctttagtgacatgagagataccaaatcatcatacaaatatagtttcgagtaacagagaacacatagaagaaacggatccctttaatcatttcaatcactaacctatcagaaggaagattcatatcaaccccattcgtcaacacgataagggaaccgaaagacctgcgatataaagtaagtgcaaaatcaacaaacaagaaccataaatcacagcatttgcatcacatttctataattcaacaaccaatttcattacacatttcaatagagagtcacactagcacatacctaacaagatcatcaagtatattctctgcttctaatttaactggatccttatcatcaagtaatgaagcagcattcttcacaacaagcttaaatgtacaaacctaatcaacaacatcatcatcatcatcataaaaatcaaaactttaatgtcattcataactaaaacccaaaactttaagatcaatttaagattctagaaacctcaactccggatttagattgaaaatcaacaagagagcttctttctttaggaacacaatctcttgcagaagacttaaacagattctgcagattctccaaatctttctctgtataatcagattcactagttaacgaaagataagcagattgaagagcttgacgagttgcatcaatgggagcaagtaagaatcttgaagacttcttcttctgatctttaagccactctttaggtcctgctgtgtgagaaaattagtttttttttcaaaattcacaaatttggagataagatcaataaaatgaagagtgagtgagaagtgtgttgtgtacagattcctaaggagaaggcgaaagcgggattggtgggggagagagtgaggagaagagaagtggcggaggagagaagaacggtggcgtctcggcgagagataatctgtggcaggtggtcggagatttgtgcggcggcgattggtggtggtggtggaggtttagtgtttgaagagaagaaaggttgagaaattgggataagacgagccatggcttaacattaacgagctaagttatgtgtacccgctcatgtggtatttaccaatggtttcctttttgaacagatttttgtcttgtttttaaacacaaaacgacgtcggtttgtgaacataataaaaatgtaaatgttgacttatctttgctaaattggtccgtcagctaaggatgtaccttatttagcaaaattaacgaaaattaacgatttaattgaaaatcaactaaagtttaaaattaaagtcatcctactcaaaattggtgctttgtttcaccacttttgataaactggtgatggtttttatgacattttttccagtaataaaaggggtagttatgcaatttagtagaagttaaagggtttctaaacaaacttaaaaaccaaatttttctttattgctttgctcgagagtgcctgcaactgcaacagttgagattttgagcgtgtcaaggattctgattgataacgatattcaagttcagcaatctcattgcagtagaaa

SEQ ID NO: 905 - DNA, 3000 bp, Unknown
  misc_feature (1)..( 3000): cDNA_ID_2128402_gDNA_ID_1620336_Annot_ID_153802 3000 nt of promoter + ATG
ggcagttgcagctatcaaatactccttcacaatcttcaagctttcatctaaaggtaaagcatgtagagacaattccgcctccagtggcttaccttctttacatataggacaaggctggttgattaaatcgtaatacgaatgaatcgctccttcaatgtctaatttgtctagcttctgaatttcaagaagtctatcaagaactcctgagccatagacagcgtcagatactagttgtagaaagcactctgtcctatgaccgtcttctgattgaatgaagcctttgagagcatcctcaaaggcatacccgatttcggggctggttctcccggtgctttcacctgaaccccctaatatgagagaaccattcaagaatacgcggaaattgttttgaggagtggaatataaagcttttatagcttccaaaacactctcttttgatccagagaagagatcaagaggatcgtactcgctttcttcagatatctgtagaatggtgacatacttattagacatttcagcaaatcacaatctatagaccattaagattttatactaacaatgacttgcttttacctcgttatattccaactttaagagttgatgcattttgaaacggcttacgcttgttttgagcatgttttctttacctatgaaccttgaggttggaagaaatccgcatttgggctacttcatggaattaaggacagtgagtttaggtcaagcatgataaagagaaaactaaaacaacccagaggatttatcaaacctttatttcaacactaatgcaatcaccaccgctagaaatacctgacacagataacaccatatagttacgactaatttttatgatcatgaaaaaagtccgatttcttataataataggttaccttgagaaaaaagtgaatgatcattcaatataagggcagaatcatgactcgtatcaacatttgctgcattaacacgccatagcggacgctgcttagttactttcttatcaacacactcaagaaactccttggacacagaaacacgtacctacaatactctaatcatcagcttaccaagaagccataagtatctaaataaaaccaacaaagaccatttgataatattacttactccagcatcaacatgtttaggacccaagagtgggatgatcacattcttaacatatctttgttcaagaacttccttgtttggtgatgaaatcagctcattgttttctctccatagatgttgctcatcgcttgttaaaaccgaaacaacaccattcgcattcttgattgctttatcattcctccgagccttctgtatacgaatcactttcccaacctaatcaaagttcagagataatgtaaaagattggtcaaacttaaacaaaccaaatccaattctgtacaaaacattttactgttgaacattgtgttaactctttagacactaatcaatctgagaagataagaattataccaacactgattctgattctgattcttcatagaagaagagagccactaaaaaagaatctatatccaagtttctaactagagaatctaaaccaaacttttataaagctaaaaagtcaatgacggcgagaatctgaactactttttttcaaagttcatcagacttgctttaacttttacaggattcaaaaggaagagagatcgaagaagaagagactaacaaaaagtggagaagatccagcgtaagcaagaacgagattggcaccaccttcgcctctgtaaatccaatctgatgcatctttctcctccaaaatcatctccatgcgatacaaaattcttcgatttttaaaatcgaaatcaagcgaagatctgatcaaatcaattcaccagaattttgctaacgcaatgcaattgaatagagaacgaagatttctagtggttgaagaagaagaaggagagctttgaagtattcttctctctctgcgtcgagctcaaacgtggtggtggactacaccaaagacgcttggcttactttgtctctctgtttggaggagagtcaaaattaagctgacctcttctctgacgtcttacgatacaacaaattgaaaatacaagagttatattgattctgtgttttagaatccacgtggacgaggtaaccaccacgtgttatttcttactttatgagattaagtgattcactgtccttctaattttattttattttctttgcgaaaactggaaataaataaatttttgaaaacaatattttaacatatcaattatttttataataattcgtgaaataataatgaaaaagctgacatgggacacaattggataattacatcttttaaagttttagtttatgtattttatgtaaatgcttataatatttagattgcaataaatctagaagtcatatttataaattaatatgttttataattttacaattttgtaataagaaactcctaattcataaatctaaaatataaacatatttttcatttaagcttttccaagatttataattattttaggtgtctgatttttagatttcaattaaaattaaaatattacttaagtaaaatgtatttctgtatatattctatcaaaatgttaatttgtttagacaaattttgatttatttcgtaaaagtgggtggggaacaaaaacaaaaacaaactgaactgaagtcacccacacgtctcaccaaacaaatcgaagtcaacgtatttcacccaccggtacaacaacaaaatacacacctaaggaaataataaaatcaacttaccagattgttacgtaccacacatctctttagtccttcgtcaaccaacgttccccacgtgcttctccggttggtactcacgtgaccggcagcttctcgttcttattatctgttttcttcaataacgattcataatctctagtgtcttatttataatgtcttcacatcacaaagatttgtaccgaacatacatagttgaatctttcccaaagcacaatctatcatataaccacaaaaatg

SEQ ID NO: 906 - DNA, 3000 bp, Unknown
  misc_feature (1)..( 3000): cDNA_ID_2128406_gDNA_ID_1620336_Annot_ID_153803 3000 nt of promoter + ATG
aaatcatcataggttgttgtaacaaatataacttgcaaagttcggtcgattcaaagacagcactctttaaatacgtaaataggttaattcataccgttacaatcacacgcgatacaaaatcatttcatatcatttgccaatgataaattatgattaacataatgataaacccaaatcacacctccaatagtaaaacgatatgataatataacagttgaattttctaggcacacatctgttgtgctagcatgggagcatcggttctctcgccggttatccccgtttctgtcttgttacatggcttcataccatcggttaaaccatctccggttttgacgtcaatgttttcattcttagtcttgatctccgatatggattggtacgataatgaaaccgggagaaaacccttttgacgacatgtctcaatagattcaataaacatttcctcgagactatacttgaagttaaaccccatgtccgtcagcttcttggaactgaattcaatgctctttagattctcatcaacaccttcaaacctgttatatagagttttgtttaggacaaagagattatgggccaaaacattttggttgaacaaaaagttcaggcttaaacgggtatatcttacgttgaaggtacgttatattcggggtattttggcctgagaaatttggagatagtaagaatggttgcatcatgagaggaacaaatataacgtcccttggcggctgcttgttcgtataagaagatatgagcgttgcataagtcgtccaaatgcacatactgtccttgtcttatgatcgagtaatgcgcctcgttccctaaaacattataatatattcaacgttttagatttaacattttcacatttccaacaaaagaagaagcacacacacgtacgagtgataggagagagcgcggtgataaggctaggcggcatagacgttgtgatgaatggaccgaccaccaatgttggaataatactaatgaaatctaatcctttctcttcggcgaaatcccacgctgctttctccgctaacgtttttgacacgaaatacatctgccacacaaatatatatgaactttaaattacttcaaaaaaccgtaacttgagtttaattaatatgtatattcttacccatcctgtcatctttttggacatgataaactcaagatcactccaatcattttcatcatagacattcttctgatgttcttctacattaacggttccggcagatgaagtaaatacgaatcttcgtacggtctttgccttaacacatgctttcattatccccaacattccattcactgtcggctttatcacttcgttctgattcgcaaatacaaaagtcaagttaagctaggttgacgcaaaaaccaaaagaagtttcctaatatagagaaactcacctcaggatcttttgattcaaaatccatgggtgttgccacgtggaaaacaccgtcacatccgtttatggcatcatcgtagcttccttcctcagataaatcagccttccataaagtgagtagcgtcttggcgtttggcaaatcaagaagatgttgtactttcttcaaattaccttgacaatccaaaaaaacccgtaaataaacgttatattaatatacataatcttaggagaaatgagtttgtaagaacatatagatatgtaccgggatctcgaacggtggcacgaacaaagtaaccacgttctagtaatcgcatcactagccatgaaccgatgaaacccgaagcgccggttacacacacggtctctttctgactaaccatttttgtggttatatgatagattgtgctttgggaaagattcaactatgtatgttcggtacaaatctttgtgatgtgaagacattataaataagacactagagattatgaatcgttattgaagaaaacagataataagaacgagaagctgccggtcacgtgagtaccaaccggagaagcacgtggggaacgttggttgacgaaggactaaagagatgtgtggtacgtaacaatctggtaagttgattttattatttccttaggtgtgtattttgttgttgtaccggtgggtgaaatacgttgacttcgatttgtttggtgagacgtgtgggtgacttcagttcagtttgtttttgtttttgttccccacccacttttacgaaataaatcaaaatttgtctaaacaaattaacattttgatagaatatatacagaaatacattttacttaagtaatattttaattttaattgaaatctaaaaatcagacacctaaaataattataaatcttggaaaagcttaaatgaaaaatatgtttatattttagatttatgaattaggagtttcttattacaaaattgtaaaattataaaacatattaatttataaatatgacttctagatttattgcaatctaaatattataagcatttacataaaatacataaactaaaactttaaaagatgtaattatccaattgtgtcccatgtcagctttttcattattatttcacgaattattataaaaataattgatatgttaaaatattgttttcaaaaatttatttatttccagttttcgcaaagaaaataaaataaaattagaaggacagtgaatcacttaatctcataaagtaagaaataacacgtggtggttacctcgtccacgtggattctaaaacacagaatcaatataactcttgtattttcaatttgttgtatcgtaagacgtcagagaagaggtcagcttaattttgactctcctccaaacagagagacaaagtaagccaagcgtctttggtgtagtccaccaccacgtttgagctcgacgcagagagagaagaatacttcaaagctctccttcttcttcttcaaccactagaaatcttcgttctctattcaattgcattgcgttagcaaaattctggtgaattgatttgatcagatcttcgcttgatttcgattttaaaaatcgaagaattttgtatcgc

SEQ ID NO: 907 - DNA, 3000 bp, Unknown
  misc_feature (1)..( 3000): cDNA_ID_3059506_gDNA_ID_1620336_Annot_ID_153800 3000 nt of promoter + ATG
tcatcgttgattatacgtttgataccattgttttattaggtaagatcaatatgttagattaattgaattggtggatttttaattgactttagtgggtgaatttcttgtgacaatgagttttaacaaatatgctggaataaaaaaccgaacctgaattgaaaccaagtcgaggtttgattatttcgatctaagttttggttattagaatagataaatcgattgactaaagtactactataaaataaatttggtcatttcatgatgtcaaataattgaaatcaaaattcatattcacataagaaatagaaaagattgcaatatattttttttttttgcaacccattattttattaaattatatatggagattattcgtagaaaacaaataaatatcaattttaacaattgaaactgcagaggcaggcctgatctattggatcgaatccaggtggtacacacaatccttgaactcctactcttttatacttggtaccacactcccagttacactgatcaatttcacagttttctgctttaatataaacatgacatgtacgatccttgcgtctcctccatcaccattcctaataatacatatttaaaatatatactaatcatttcaattattttttgttataaaaatattaaggtgatgaaaagaaaaccatcaaataaaaatatgtgaagaaacacggaatatttaataaatattgaagtgtagagcataccaataaccaaaacaaccataaaaattgtaagagatgtgtttttagtcatctttgatgatacaattataataaaagtaatggatgtaattgtattgtgaacaaagaacaatatatatagattaattgaatgcatacatttatatttacaaaaatatcattaattataaaaaaaaaatagaaataaatcagttagtaattaactaattaatgcttgaatttgtgtttaccaaaaaaagagagcaaaaagatcagttagtaattaattagatgctttttttgtcattagatgcttgaatcaggaaaacttacaaaattgaaaacaaatctagaaagtaattataagtgaaaacatataaaaacgttataaatcatagtatatgctaactttaactaatctatataataaataaattaaaattttgaaaacaaatcatcaaatatcaaataaagaataattcttgggttcacttctagggggtgaacctaatttattcaccccctctttaataacaaatcaatatttgccatgttatttgattaaaaaaacttaaaacaattaatattatcaaaataaaataattaaaataaatcattaaaaccccacttttttgtaaatccaaaccgatatataatctcgtttaattaccaaatctaagccctaattctcctttataaacccaaaccgccatttagacttatttaatcgttaaaaaacaaaccataatcgtattttctaaacccaaaccgacatttaacctagtttaattgtaaaatctaaatatgtttataagcccaaactaatatttaacatcgtataatcataaaatctaaaccctaatcgtattttgtaaacccaaaccgatatttaacctcgtttaatcataaaatctaaactctcattttttctaataaactcaaaccgatacataattttcttttagtggcaaattagatttaatagttaaattaattttttattattattactagtttgttagttgggtttaaaagtttcatcaaaggagatttcataattgaataaggtaagtgacgattttaaaatagcttgtttttagaagtttttcgttctaggtttgttcttattgcatgtagctagttagcgtcatgaactagtaactgatcttagggagataaaaccacaaaagtgctgaatttatttacttgatctaacatacatagactagaaactacgttataacaatacaaaagcttagttgtagagctttgtttgtggaggtaaaggaacttgatctcattgggtgattgattttgtggctacaacaaaaatctgagtagttaagtttttatcgatgctacaaaattcaatcccctagtcatctgtgattccagtttaaggaacttgagctaaactgaatatgcttttgttaatcttcttgtatgagacaatatgaactttcgcgatattcttaaagactcaacgattaattatcatacagttgataataatagtcgaaaataacaatcgttaccaatccacttctatattatgtataaaatgattaaaactatattataaaacaaataataattcaaatttaaataaatatttaaaaatcaaaattctattagtgttgtacaagcacatgttatgatctacttcatcactatattcgtcaaaactaaaaatgtatgacttttcagctgtcataaaagtttagaaatatacaataaattaattttaagatatcaattttaaaaatgataaatgttctaaaattttaaataggatcaatcacagagactttttttttgtaacaattcaaattatatgattactaataacaaaatcgcaaagttttatatttataaaattaattcatttttatttagtttcaaataatatacaagaatattcaagctagtgtgctctgttttgtctaatgtttttttttttactgagaactattgaccaaactcttttgtacatatttaaagattcttaaacaatttcacatttcatcaaaaaaaaaaaaaagaatatacaaggattatcctgtataaaaacataggcctaaagtctgtataaaacatatgcctaaagtcttagcccaataagctagataccgagccaatacaaagcccagaatttaatagaagcccattaaatcgagagagagatcgagagcatccatggcttgaaggaaaagaaaagttttgtttctgaactttcgtctctataaaccctttcgacgacgagtgaagaagaaagcgagacgaagaagcaaagatg

SEQ ID NO: 908 - DNA, 3000 bp, Unknown
  misc_feature (1)..( 3000): cDNA_ID_3011905_gDNA_ID_1620336_Annot_ID_153793 3000 nt of promoter + ATG
tatttcaaatgaagcattgtgcaaagtaatgaagcgaccagagattaagaaagaagatggaaaacatgatctgttactcaaaagttacaatgacagtaatgagaagaaagcagaagtagatacatgcatcaaaagttctcaagtttcaggtgttgagcataagaaagagatcaaagatgactcaattcttcttattgccgcagagagagtcccatgtcaagctccatcagaaaatgtaagcttactatttgttaacttcacatatataccatctgtatatgttagttctaatcggtgttggatgttcataagcagcatcatgggcgtatgttcacaaatgggatggatcaacaagctccaataccaaagtctgatggaaattcagatatattatccaagacagtatataaaggtaagaagcaaataatgaacttttggtttgtcttgttattaatctcattgcacatttttaaaaaatcactaataatcatttcgagcattatgtcaagattttgttttgataaaaatggaactaaaataagttacaattatttcagaaacaaaaggggagatagaagctggtttacccttgttggagaagcgacaagaacgccgaaaacgagaaacaacagagacattatccgaaaatgaaataaacctaaagaagatatttgtgaaaagccaattatttctagacacagcaaaggcacatttcaaactcaacattcctcaaaatgtctttcatgacaccaccagtgggagctattactatcaagaagacaagaatctaaccctcgagtgtgccttcgagctaatgaaacgaaaaaggagatttcaagagttaagtgtccatcctttcgtgaaggtacccataagttcctctaaaataaactcattggaccatcttattagacaaataagcaaagagttagagaagctgagagcctacggtagagactgccacattggatcacatgttgaagactacgtgttggaaagagatgttcactataaagacccatacttgaactcaatgtgggacatgggttggaatgattcgatgctcgcgttcatcgagaaagatgatgttatgagggatatagagagggaagtcttcagtggactcttggaagagataacaagagatcttatatgcatatagccgaaactcttctttctctccgatttaaaagtgagctcttgttttaggtgattagagtgtcttcaaacattaatccactccgttaatgttttgtctgataatggttttgcttttctttttattctactactcttttggattaactatcctgatatattgcatggttaataagaatggatgcgtatttgatgaaaaaacgtctactcattcatcataaacacaaaaagctaagtatctatttctcaaattctaacttcaaactatctaacttcttaattctattattatatacttttaaaactacctatttcactaaacttccacaacttattcttagcttttgtatgagttttatcctcagttttctatataggattttgaaaattcgttatttttattcgtgaagagaatgtacatactttgagatcaatctagctacaatagcacaaaaagataattgaacttgataatgtatatttgatggagaagttaacttgaagaggaccgatgaactttaatttcatcccaaaacaattaagtaacaaaagttatgttatagaaagaacattttggggttttaataacataaatttggggtttcacgaattaagaaccatgaatcggttaactcaaatacgataaacgactgctaccagtgaccagtcaacaatgttttggaagttacgttaatatacaaaatgattcaaacaatcgaaatttgaaatttgtggttcaaatgttaggccttttgtgcttttgttttttaataattttctcgtctttttgaggaaaaaaacaaacagtagtttaaacatgctttatcttttccttaggccacagcaaaagcgacttcttcttctttaatattattattctttttccatctttgtggtgtgtgttggaatgtctaattccttcctctcctcctccaccaccttcgatgcattgctccatttcttagtctagaaggaaaatctagttttcaaaaaagccctgaatttcttaaactagttaattacatgtttaatgctcttcattaagtgtgggaaaatccatttattataattctgtctcactttttcatgtaactaattaacgaaagatactttagggtttaattcccctttattgtctcttttaattgtcatgcaacacgtacttatacactgcaatgatgtagtattttgtatctttatctggtatatttgaaatttcaaatactcccttctaaacaaactattaaatgaatgtcagaaatatatatatatatatatatatatatatatatattttcaccaggtacgtttgaaatttgaaaatacacagctttaataaacaaactcttaaactgtatcagaaattgttgattataaaaaaaaaaaaaagaaaaaaaattcctagacatgaataatcaagagtttttttgttttcttcgttaacaatcaagagttctttgttatatatattgtttaaagtactcttgcgagcgctctttatggataatagatctagtagtcttcgtttactaattctctctcacaaatccaaacaaaaaggaactgtgtacttaaatcctgtaatgacaatttcatacatactaaacaagaactattaaatactaggataatacatacttgaagaaataacaactcttcatgtagtcgtgtctttttacaatttaaaatttgaaaaataaaagttacatttacctttacaacgtcggtcgttttccacacaatagattacccacttctactcgatagttttctctataatatagagacaaaagaagagagcatttaaattctaaagaacaaaaaaggaaaaacagagcagcc

SEQ ID NO: 909 - DNA, 3000 bp, Unknown
  misc_feature (1)..( 3000): cDNA_ID_1411707_gDNA_ID_1620336_Annot_ID_153783 3000 nt of promoter + ATG
aaccatgaacaacaagagcttcttctagaccgccatcgacttcattttcacgacattgtggcggatatacaggtcgaatcatcaagcatttctcgtttccgccttcgagttgttgaaatacttttgttgaatgtatccctgtggcactcaaaaacgttaagagatttacaaataagcatataacaatggtgaaaattaaaagtaccttctcctggataatcaatatactcaacatcaaagaataatgctttccttttctgaaatatcttcagaatctgataataatgatggtttaacatcaatttcgattgcaaatgcagaaattaagattaagcagcaatggagatttagagtaccttgcaacgaaaccaagcaccacgaaaacccaattcaaaagatttcaattctacagtttgaccaacttcaaatggtagattcatttcactcatttttttgtcaaaactgtgaactgcagcatgtattcggttcaaagcaaaacagaattgtaatctcagcttcatataatgtcaatatctcatcgattacactagtctaaacccagaaacttgtcgagaatgacctcaaatcagcatatcgagaactcgaagaaatatatcaaatcagctcaaattagtttgtggagaactcgaagaactcttccaaaggttcgtcgtgtggtcgagatgaagattggatttagggtctcgacatcgagagagtctctcgtgttgtgaatttggtagattctggtaattgataaaccctaagctgaaacgacgtagttttcgtttagtgaaacaaaactaattaatcaggctacccgttttaacattcgttgcttgtcctaaacgagaatgatgaacagtagataaatgaagacacactcttgaagatttcagctcgatttggggataaggaaacttttgtttttgcaacatagatttcatttctgcatttagacaaaaaaaaaaaaaaaaaaaaaaaaaattcgtttctgctctaagattgggctaggcccattacagaagatgataagaccttcttggcatgggaatctactaaattgttttgcaaacgaggaataaaaacacatctaaaaacggtaaaagaagaggatagatcaaagatatcaaagtgaattccatggagctccttgaattgagtctccgaattgatggttttgacgagttgtgaagagttagtagcaaaggtaagatggttgaaaccgagttggcgaacttgttttatggcaaagagaagcgccaaggcttccgcttgtagaggagaattgacatactccgcatagccggttccaccataaaatcttgatccatgttggtttttgaggatctatccaaaacctgcacgatgatcatccttccaggttgcatcagtattatagataagagtttgagaataagtaaacttattgttataatttaataataaaaataatctgaataaatgtctttcgctttttttttggtagtttttattaaaatattttcagttatatttttgtggttgtatctttttataatatttattgttatgttttgaacagttattttgttcaactaagttcgtatcattttgcatctcaaattctgaatagctgcctttttttatcacaatatttctttcaagtatttagagttgtatatttttatcgcatctttacattaaattatatacgattatttttttctgacagttatattaatttaaatacagtcatatcttttcagtttacggtttatctttttatcattgagttatatttgttcaactacaattataatttttttagtttgcggttgtttctttatagttgcatctattcatttaaagtaacgtctctttattatatattttctgcttttttcacaacttttcgtatgaataaagtagtttatttaaatgttcgtgagttttgaactctatatatttgtccttcttcctaaatagttctcatatttttgttccttcacaccgattatttatgatgaatccaaatttttttttttgtaaaatggatctaaattctttactttcgaagttattttaaatatacatcattttaatatgaaagaaatttctctaattcttagtctaactaaaattttttggaatctaataacaaaacaatctcaagtatcttttgaacttctcaacggttacgttttttatcgcaactttcgctcaattatttacggtcattgttttacggtagtgtttttttgtcgtatattttcgttatttacgggttttttggacagttatatttgttcaactacagtcgtatcttttctgttttgaccggttgcatttttcacaaaggaaccaaaaaagtttcataaaatttatttttaattgttatagagtttaaatattattattataaactttttatagaatgtaaatattatgaatactttaaatattttaaatatttataatgtttaaacttcttataaattcttataaagttaaactatttatattatttgaatgtcattcaggttttaatattataaatatttaagacgtttataaagtttaacaaacttaaaatagttataacagttaacttttagtacctctattttaaattatatgatgttttacttaaaagctaacaatttaagacaattatttatttcgttaaaaatatcttttaatacttgatttagcaaactcaactaatgatatgcaagattgcatgatagaaataatcataactcataagtcataagataccaaatcatttataaattgcatagaaagttgtataacatcatatataatgaaacaaaataaaatctctaaaacatcctattgagacataaaccggtttaatcgggttcgttcaatttgataaacaccgatgattcgattctaagggaagaagatctctctctactacgacaagctcaactctttcgttttcgagaaaccaattccaaagatcatcctaaacaattcgaaaccacaacaatg

SEQ ID NO: 910 - DNA, 3000 bp, Unknown
  misc_feature (1)..( 3000): cDNA_ID_2128361_gDNA_ID_1620336_Annot_ID_153792 3000 nt of promoter + ATG
tgggtttttgttttgttttctacaggttgatgttaaacgagtgcacatacagagaaggtgaaattgcaaaaagatcttatctttttcatcttttgttaaatctttgaaattagactagtttttgtcttggttttggttctgtttaggggagtgggcaagaagagagatttattgaatcgagtttatgtttctgaagaaatcagagatgaggccatttcaagagctaacaaatttcaggatgaattggggagtggttatccaagttttgtgaaatctatgcttcaatcacatgtttctggtggcttctggctggtaagcaactttcgtataccctaaatcgttagcttacattgcttgatttctgttctgtttggtaaagtccattgctagtctttacattgcttggtttaatcaattttcagtctttctaactcagtacctatgagaagtctagctagtagctatttatataacttacattgcttaatatttatgttctgttcgcttaaactccatcaccgttcttagtattgcttcgtgttactctaaaactatcgcttttgaattcgaaattgttgagataaaaatgtctaaccatgtaaactacacataaaagtttatgtgttaagtctagagaagaactattgtaactagcctaggggtgttgcagggaattgtagtttttccagctcaacaacaaatcttacattaaggttctaaggtcttggttttgtgcgtttctctggttaatcaagtctcttgtatggttttagaattgaatcttcttaaacttatctgatgtttttgtacatgtgaaatagcattagcagacagtacttctaacaatgataagctatttatataatttacttaatttctggtctgtttgcttagactctatcaccattctttgcattgcgtattacttggaaaagtatagcttttaatccgatgagtttgtgataataatgtcaagccatgtaaactacaaaatttttaattcaggacctctgaaatgttatgtctagagcagaactattgtaactagccttgggatggtgcagtgaattgtagcttttccagctcaagaacatcagctgaatcttataaggcccattctggattcgtttaaagtcttggtttgagtgtttctctggttaatgaagtctcttctatggtcttattaaactcatctgatgtttttgttcatgtgaatgttatcattatctaaccaagcaaagccattcttttggttgcaatcagggtcttccagtgcaattttgcaaatctcacctcgggttacatgatggtgtcataactttgatagatgaagaaggcgaggagtatgagactatctacttagcgagaaagaatggacttagtggtggatggatgggatttgcggttgctcacaatctagcatatggggatactcttgttttcgagttagttcgtcgtaccgctttcaaggttagtaaacctgttagttacctaccaaaaccgcaaaaaatgatgaaactgatgattgatgttgttattctgtcaggtttacattacaagagttggaagttgtggagaaagctccaaagatatgagctgatcatgtcaggaatttggatatgacctgagttagaagtttatttgcccttttgtcttttgtaagtaagatggtaactctaggctaattgtcctcttcagtcttccactgctaaatctgatattttgttaacaatattttggaagggttgcaaaaatccttgaaattttaggaatgggaaataacagtaaatttagtttgatgtttgatgtttttatttgttgttttaactcttaagagctaagttgttctaatgattaaatctcctactaaaatcgcatcactttctcctaaataatttaaacggatataacctaaagtatcgcttgatccactttagacttatcaacgaaattattaatgaaaaaatcttagtatcgagcttatctattttaaaaccattaactaaattattaatgcaagaaacacttcaagtaaaaatcctcaagtattagtacattcttgatgtgtttgagttgttggtagttgctactgatttcagcccaaagttatctcgctttcgccgtcatagatttcaggtaacatgtgttataaaagacctttaaaaaattctaaatattctttatatcatgcgttagaaaactttagaaatttgcatttgttatattttaaatatagacaaaaatgtagtatttttgaaaaatgttatcataaaaagtgttatttttgatgttcttcctaaatcatttgctcattttctatagtttatgaatgtggtgcaaagaaatacaagcttttaaatgtaaaagtacaaacttttcttcagtcgtttcttgattatatattctctaaacaaaattctcattattaagttaaaacatgttttgctaaaatagaaatcaaagctgatttttaagaatgctcaacaagtagtattttggatcggacaatgatatcatcatattagcatgcacaattcatttgaaaatttcaattttttctaagcgtaaattattgtattcatcttattataatcaatgcaacgcagtaaggcactagcagacgcaaaagagagtgagaagaggcttgaaagttaagtcgcaaaggaaagccttcgtcattgcttaacttgcaatcgaagtcaagaaacaaaaaattactctgaagggcctaacgttcacgtcaatcatccaaacacacacatgaattttttttagagtcttccattgttatcaattagatttttgctatcactactagaatactctcaccaaacactgaaagaaccatctcaaccaaagattaattcaagaaaacaactcaaaccaacaaacaaaaataaaataaaagtattgagtctttagaaataaccctaaagcaaatgttcagagacttttcttgtgtcttctattttctggactcaagagtaaaaataagagaga

SEQ ID NO: 911 - DNA, 3000 bp, Unknown
  misc_feature (1)..( 3000): cDNA_ID_2128357_gDNA_ID_1620336_Annot_ID_153791 3000 nt of promoter + ATG
acactctttaatataaaaaaatgaaaaagtccaaggagattacataagtttctacagaaaaacctcaagaactacactttttaaaaaatcgctttcaagatcagtggaaaaaaatacaaaatctagatttacaattttgttataaaattaacaattgaagaacaccaagaggaaaatatcatcattaataaaaaaaacagagagatcaaaacgattgagattcctcactcacaatgttagtatttgtagatgatggagttttaacgcatcttgtataactactactaccattactactgctactgctgctactcatcatcataattgtcttccgaatcaaaagctgtataatacaaaactacagaggagaaaaaaacattaagaaacatatgaagaagttgtaaaagcgaaaattcacaactaaaacctggtttggatcagtgatcttgtgtcatcaaccatggtgatcattcttgaaagtttgaaattacagaaaggtacatgtgtaatgttgaatcactttctttgtaatattatatatgtagagagaaatgaataatttagtacgtatagatggagacagttgcagaagaggaagatttggtgatgtttcgtcttcagcttcggtgagttttttttttttccttgatttgttttgtgtattcattagagcaaaaaataaaaataagtgagggatatcaaaaggagcggtgaaacggtcggtcgtcttcatttttatttttaaattgtttctttttgtcttatatctttaaattgctttttttttgtgtggatcaaatgatatttttaagttttaatatatatactatttctatttctgtacacaaaaataaaatattttaaccattgtcgaatatattaaaagtatagaaaatttattatgtcctttatcaatagactaataagatttgtttttctaattagtaaactaaaataataaaattaaaattgagatttggtttaaaaatatttttgtgaaatcaaaaaagtattttttcggttaataaaataataagtgcttgcaataccaataaaatagttatggtttgattggtaggtaatcacagtttttgtcaaggtgattatgagagttttttggctgttaaagagaacggttaaagaaaaaagagacgattataattggtaattagattctaacccacgttattattgctttttagaatatatttattgtaaaaatgatagtatttaattacatttgtcatttgataatcacagttttgttaaagcgagtatgtgatgtttgaaggttaaagagatatgattataattagttatagactataacttatagtcttatagataatgattaaagaatagacgatacggattaatgcgtcaatctcttggtgcagtgaatttgaaactggtttagggtgaactgaaaaaggagagagcaaggtgcttgagccttgaggtgttgagatgaacacaagttacacttgcccaaaaaaaagggaaaacgaaaaagaaaaaagaacgcaagttacgacttgacatagtataagcacatgtgtgacgtggagaacagaagggaagcataaaactaacgaagatcatatctaattattgaacattgaagagatagatctctacaatatcctagaaattctttaataatcagaaaatgatcagaaattttatcatccaattaggtttacgaggataaatgtagtcggtacgtaatccattcatttgatttttttcatagtaaaatatagcactatttcgactagttgaaaaaaaatagttagataattacatttttgtggaaagttgatctctagtctatatctacgtagttataaaataaaagaggagtggttcatatcaaatatgctctaaaaatttcatgagcgacacacatgtgtactattgtgtacgtcacaccagagttggctaaattttttcattgatggtttttgtttgaagatcaacacgttgatagcttaatctgtttctcatcgttaaaacgtaactagtcccgaattctagtttacactatttttggattgttcgcaagcccagctggcaaattatattattacatagtttcagttgatatgtctctttttcaaaattatgttcatataccctaacgatacttaaattatagctttcgcttaatgatgatggatacatcatacctgctaaatttctctacctaatcggccagtttccttttggcctaaagaattaaaagcatcttccactaaatgttatacttttctattataattgtatatataataaggaacggagatattggtaatctaattactatattagtacatcacatgcactacaaaaaagaagtattgtgggaaagagatagatccgtacagaaataatgagggaggtgtgggcatgtgtttcaccatgatgagtgaacgtggtgcggtggagttagaaacctttttgtcttctctgtctcttttcgactgtactgttgtgtcgttcaaacaattatatatatgtcaaatgaatatgttttagagacaatagtaatatttatgttaggaacatggatcggtgtgtgtgttatggatgacaagatcttgaccacgtacgtactgataacaacgaccaaattatttattttcatgaggcaatttgaaattaaacaatctttaacaaatacaaatttcagattacaatcgcaagtgagatattgcatctctggttttcagttttcccttcgccggaaaacaaagttgttcgtcaccagactcttcctctagatcgcgagtgggctacttatgggcctttgatagttgggcttaaacttttcatatgttgaatttttagcccacataggcccaaatatatgtggtattatcataatcctgctttgactctttgaccattgtttctggaactcagtgcccacacaattcaaatacttgagctccgaacggtcgtcagctagggtttttcttcactcagagagaaccaaaa

SEQ ID NO: 912 - DNA, 3000 bp, Unknown
  misc_feature (1)..( 3000): cDNA_ID_2128239_gDNA_ID_1620337_Annot_ID_153819 3000 nt of promoter + ATG
agtgaccaaaagccaacggatttctcctctcaagaacctcttttcctttacccgaaccttcgagaggcttgctcaacgctttccataacctgtctgacccgttttctgcggttttggtgtttgctttgaccgcaggtgtgtaggacccgttccatgcttcccttgattctcccccaagaccccaaggttgagcatttattacagtcccatcatacctggtgatgagatatgagttctgtgaatcaaccttcgggtacccgggtatgtacttgtagaaagcaggagagtaaataactccagggtaaaaggctaagacggttccaacatctgcctcgcctttgataaaacaaccttgaccagcgtctttgtgaggtattacagacggtttggtctcgagggtgtaacccatttgatccattaatctctgtgagacgtcattgagtttcaaaggctttgtctcgggaacaactgtgctgaagaagaatcagtgagaatactaattaagctgaaagaaaaatactgagtaataagttcacaaatcgattcaagtaaagtaaaacacttacggggctgatctgcatgtggaaaagcattattactaccaatggcgaaagtaagaccacttctacgaggaggacgagggcttgttgattgtgaccccgactcgttcctcctaacatcaggaagaaggattccatccatcaaagagcagaatttttcaacttggtagtgaatgttctcttgaacttgcttctgctgctcagataaagtggctttaccagccatctcaatgatctcctctgcatcagtctcctcagcttctcgtcccaaccggttatagctaaacacaacaagttttcatgagcacaaatagtggatgtatatacaagaattaataacttagaaggaaaaaaactagagctaaactaaagactatcgtgtgtgatggttcacaaatccatattagaaatcagactttgattcttctgagacaaaaaaaaccaaccttgtatacataaagagtttgttaacgtctgcttcaaactgcagttgccttgggttcttagcaaatgtggtactcttggcaagaactccaacagcctgcaaatgcaaagtttatcaaatgagcaacttcattagaaatttatcaataaaaaacgaaactttacgattccccttcagcctaatttcaattcttctaatcttaattctattggtgcaaatcgaaaagactaaatccgaacaaaaaattcaaactttcttcacacccagtaagagatcaaacacagaagcaagagattcattaacctgctgaaatttgttgaaaagagtcgccatttttagttttctttcctctgaaacgattctccacgctctttgtttataaggattgcaagaaattactgaagaacatcaggaatcgcgagagcttggggcgaatcaaaaacctccattgatgaagaagactgcatctagtactttacttactcggtagcacacctccatgggcaggctccagcaccatggttgggcccatttcttattaatgggcctaaaatagagcttctagggcctctatatattttgtcttttctcttccgtttaggcgttttgctaactttcttacgtatatgaatgtgaattatagttagttaactttagaactgttgagcggccaatgccacgtcctttgtacgtaaattatgttattcatgctattatttatgtaccaattttctattctaatatatattctaagttttttttgtatcaatactaagtatttatacaatttttgcaaattttgacagaaagatagtacaaaaaatatgaaagaccaaaaactacataaaccaccaaaaattacaacacaaacagaaaacggaaagaaaactcaatcgaaaactctacaagtagagaccttaaaagaaacttagattccaaaccacaaagctcaaatatttgtgtggtttcctcaacttaaaagatctcaaatacttatagttgttgccactagcaatccaaacctaggccagttttcaaaatctctaaaaaagagcttaccattccaaacttaggacaatcctcataatattttaaattttatgacattttttagttttttcttaccgaacatagagatacaacgaataacacaaaataccaaattttactaaacaaacaattactgcacaaatgaaaaagtaatcaacaacatgagctcatttcacgaaaaaagaagcgaaaaagccaacggtcttgccacaaattagtatattgcaaattacaaatgcttaaaaaaattcacagatatattcatcaattataccttttgattatcttgcaaataaatcttccaattcatattacctacgtcaaaatttagccatctacccttattatcccattatgaaaatttcaaaatcgataagatgacagacacccaacaacgaattatcattttatatactataggtattagatacctacaatttatttggtttattgggaatatacgattcataaattccctcataaaaatataaagcaaatgtggacggaagcaaaaaaactaaatatagaatggagagaaattgtattattaacttaggttacccatcgccaacaacctctcatttcctttcctaaactatttcacaattttggtcaaaaacacaatctaaccccaaaaaagattcgacctttgaaattcccaaaaccagaagcaaaacccccaaaagaaccctacttatagtgaaagaaaagtaacataataatatatatacacgagaaccaagagccacttgaatataaagttcacagtttttgtctgctcaccaaatcaaaccaatttctcctgatagccaaagtttttgtccccaacaagaaactcatgcaacattcttcacccactagctaactaacgacttccattcttattaatctctctcaattcttcatttctgagattcatcgctctctcttctctttgtcacaatg

SEQ ID NO: 913 - DNA, 3000 bp, Unknown
  misc_feature (1)..( 3000): cDNA_ID_2128276_gDNA_ID_1620337_Annot_ID_153830 3000 nt of promoter + ATG
gaacacagctcaacaaaaaagtactttaaaaagactctctttctccctctatctctctatatatatttctcactagctctttcacacacacacacactttttctctctctatctcctctctaattcacacatcaagattcaagaatcaacaacatccttgaaatgaatattgtaattaactaattctagggttttcagattcttgttttttttggttagttaattagggtttcttttaagttgatctagctttcatatacacttgaatcaggaggaagagggagccactcataagaggaagaagagagagatgggtagagggaagatagagataaagaagatagagaatcagacggcgaggcaagtgaccttctccaagagaagaactggtcttataaagaagactcgtgagctctctattctctgtgacgctcacatcggtctcatcgtcttctcagccaccggaaagctttccgagttctgctccgaacagaacaggttaacttcttcttctttcttgaattagggtttcagagatctatacatacatgtgtatgtatccatctaattaatgaggaaatgagctagatatatgactcgtgcttgagaacagacagttttcatcattagtttctgaagtagcaggtgtcatgagtcgttttttggattttcatttggcccagaagttaagaatctttgatccaatatttttgttcttgcagtatttaatttgtattttcatgtatcttatcatatttaatacgtatgggtcaaattctatatttaatttgtatttgacatttcttgatccagctttttcgtaataagaccctaattttttttacttatttttgtcacaaaaaagaccctaatttatgtagtatattaatgtgtcatatttacaacataaacatacataccgatatatatgtataagtctcatgttaatgattcaatttagtacaattataagttttagttctaagtcatgaaccagataaataagaaaattattcacatatagccataataggagaagaagggtgtgctaatagtttaagcgttgattacacaaaaaatgggtaaaacaccttttaaatttgttttctcctaaccaatgtttaggccaaaatatggattctacccttcagaacattattagttattttgatttttgtgttcctccagtgattattgaagtcttgacgtgtagcattaaagatactaaactgatcacattttcatattgaataggatgcctcaactcattgaccgatacttgcataccaacggattgcgacttcctgatcatcatgacgaccaggtatatatatgcacgcatactttttcctttgtgttaccaattgacaacgaaggaaatcacacattttcttaagaaacatatgatatattcatttgtatttttgtgtataggagcaattgcaccatgagatggaactactaagaagagagacatgtaaccttgagcttcgtctgcgtccattccatggacatgacttagcctccattcctcctaatgagcttgacggactcgagagacagctagaacattctgtcctcaaagtccgtgagcgtaaggtaatgcaaatatatgtccatatctatacatattcttttaaaactatattggttacacttttgtttgatctctgctattaatatattgaagaatgagttaatgcagcaacagttggagaatctaagcagaaaggtcactctctaatcactctttttaaactctaatttcatctaataatctgattataccgcgtgtttaattatcattaccgtgttatgcatatgatcagaggaggatgctagaagaagataacaacaacatgtaccgttgggtgagtttggttactagcgaatgtcaatacgttttcacatttacgttggtataacatttttctacatataccgatgtttctcgcagcttcatgagcatcgtgcagcgatggagtttcaacaagctgggatagataccaaaccaggggagtatcaacagtttatagagcagcttcagtgctataaaccaggggagtatcagcagtttctagagcagcagcaacaacaaccaaacagcgttcttcagcttgctacacttccttctgagattgatcctacttacaatctccagcttgctcagcctaatcttcaaaacgatccaacggcccagaatgattaatacaattctcaatagatatctactctttctttatggagacagattcatgaacttttattacctatattttgataagccagtgtcttcttttgtgtggctatggaaaccttgtttaaagcacaatgcacttgagttcttggttatataattaatcatcattattacatattttccaactaaagatcatctgtttatgtaatgaaacacccttgttctccaagttatgtttgtgaaaaaaaaaagctgttgctttgatgttttgaagtgaagattggccattacctggagacagagtgcaagagataagcaaaactattcttagactattagccgcaagaaatacaaaaaatccggcaaatgtcttatagactattagccgcaaaaaaataaaaaataaaaaatcccggaaatgtcttatagattacaagccgcaaaactattcttagattattagctgccaaaaaaaaacatgaggatctttgtaatgtctggtggattcagacagagtggatcataatcccgaaaaaagctcttataaaaaactaagccatgattgaaaacattccaataacttttacagaggactgcaagaacgatcaagaagcaagaaagacgtttcagaagaacaaacgtcttcttcttgttcttcttcttcctcctcttcttttttttgttttcattacgacgagaaaatttgagttcgtgatcgcttgaacaaccatcatcatcatctagagccccaaaaaagaagaagctgcgggccggttattttggttaattagtctaaatcc

SEQ ID NO: 914 - DNA, 3000 bp, Unknown
  misc_feature (1)..( 3000): cDNA_ID_2128288_gDNA_ID_1620337_Annot_ID_153834 3000 nt of promoter + ATG
tggtttttgacaacaaatctcaggggatccaagaactgcataacctcctacaaaggataaagaacgaggaaattcaagtaaacgttaactcgctatatactcgattttatgaatcttaacaatgaattagttttggcatcaaggaaacatatgatcttgatccaaataaatcttgtaatctctgagttatactagtatcagtttgaccatttagcaaccatacaaatgtaatatgaggactaacactacagtctttatggcactgaatctgccaaaacccaggtcctacatgaacattgagattttacagaaaacccaccaaccaacacaacaatcgcattgcaagtttcatacaaggataaatttcacgaacacaaagcttgaaattgcttatctttaagaaaattttccctttttactcacgcagttatgggcacgactcctaatcaattgtagaaaattcatagacgaggaaatgaacagaacctcaagagcccaatcgaaatcgagagtttccgcgagagcgagttgggaaaatcagggaattacccgatgctgagggagttccacagagacgatcgcgtgaaactttgacgttaaggaggaagaaagtttatacctttacgttgaagtgaacgatggtgtcaatccctattgtcaggagacgaagaagaagaagaagaagaagaaaagaaagaagaggaaacggatactctcagtcacgtgcgggtcacgtgagccagccttcgttttattataacttaataagggttaattgcgtcactaacattactgtcaccatacagggctcactgatgatcttaaagctagagagtctctcaaaaggcaaaagaagagaaaactgtcgctaaattacacagaacaaaaagatgggtcacattcagaaagcaactcttgttttgttggttgggacttgggacttgagacctctgtttgcaaaaatgagactgcccaagtttccaaggagttgtgtttagcttaagcgattgggatgttgggttcaccaagattcacaaacgcttctgcacgggccatccgactcatggcagcgttccacgacaccaagtggttcagaaatgtgtttatatacttagccctgtcgttctagcaaccggagaaagaaagaaacaaacactgatttagccttttgaacgaacaaaaagaacacagaatggtcggaatttaagctaggtttttaccttgtagtccagataataagagtgctgcaaagtaagataagaaaacgaaagatattagaaaatgtttcaaagtgtttcttggaagaatgacagaagagaggagatggtgtacctcccacacatccacgcagatgattggctgtaacaacaaaagagatgtgatcaagaggtaacattaagttcaacaagaaaactaactaataaaactctaacatacaatatcgtcccacacgagtgggttaatggcgtttgaggttttgaccacctcaagccttctctcttccctctttactgaaattttccagaaaaaaacaaaaagagaatcaaaattttccattttcaaagtcattctacagtttaataccaagtgaaaagctagtcaagtttctcacagacaagccagacccatccagaaccaaactgagtaagagctgcattagtgaacttttctctaaaatttgtgaaagaaccaaaatccttatcaatctgctcaagaacacccttttgaggcgtgtctccaccaccaggttgcatcgactcccagaagaaatcatggttatagacctaaacaacaacataatcatcatcaatccttccaacattagtgtgtgcctcgggtgataatgtacaagttacttagaatataaagtacctgtgcagcgttgttgaactcgggtaaaggattcccgttgttgtatgtagccttgataagctcttccatggtgtatccatagagtctatcatctttccctaactgtttattcagattatctacataacctcgatggtgttttccccaatgcacttctagtgttcttctactcatatacggctccaaagcatcctattcacatttgtttttaactctaattagaatctcaactataccatcttctttgacatatcaccaaggccctaaagatcaagacacatctactttgcaagatagaagatacacagatcaagacacaatctttcctatactcacaagacaattcacccaaattaacaaactttctacagttccgtgcttagtcgagaacagaattggattacagaagcaagacatagttactacacttagaatccaaatacaaataccaaagtcttatttgcacttacaagtggataaggaggtgtctttagaccgtagtaagcttcaacctttaaaccacctcgagacctaagagagcgtcttctctgctggttactctataaggaaacgaaatttgaaagctttagtgcttaaaagagatagattcatgtgaaacagaaccacagcaatttccatgtcacacaaagaaacgaaccagattgaggagcttgggggatttcaaacgtatactagaatctgaaattgtatagaaacagcttgtcgtcacaacacaagaactcatagttcctcccactgttgtcgtcaaagtctcacttctgcttcgaaagacagagagctacttcgcactcttggtctcgctttttcagagaaagggccttccttatcaatctcttttcaaaccggttaacatataagattttaccccggttaactacattaaaccggtaaatcgaaccggaaagatcaacctgaaggaagcaagggttttagcaaatactctgacgatcctttgtaaccgaacaacaaacaaaaagcgtatatttttctctctatcaagattcaagccgtgagctagaaggctaaaaccctcttcttatagatttcaaagcaaccattttcgaactctgtttgattccactgtcgatttaatcatcttacctaatg

SEQ ID NO: 915 - DNA, 3000 bp, Unknown
  misc_feature (1)..( 3000): cDNA_ID_3011889_gDNA_ID_1620337_Annot_ID_153837 3000 nt of promoter + ATG
tatgagtagaagaacactagaagtgcattggggaaaacaccatcgaggttatgtagataatctgaataaacagttagggaaagatgatagactctatggatacaccatggaagagcttatcaaggctacatacaacaacgggaatcctttacccgagttcaacaacgctgcacaggtactttatattctaagtaacttgtacattatcacccgaggcacacactaatgttggaaggattgatgatgattatgttgttgtttaggtctataaccatgatttcttctgggagtcgatgcaacctggtggtggagacacgcctcaaaagggtgttcttgagcagattgataaggattttggttctttcacaaattttagagaaaagttcactaatgcagctcttactcagtttggttctggatgggtctggcttgtctgtgagaaacttgactagcttttcacttggtattaaactgtagaatgactttgaaaatggaaaattttgattctctttttgtttttttctggaaaatttcagtaaagagggaagagagaaggcttgaggtggtcaaaacctcaaacgccattaacccactcgtgtgggacgatattgtatgttagagttttattagttagttttcttgttgaacttaatgttacctcttgatcacatctcttttgttgttacagccaatcatctgcgtggatgtgtgggaggtacaccatctcctctcttctgtcattcttccaagaaacactttgaaacattttctaatatctttcgttttcttatcttactttgcagcactcttattatctggactacaaggtaaaaacctagcttaaattccgaccattctgtgttctttttgttcgttcaaaaggctaaatcagtgtttgtttctttctttctccggttgctagaacgacagggctaagtatataaacacatttctgaaccacttggtgtcgtggaacgctgccatgagtcggatggcccgtgcagaagcgtttgtgaatcttggtgaacccaacatcccaatcgcttaagctaaacacaactccttggaaacttgggcagtctcatttttgcaaacagaggtctcaagtcccaagtcccaaccaacaaaacaagagttgctttctgaatgtgacccatctttttgttctgtgtaatttagcgacagttttctcttcttttgccttttgagagactctctagctttaagatcatcagtgagccctgtatggtgacagtaatgttagtgacgcaattaacccttattaagttataataaaacgaaggctggctcacgtgacccgcacgtgactgagagtatccgtttcctcttctttcttttcttcttcttcttcttcttcttcgtctcctgacaatagggattgacaccatcgttcacttcaacgtaaaggtataaactttcttcctccttaacgtcaaagtttcacgcgatcgtctctgtggaactccctcagcatcgggtaattccctgattttcccaactcgctctcgcggaaactctcgatttcgattgggctcttgaggttctgttcatttcctcgtctatgaattttctacaattgattaggagtcgtgcccataactgcgtgagtaaaaagggaaaattttcttaaagataagcaatttcaagctttgtgttcgtgaaatttatccttgtatgaaacttgcaatgcgattgttgtgttggttggtgggttttctgtaaaatctcaatgttcatgtaggacctgggttttggcagattcagtgccataaagactgtagtgttagtcctcatattacatttgtatggttgctaaatggtcaaactgatactagtataactcagagattacaagatttatttggatcaagatcatatgtttccttgatgccaaaactaattcattgttaagattcataaaatcgagtatatagcgagttaacgtttacttgaatttcctcgttctttatcctttgtaggaggttatgcagttcttggatcccctgagatttgttgtcaaaaaccagcttccattactgatacactatgcctccgtctcattctcaggtctgttgtagttcttgaaacaaattatcataagctttgatcaaacaggaaagaaaacctcttataatctttcttgattgataaaaatgacagagatcttcagtgacaccagcatcagacagttatctcaaatgctactatcactaatcttcttccacatatccgaatacattctagccatcaccattcacggagcatcaaacgtaactcttagttcgcttttaatcaccaagcattacgctttagcaatgcttctgtcgcttctcgaatacctaacggagattatcctcttcccggggctgaaacaacactggtgggtcagcaactttggactcataatgatcatcgttggggaaatcatcaggaaggcagcgataataacagcgggaagatcgttcactcacctcataaagatcaactacgaagagcatcacgggcttgtgactcatggtgtgtatagactaatgaggcatccaagttactgcggttttctcatctggtcggtcgggacacaagttatgctctgtaaccccgtttcagcagttgcgttcgcggttgtcgtgtggcggttttttgctcagagaataccgtacgaggagtattttctgaatcagttttttggggtacagtatctagagtatgcagagagtgttgcctctggtgttccatttgtgaactgacacttgaattatttttgaacatatgagtttgatgtacttgacttgaggtcttaaagtcacaaaaacatacaagaccctctggctgaaagagaaggtcttgacgtggatatgaaatttaccacagcgttaattgtttatgtgacacctgtcaccggtgatgcatagctccggcgaagagtttcggagaacaagtttggtctttttaggggtttgagcagtggagtcggtaacc

SEQ ID NO: 916 - DNA, 3000 bp, Unknown
  misc_feature (1)..( 3000): cDNA_ID_3059587_gDNA_ID_1620337_Annot_ID_153821 3000 nt of promoter + ATG
tctgagcagcagaagcaagttcaagagaacattcactaccaagttgaaaaattctgctctttgatggatggaatccttcttcctgatgttaggaggaacgagtcggggtcacaatcaacaagccctcgtcctcctcgtagaagtggtcttactttcgccattggtagtaataatgcttttccacatgcagatcagccccgtaagtgttttactttacttgaatcgatttgtgaacttattactcagtatttttctttcagcttaattagtattctcactgattcttcttcagcacagttgttcccgagacaaagcctttgaaactcaatgacgtctcacagagattaatggatcaaatgggttacaccctcgagaccaaaccgtctgtaatacctcacaaagacgctggtcaaggttgttttatcaaaggcgaggcagatgttggaaccgtcttagccttttaccctggagttatttactctcctgctttctacaagtacatacccgggtacccgaaggttgattcacagaactcatatctcatcaccaggtatgatgggactgtaataaatgctcaaccttggggtcttgggggagaatcaagggaagcatggaacgggtcctacacacctgcggtcaaagcaaacaccaaaaccgcagaaaacgggtcagacaggttatggaaagcgttgagcaagcctctcgaaggttcgggtaaaggaaaagaggttcttgagaggagaaatccgttggcttttggtcacttagctaaccacccagcgaaagagatgactccaaacgttatgatatgtccttatgacttccctttgatggcgaaagatctgcggccttacattccgaatatatcttttggggattctggagaaataaagatgaaaagatttggaagtttctggtttaagacagggagtaaaaacgggttagaagctccggttctgaagacactggtcttggtggcaacgaggtcgttgtgtaatgaggaacttttgctgaattacaggctgagcaactctaagagacgaccagattggtatactccggttaacgaggaggaagataggagaagatggagctaaatttctcttttatgttttaatgaaacttgaaaggctctgtttcaaaacatgctcctcggttttctttagactattagcgggacgtcgtttcgctgattgtgtcactatttttgtttttcgattatttttggaagacattttattctaatattttatgttgttctgttgttacatactatggacgaagagcaacacacgactctgtgatgaaaccagtgctgcaactgtaatagggaaattacgtaatgccaatgcaattatagagttctcaatggatggttggaatggaacaatggtgatgatctgtgttgttgaatgtgataaatgacttaatgatggatttggttttgtagtcaaaattattgaattgaagacgttcaaaagttatcggaaaatatgactaccgaataattaccacaaaaggaatagcgaattcaataaagtagacataaaatgcacaacttcaacataaacgattatatgaaaactataattgtataatcttataactctattatctataatcattgtgagtatatcaaatgttgtttaaactcactcttgaactatttgataacttaaacatgtaataattatctacgcaaaaaaaagacatagtaattgaaaaaaaagagagtaaatgtttacatgtttatgatcttcgtagagaatcttagctagtttcttttaaaacacgttagtcatataataatgcaaacaaaaaaatttataaattttttgtttgtaaacatttcatattgatcacactgtaacataaatgcctcgtgacttcttaatgtatataggtataataggagagtacatgtagatgtagatatacacttctatgacgtatataaacagaaactgaatctttttattacgcaatcaaagccgtaacattctgttttgttatatgacaggtataatttactttgcacatacatcacaattcacacattatattatataaaaatatttatgtagatcggtcgttgctaatttcaagggggaggaacatgaaagattgagagagagagaagtaaaacagtgtttggtcaaatctctcttaagaaataatcttatgaaatgaaccgtcactttctttgctctgctctgctttttatttggatccttctattccaattcattgaccaatcacttcattatctctaattctctaacattttttttatattatccttttgatttatatatcaaattatttcaatcatgatacaaaaacgatattggagacatagcacaagttgcgtctgtctgtacgtattttctatttatctagtatagtctaacaaaaagagaaattgcccataaaaagggaaactcaatttctaacaaacctttctatttttataaagagaatttgctactattattactgatataaaaagaaataaaatttcttgctttctatcatatttgatattttttgatgtcttcgtcttaaggaaatggttacaaagacaagtataatcatataattcaaatagaaaacgatattaaagacagatcacaaattgcgtgtgtagatatttcaccaagtgttaacaaaaagagaaattcatataaaaaaaaatatttataaaactgcaactattaatttattcaaactaattaaaaagaaagagaaaaatcttcctataaaaagaaatgaatctttctttgtaatcagaaagaaataaaattctttttacttttccagaatttgatttttctcatgtgtcttatcttatgaatatggttaccacccagtgagactacagagtgttcttatctgtctctgaatcccattctctctctcacacaacattatataagcttacacagtcacttcacaatttccacaaattcgatatattaaactataataaactaaaaagaa

SEQ ID NO: 917 - DNA, 3000 bp, Unknown
  misc_feature (1)..( 3000): cDNA_ID_2128418_gDNA_ID_1620338_Annot_ID_153853 3000 nt of promoter + ATG
taataataagagggtaatttaacaaggtttaaacagaagataggagatgagtgtagtctctttctttatacagagctaagctaatgaacatacgaaccgggcaagccttaaccgaaacgacaactggttcgcaacataaagtcacaatttgtaaacgtgatgttaaatgtaactcttttattctaaacatctaatcaccgattcggggctaaacttataataaaattaaattacggtccttattcataagaagatataaaaccagggggcaatttgaagtttctcggttcgttagtacttcgtacttggcttcttattttcccgggaaaacaagaatatcagaagtctctgtaactgaatctcacatatctctctctttgcacagagaaccaactgagaaactttcttcaacgatcgaaagaagctgcttcaatggcgaaatcgatgagaactatcaaaaatccattctttacttcgcatccgccatctccattcttccatctctctctcctcttcttcactcccctgaagaaatcaagtccccgatacctaaaccaccatcaccaaactcgatgcccacctccacagtttttccttcttctcatctctctttctctcgttttctcgggaatttcatttctcacattttctttagacactggatcgtcaacttgcgtctccacatcttccgcttcctctctcaaattcttcatctccgatgtcgatcaccgtcagatcttaacctcccttgctgtatccggagcttccacgttgtttccgttaccggcgagaggaggacattccgggaatatgacggaggaagagaaagagttttggaaacaacccaatggtgaaggatacaagccttgtttggattttagtttggagtacaagaagaaatcagctagtgtttctaaagagaagaaacgattccttgttgttgttgtctctggtggacttaatcaacaacggaatcaaatcgttgatgctgttgtaatcgctatgattcttgaagctgctcttgttgttcctgttttgcaagtgaatcgagtctggggagacgaaaggtaacaaaaacacaacttgatcatctctcttttctgggtttatgattcgagttactgatgatctcttgttgtgttttctcagtgaattctcagatcttttcgatgtagagcatttcaagaaaacgctgagatctgatgttcgtatcgtttcttctctaccgtcaacgcatcttatgtctagacaaacaattgagaatcagattccttgggatgtttctccggtttggatccgtgctaaatacttcaagcaggtttgattctattgtttactagtttagggtttatgttttctctgatcgattcttgaattttgaatgttaactacgttgtagttgaatgaggaaggacttttggtgttgaaaggattggactcaaagttagccaagaatctaccgccggatctgcagaaacttcgatgcaaggtaagatttttcaatcaaccctttgttttccagtctctagaggaaggtttaatttgttggtttgtaggttgctttccatgcactgagattcgcggcaccaattgagaatctcgggaacaaactcacgagaagaatgtggatagaaggtccatatattgctctccatttaaggctagagaaagatgtttgggtaagaaccggttgtctcactggattaggctcagaattcgatcggatcatagcagaaaccagaacgtctcagcctcgatacctcactggtagactaaacttgacctatacagagcgtagacttgctggtttttgtcctctcaatgtatatgagattgcaaggtaacttaaaaggaagaaaattgacatgaaacagagctttgaccatttgtatacatggtttgaggaaacttaatgctcgagtctttttttttttggatcaaaggttgttgaaggctttgggagcacctagtaatgcgtcgatatatattgcaggaggtgaaccatttggtggctcacgagcattagagcctctcgctaaagagttctctaatttggtgacaaaggagacattggctcataaaggcgagctcttgccttacaccaatagatcttcagctttagcagctattgactacattgtatcacttagcagcgatgtttttattccttcccatggtggaaacatggcaaaagctatgcaggtaacacagaagaatagtcttttgagattttccaaagtttctttcttaaactctgtttttctctcagggaaatagagcttatgtaggacacaggaagtttataatgcctaataagagagcgatgcttcctttaatggagaattcttctgtttcagatgccgagctcagttttctaactcggaagcttcaccgtaagtcccaaggctatcctgagtcacggagagggcggagagatcgtgacgtgatagcttatcctgtcccggagtgtatgtgtcgacatagaaaacacaggtctgtaggtttcttctaggtcaggctcattgcttctcaaggcagcgattgtcacaaacgctggtctattggtatagctcggttgccttgctcctcaaagcaatactagtccagctgcaaccaatcggcgttagacacgtgtacatataaatctactgtaaatgtacagattcctttccatgttttgcgtacaaaatttcatcattcgtacaaatcactgagctctaactaataagaatgagacacgtgtaaaaagatttatggcccacagatctttgacgaaagaacgttgatacttgacagcctttttagttattttgtttagtagttttgtaaacaaaaaacaatataataaaatcgatttgccgttaaaaaaaaaaaaaaaacattgattggtttagggattgccacgtatgcattaatttatgtgagttcatatcttctcgcaggcgcgcatgttcaccgccgacgaaaagattactgtatctctaatcgtcttccagaatg

SEQ ID NO: 918 - DNA, 3000 bp, Unknown
  misc_feature (1)..( 3000): cDNA_ID_3059645_gDNA_ID_1620338_Annot_ID_153858 3000 nt of promoter + ATG
aggcatataatcttgtcatttactaataattctttagtaacaaccataaagcttattgagaggttgaaagtggtggaccggtgggtgaagttataaatgcaaatggttgaggcctagggaattgagttactaactgtgtacccaacattaagtcacagcctgtcctttctatatcgagtgtgaaaggtcaaagatgcgtacctttgtttactcttcaattcacactttatatacgactactactagtactacttgaactcaaataataacaagaaattggagtgagattatatgattttcaattatttgtacgtagttcagatgtggtgtgtgtgtgataagtctttgatttgtagtgtataagaaaatagcgattacagcagtgtggtttgaaaatgttcgatactatgcgttgtcattgaattaatttgacaatggagttatggagcagagagactctctcctttaaaaattaatttcccaaacaatgaattctgatagaataaatttatgcacatttattttatactatagtactatgtgggggacaaaaaaatactatataatcaacgttattttcatactatttaataaaatacgtatataaatatcgaataagatggtttttgtttgcgtatgaattaggtagatgtgataactcgctgtctttgatttttcataataagccgtcaatatccatttatcactagttggaacttggaagtgtatatatatatatatgatttctttttaagttctgataaagcaaaaaagaatatgttgacttggtcaagtggtccaatgaatccaatcttccagcgggccatttataaagagactatcaaactaaaaagtggtttacgagtataaactaagttgataaaaggttttttgttttgttaaaaggaaaattatgttttgcagaatgatttatcttacgagtataatgatcaatgatgtattcttaaaagcatgggaagattgacttcggtttaaaaatatatccagtttcaagtctctcacgttaagtgtaatagtaatataagatttgacaatctttatcatcgttgactttgaccaacaaaaatagtcaaatattggatatttggatattttctaatttattcagacaatgcaaaattgcaggttcagtatcaatgtatcatattcatgggatttcagattttgtgatgactattttagaacactactttgtgattatctgaaatgttatatttaggaataaaaatcttagctaaacttttttttttttttacattcgtgctatttgaaagaaaaaaaaaacttatagttgctatgaatgagaaaccatcttcctatgtatgttgacctgataatcacttgctatgaatgagacatttttatataaaaaaaccgctatgaacgagacatttaaaaccatcacgttgacagcaaactgcatataaattaagttaccgaatggtttaatgggcctagtaatgggccaaacagtctttctcctttatttcagattgatatagtggccactacaaatgcaggacctgtcccgttgaggaataaccggttttcaattcaattgagagaaggtttattgtattcgtcgtctcccatccgataagagagaaagatagtttacagtcacagagatacttttctcactcatctctctctctctttcccgcttccctccttaaaccccaattcttctcctgctcacaaaaaccctatcttttgggttttgttatacagtgatgatgaaacctgcttctttgcaaggtttctcctcacatgcgtcctcctctatctactccgatgttcgcaggccagctactactccttcgaaaatggcagcttttagtgccctctcgctttgtccctatactttcaccttccgccaaagctctcgaattaagtctaccgtttcctgttccgtcacttctgctcctgcttctggtctgttgtttttctttctctcctcgtcttttcctattgggttcctcggaaattaagttattgattgagtaaatgtgctccactactgtaatgggtttggagtattttgaattagcatagaaaaaaattgaaactttataagatttttggttgatagtggccgatagtttggacagagtttctatggagattctcactctgattctgttgatacttgatagtatgagtagaatctttgaaatttggttgttttatgtgtcgtgaatggaccataggagactgactagtcgagtgtttttatttgtgtgtgtattgactctatttgttgattctggtgttatgtatcaggtacatcttcatcctctaagacgccacgtagaagatcaggtcgactagaaggagttggaaaaagcatggaggattcggtgaaacgtaaaatggaacagttttatgaaggaaccgatggaccacctctccgtattcttcccataggaggccttggtgaaattggaatgaactgtatgcttgttggaaactatgatcgttacattctaatcgacgctggtataatgttccctgagtaagtccggagatacattcatcttgttaatattggcgagaagtcattatctttgtgtgcgtggtgctaactctccgtggaaaacattgctgtataatgttacagttatgatgagcctgggatccagaaaataatgccagacacaggatttatcagacgatggaaacacaaaattgaagctgttgttataacgcatggtcatgaagatcacattggtgcgttgccttgggtaaggtcttcttctactccttgaaaaatccataatgagccatagacttttggagatttctagatagagtctagcttttatttttcaattaacagctgcggctcgtgtgtataatgcagttcttttcctcagtccattgctggtttctgttctttttttgaccgatacccttttacatgagcaggttatcccagcattggaccctaatacaccaatattcgcatcatccttcacc

SEQ ID NO: 919 - DNA, 3000 bp, Unknown
  misc_feature (1)..( 3000): cDNA_ID_3059635_gDNA_ID_1620338_Annot_ID_153862 3000 nt of promoter + ATG
aaccgtctgtaaattttttcgtttagaacatccactgttctcttttttctagatacatgtttcaatcttgtagttattttgatgtgttcaggctggaactactgcgggaataggtaatgaggcgacaaacacaatgatgcaaaagttttgggattcagctatggcattgtctcctaatgaggacgatgaggactcgagaaggttattagctagtcttacttgttccactatttatcgagtttcttttcaaagaaagctttggttttgctgactttgttgacaacatggggaacaatttgtttcagtgagagctccatgaaggttgcttccgaagctgagacaggaaaatctttcccttttgcaaatacattttctttcaaaattgaagacaaaaagcacaggaaacacagattcataagcggtaaaaataattttgatttttattcatcaagtaaatagttgtagtcttgcttttacttaactgaattggttctttttgcagacactcggagtttgacagaggtgataaccgcgatcattcagagggtaggggatgatatcgatccagataacttcccccaaattttggtaaatattttcttttacataaagactatgatgcaatcattatctaattcttctcttgtcaccccctgaattgttaaaatgatggttataatgtgcagtatgaagatgaagaccacgataaagtgttgttggcttcagatagtgaccttcaagcagccatagagcatgcaaaatcaattggctggaaggtaaaaagaacgatttcctcctgctttaaacttttggttgataagcaacaagaaccaaagtcgaagatgaaaccttcatgagattgcccataaaccccttttgctttctgaattgatttgatcattataaattgcagagtctgagattacatttggatgattcaagagaaggcaaaggaagaagaaggagaagagcatcaggatcagcagaatcaatggagtatgtagagacagacgcttgggctgctgcttatagtggagttgcggctggtgcagcattagtagctggtcttggttttatggcttttctcagaaaattcggtcattgattcctcagaaacactacaagaagtgtttctttaacagatcaatacaaacaaaaaagaaaaacagacacagggtttgaaggttttgtctgaaatatttttatatacaaaagtcatttttgattatttttttggcttcatgatatcaaaataacaaatatctaaaactaatacatggagtaattcaagaacaaggcttagaatctttgtctaaactgatctcactattgtcaaaaaaataaaactcaaacagaacaagggctttgccatgtagagatatctgctataagttcccgaagtttatctataagttctttaacatgaacattcttctttgcaatctcctgcatgaacaaaagcttccgtttattaatgccaacagagaagaacaatataatcacttcccataaggttattaacatagaaatcaaaatgaccagatggctgaaatgtattcaaaaaattatcaacatttccatggttctagaaccgcttaagctataatgatacaaacacttacactagacagtgggaaagaacactttatacaagaaaatatgaatcaaattcaatgctatgtgagttgaaatgtacagagaattcgagactgaatagtgtatcaatgtagtaacatcagattgaaaacaaagagatgtagaaattgcagaaagctttaccattctgagacttaaggcttgctcctccaatttttcgatctcgtcttcactttcaggagatcctaaaccattttgcatttcagatgcttttgcctgtaatagatgaacaaattcaaatttatgaaacctcaaaaaagctctcatttaaaattaagcaagttcactacaagtgaagaacaagacactcaacaagcattagatccttcatctaaactctctatcgattcgaagatttcctaatctaagatctcaaaacaccctaggaattcaaaatttcctcagtccagaaacaactcagaacaaaacacttctcgaaatagttagtaacatcacattatgttcaataccttctgcgaatttggaatcgcagcaagaacagcacgaagcgaagtcactgagttcttataccgaagactcgcctcatccaaaacactatttccacttcctccgcccccgccaccaccagcagattccgaatgatgcgatgttccatcaatcgcagccgcatcggcggaaacgagagccgaaccattagaacccgtcgtcgtcgcggcggaactcggggtagctgaagtagaccacaaagacggattacaaagctcatcattcatggctgaaattatctgaaacgccgcttcaatagtttcttccaattgcttctctccttccatcgctagctcctgtgtcgtcatcgtcgtcgtcgtcgagacctgtttctgcagcatcaccgtgaacacactttatcacggcgtcggttgactaaactattaatacgatgtcgttttaatcaaactatataatatatatatcaataatatagtttttatagataaataaaaatagaaagaaatcagctacatcgctgtctaccttatccactattactccaatccatatgacaaaaactatctaaaacgttagtttgatcttttgatccaatcacaaggcaaagatccaatggacaataacaacaacaacaacaaccagcaaccaccaccaacctccgtctatccacctggctccgccgtcacaaccgtaatccctcctccaccatctggatctgcatcaatagtcaccggaggaggagcgacataccaccacctcctccagcaacaacagcaacagcttcaaatgttctggacataccagagacaagagatcgaacaggtaaacgatttcaaaaaccatcagctccctctagctcgtatcaaaaaaatcatg

SEQ ID NO: 920 - DNA, 3000 bp, Unknown
  misc_feature (1)..( 3000): cDNA_ID_2128467_gDNA_ID_1620338_Annot_ID_153868 3000 nt of promoter + ATG
tctaaagagaaaaagttacaacaaaaaaaaacaaatgagtttattagctggaccaggttgtgttattggttgaaaacgatgagaaatcaaatgacgttaggtaaattccgttacatgaaagtaagtgacgatagttgattggttatcttgaaaagttaatcaaacgtattttcgttttagtcaatatgaccattaattacaattgacagcatgtataaactcatttttggataaactataagatatataattgagtctagtctaagaaaagcgagtttgttgtaagttttattctaaaaatttggtcatctccaaaacaagtgagcgaaacactggctagtcgtaactggtaagataaaaaactgtgatattacatcaacaagtttcactatcgagtgagacatcttcaagcaataatcgagaggatattaacatcatcagttaccacctcaattttcccatgcattaaatactgacgtggcgccaagtaggacttcacacgtgtggggcatgaactttgggatcgcactgtgggacaaatatttgtgttcccgaggcttacacatggaactgccgacttggattcttctctttctctcgacttacatttgtattaaaagagtatctatcttttcttttcttttcctctccctcttttgatttttttccctcacatatcacataatactccatattactaaaacacatgaaattataaagagaataacaattgctaatccaattatggaaatttatcaatagctaaaaaaattagaaactgttgtaagtgagtactaatatttaaaccaaaaaagaaaagaataaaaaagtaagtgctcatatgattctctcatatggtacaaattgctaaaatcttattggtagcagtaaaacagtgaaaaggtcaaatgatgatacttaaagctgattaaatagtcaaaccccaaacacattcgtgattaaagctgatacaatagtcaaaactgaacacatccgtgaaaactttaattatttttggtaaatactagtaaaatcgaagttcatttagttatttttttttttttctgtcttcaccatgttttaatttagttattatgcattttaccatgttacttctacccacattggaagaaactttaaaatttctagttgataggtgaaattaatttccaatttatatggttaaattggtatgactagaaccggtatatatatactcaacaaaattaatatcctgtttgatgaaataaataaaatatacacaatctgttacaatgttcatatcttttgtctccttttaatggcagtgatataaatgatggatctggtaaaaattaaatgcttttttctggcagagagacaaacgaatccaatagctgacgctgacacgtcatcagtaataatgacgtaacggccgtttttgttggcttttgttttttacctccttacacgtcattcttgctttgtgcccacctcgttgttaacggagtaagttgttggcgttaataaacagtctaatctaacagatgtttttgtttcaatagcgctataattacataagtacccttttgccagaaacaaaagtggattttgttgtaagaaaatattcgtaccaccgcaccacaattagattgcttttgaagactcatgaattaaaattactatatttgttttgtgcgttttattttttactaaatatatgaaaaaattccagaaataaaaataaaatttggtttcacggttttgaaaactgtacaatcacatggtgatttttaatgaattatatgttcaatttacaaaatagatgatcatagaaaacgtttcttttacgcgaaaaaaaagaaagatatataatctcctgatacattggataaacgataatttgctcacacatgatacatgcatgtgttttggtataatctcctcgagttatatttctaatccgataaaggaacgtattggcctcgaatatcgattacgttttaggttcttattacgatccctcaaccgtactacatgtctaaaaattgaaagttaaaacttatgaaaaaaagctttggtatatgctactgtctttcgcgttgtgatcaaaaatcaaaaacagtctttttttttcttccaaactcctctctctctctgtatatatacaagtatattctagcaattaaggagaagaaaaatctccaatggaataggcgtataatcaatcagcaacagtcaagatatacataagtggtttactaattgcatactagaccccatctctcacaaatcacaataataacaaagaatgtatgtttgagttctataaccaaacttaaaatgttaactaatcttctagtcatagatttgtaaattattacatggtgaaagtgacgcggcataaactatagatttttaaataccatatatttttacacgtgatcttttttttacggcataacataggtcaccggatatgaagttgaataatacgatgaaatactaccatccaacatgtactaacgagggcggtcgctggtcgccttttccgtagctctctttttgaaaaactcaataatacattaatgtaacaaaatgttgagattggaaaaagattcttcgttttttcaggaaaataaaataaaattaaagatgataaacaaaaagaagaagatactttgtgtctatatccaaaacaagtacagtgtgacatattaaagataagatttcttatctcaaattttgtgggtttcttcttttcttttcttttgtcaatgatgtccgaataattttcaactacaaattcatagtttacgaacagtacagacaaatagataaccgattaaaggaccggaatgtatgaaaaaaaaatcaatctgggcattttaagagagacgcggtttaagataatgggcctattcttttgataaagcccaatgtaacttttatttttttaacaaacaaaaggcccaaataaattcgccgaagagaaaaataagaaaatttgtaactctcatg

SEQ ID NO: 921 - DNA, 2500 bp, Unknown
  misc_feature (1)..( 2500): cDNA_ID_2128477_gDNA_ID_1620338_Annot_ID_153872 3000 nt of promoter + ATG
ctttttagtttgccttttcctctgcgtagtaacaaaacagggatatttgtacaacccatggtcaacaactaataaatcaagtcacatagatgagaaagcatataataattcatgcgaatgacggtaatccaaccaaacatttaaaatcaaaattcacaccagtcatatgaggaaaataaaagaaaaacaagctataaaggcgccagtagcaggcaatgaatgcaaataagagaattgagataataacaaagtacaaaccttggcaggggtgtccgaagattctccagatttccccctttttggtgtactcttgcgctttttcgcctgctaaaaatgaattcagtgctcccattgagaatgaacatgtagaacaataatgtactgattccaataataccttttcttgatcagcaattataacatctctagtttccttgggagattccaaaaattcaagcactttgacagctagttcttcctggcagtatcaggatagaggatttcttagaatatagaacaaggtgcaataaatagatagactacatcttcttatcacttacttttttcacgttacttctgcttatagggatatcaagcacatcacaaaaaacaatcaatttttcttttacgcatttgtcaatcttctcttttattcgtgctctctgcttctcctcctaagaaacatttaaataaaagtttcaacaccagggacaacagcatacacatccctgtaacaaaataaacttgaaatgggttatacctctttctctgaccaggcaaagccagaaaattgaccaatgtttctcttaaccatctgtgcctgtagagaaattttcacaaaacgctttttaagtagctatgcactctggcaaagaaacaatgaaaattccgagacgacatccatactaacagagacagaagcttgcaagtgaaacataactaccatatgtggaatataagagcaacttttagcgcacctttgctttcttcccaaaaagaatggtgtgtagtaacatcaggttgtcatcagcttttctcttcgatagtttatgagccactgaaacagcaaaaattatcagacaactttctaatcaaaaataaatgtaaacaagtctttatcaaaataactaaaattttcaccctcaagctaaacaaacaaacaagagaaagaaagaaagaaaaaaaaaatctcatcttcttatcaacaacagtgcagagtatgagtatttctccacagcaaaattaagcaaatcacagacagcaagttaatagactaatagtgatattccatcagaaagtcagactataggtatcaaattggtagaagtaatagtatccaagtagaccaaaagcccaagcttttctaatgaaatggttctatctataatcatgccaacacagacaggaaaaatctcacaatagctatctcatcttctagatctaagatgtgccaaccagccaagattgttcatcgttctgattaacaacaattagatctacacatcacaaattcacaagacttcaatcaaaacaaccacaaatcgaaattgattctcatacataccatttggaatttctctgagaggtgttccacgaccctacaacaaaaaaccataactaattgatccaattctcataaagacaaataagaaagacaaacaaaagttccatcaagctaccttttcaattgaaacggacttgctcggtggagcccgcataggagtcgacaacgagaaacgctcaaccttctttctctccctcgttggtctctcactagtcggagtcaccgtttccttctccgacgatttcttacttccacttccttcttcttcttcttcttcctcctcactttctacatcgtcttctttatctttctcacccaattctccttctttcgcttcaccctcttcttcatcttccttcttctcctcctccgcttcgccaattctcggcgaatccactttttctttctctacctccttctcctccttcggaacaacatcaatttcctccttcgccggagaattcacttccggtgtcttctcatctagggtttcagtcgccatttcaaacccaaacaacaggcgaatcaaaacgtgaaaagtcaagaaaaaaaaaaactcaaatttcagatttggggaaactcgaaattgtaaaaccctaattcaacgattatgaagaagagaaacaaaaaaatttggggattttcaaaaattctggtaccaaaaattagaacacaaaggcgggctcttttcgtcacccccaaatattttcaccaaattcagctcgcggcaaaactaaacccaaatttatatacatacacatatacatacatacaacaaaactcggcccaattttataacaggccccattttcctcctaatgagcccaattgcgttctggcttctaaacaaactttttcaaaaaaaaaagcaaaatagaaaattgattttggagggaaaaccaataaaattccctaaatttcgccggcgaagaaatg

SEQ ID NO: 922 - DNA, 3000 bp, Unknown
  misc_feature (1)..( 3000): cDNA_ID_3059624_gDNA_ID_1620338_Annot_ID_153871 3000 nt of promoter + ATG
tggggtttgactatttaatcagctttaagtatcatcatttgaccttttcactgttttactgctaccaataagattttagcaatttgtaccatatgagagaatcatatgagcacttacttttttattcttttcttttttggtttaaatattagtactcacttacaacagtttctaatttttttagctattgataaatttccataattggattagcaattgttattctctttataatttcatgtgttttagtaatatggagtattatgtgatatgtgagggaaaaaaatcaaaagagggagaggaaaagaaaagaaaagatagatactcttttaatacaaatgtaagtcgagagaaagagaagaatccaagtcggcagttccatgtgtaagcctcgggaacacaaatatttgtcccacagtgcgatcccaaagttcatgccccacacgtgtgaagtcctacttggcgccacgtcagtatttaatgcatgggaaaattgaggtggtaactgatgatgttaatatcctctcgattattgcttgaagatgtctcactcgatagtgaaacttgttgatgtaatatcacagttttttatcttaccagttacgactagccagtgtttcgctcacttgttttggagatgaccaaatttttagaataaaacttacaacaaactcgcttttcttagactagactcaattatatatcttatagtttatccaaaaatgagtttatacatgctgtcaattgtaattaatggtcatattgactaaaacgaaaatacgtttgattaacttttcaagataaccaatcaactatcgtcacttactttcatgtaacggaatttacctaacgtcatttgatttctcatcgttttcaaccaataacacaacctggtccagctaataaactcatttgtttttttttgttgtaactttttctctttagaaactcatcggtctatactcttgatctaagtggtattgttattctaggcaagaaatcaattatattgaacaaacatcttatcacgcacaatccggtcgcgatgaaagaagtttctacttctagttgaggccgtcctaaatcaattcgaatacgtattttagatcaatatttggaatgcaaaaaaaaaaatgacggagggagtataaagaacccatatttaatttgtagactagtctatatatcttcctcatatcttagtgatttgctatgaatctttcaattgtaagaccaaatgtgttcaaaatagtgtttaatctgtatagtatatgtatacattagaaagaaatatacgtacatgtatatatatatatatgcattaaaagatgtgctttatgaattaaggtaaaatatgtgaaattatgtcaacattattcttcccttttagggtgtattttaaaacagaagctcattggtactttaggtttagcataggctataggttttagttgttatcgagaatgccgtgtttacttcatcatgaacatctcatgttaacaacatgcattttaagttcttcaaaaaaaaaaaaaaaaaaaacatatgcattttaagtctttgtaaagagatgtaacattgtttatgttatctttaatcaattaaatacgaagttataatttacatatgaaaggtaaaaataaagaaaggtaaaaatagtaatcaataaaatagagttattttgatcaattatgctgaaatttcatgaaatatgtgagaaatacatctattggacaatccactaactgtcaatctcgagaattagaatcgtgctttgacagttttaactatatatagagaaacacaaatggcgtgagttttaggtttatattttgactgatacattactaaacaaaaatattaaattaagtactaaaataataaatgagtgaagtaatattagattcacgtataagtcatgtctaaaagggaataaaacaaaataatttacatttcttttcagatcttgaggtccacagttccaccttcgtaccaacacccaagtggttctttagagagagagagatttataagcttctctttgggcattacaattttttttgtgaacatagaaacactcaaaacttcaaaccaaaaaaaataaatgggagaggttcaagaaaatcctaaactcttatatcagcttttcaaatctccatgaataatattaacaaatttgttctgatctattttattttatttttggtatcaggaagagaagaaaccagaagcagcagaggaaaagaaaatggaagagaagaaaccagaagagaaaaaagaaggagaagacaagaaagtggatgctgagaaaaaaggagaagattctgacaagaagcctcaagaaggagaatctaacaaagattccaaagaagattctgctccggcggcgcctgaggctccagcaccgcctcctccgccgcaagaggttgttcttaaggtttacatgcactgtgaaggatgtgctagaaaagtccgccgttgtctcaaaggcttcgaaggtatgtattaaaaacagatatgtgtagagaaaaaaaaaagaattaattgatttatataattttgcaattccacacaaatcttttggtttacatttttaaaaatataaaaaattcagttttccatagaatagtttcggaaacaattttttaaagatgattaattatattgtggctttattttaaaaatatacaataaacacaattatcttgtattctttccagcatcctatgtcaattgctgtaactggatatatcttgtttctgtcaactatagtttttttggttaatctcgtatctaagtatagttaatattcgtcatataatttgtgtgtagggccacataaagttttggttatgctttagtattatagcttttgttttttaaaaacactcaaactagaaattctgtttttgggtaaaaatggtaaagctaatggtttataaaaaaaatatataactttggaattttggttgaattaatcaattaggagtggaagatgtg

SEQ ID NO: 923 - DNA, 3000 bp, Unknown
  misc_feature (1)..( 3000): cDNA_ID_2128465_gDNA_ID_1620338_Annot_ID_153867 3000 nt of promoter + ATG
tttctcagcagccctctccatacgagcaattgcatcatacaaacactttgctatatctaataaagcaataacttcgccattttcaacaaccggcaaatgtctgaattttcctgcagtaggtaaggttaagatatagcctcattaaggatctagacacagcaatcagataaacatcaagtttctctagcttaaaaacaatgagacaaaccttggaccatcttttggagagcttcaacagcaagtgtttctgagagaacaaacattgggttcttcgtcataaccttagatacaggtgtttcctcgacattaagttcctgtgaaatcactcttgtagctatgtcctgaaaatccaaaaaagacacacatacacacagatcaatgaagtctccatttccttcttccaatctgtttctaactttttaactacacttagcgaatagtggcataccttatcagtaagaataccacaaagcatttcattagagtcagtcaacaacaaggcatcaactcgtcgtgaagccatccttttacaagcttcatatatagttgttgttgctggtactgtaagtgctttcgatagccttaaccgtttcacagtccgctcgcctcctgttaaacccctgctccatatacagatgagagaaaaaagttaaaaccaaatcacaatagcttcaatggaaaagaaataaggtaaacctgaggagctagatgttctctatgaattgaatacgagcataaactagggtttatatataagattgagacccagctgagacttacaaaggagaacgagaaacagtaagagatctccggccagtatcgagacctcgttcggccatatccatggatttcttctttccgtgcaatgacgcagtcgtaacggataagctccgtcttggcccgccttggctagccatatctactgtatgatatagaaaaaatcaaacccttgtaatcgtcaacgcttacgaaatgattaccaaaattcgaataaggaaagtttttctggaatcgaaactaaacaaaacgccaaaaaacaaacactaataagaatcagaaaactcgtgaaatcaaagctattaccaggcggattcgtcgggtcaacaaatggattctgggattgaaaaaactgagctacaccaagttgggattagttccgtttcgtagatgctctcttctctcctttctcaaaatgttcgtgagacagataacggcaagagagaaaacgacgatttgtgagacgagaaagattacagagattctcccgggaaagtgacgggaaaatgtaagaaaattagaaagcaagaaatattctgtgatttttctctctgaaaaacacgttttattttgcgattttcacccaatcggattctttgatttcgatgctctgtcgaattggacgatcgctaccttttttttttttggtctttgcttttttttttgggggggcaatatattgatttcttatatctggttattgacacttatatcctcaatatttgagaactatgacaagtggatcaaagatttgtttctcatttggcaaagggttttatcgtcattagctatttatggtcattattacacacgagttgatactttttctggattttattttttatatgttgattattggatttgccttttactctttcttcttagcatttggatttttttttttccttttttttggacaaattggatttcgtctaagacagaaaattcaaactgattttttcttaaaacaggttaatttaattaggatattaaaagttctgtgttctatctggataaaaacgtgtagactaaaaacaaaatgaaaataaaatatccattctgtctcattttcagtttcttacaatgtatttaaggatttgttccatccatggttgtgaaatctgtgtgaaccaaaaaaaaaaaaaaaaacagaaattttaatattcaaactttatattaattgttgaatatttcaatgttaaaaacagtgaaatgaatcaatgtcacaacagttttgaccaaaaggaaaaagaattggtgtcacaacaattttgaccaaaaaaagaaaagaattgaggtcacactcacaacaatagtcaataaccaaagctactttagcttcatggatatggaccaaacataagttatgaattataatactgggccgaaaactcaaagcccatatgtataagattcacgttgttcgaaatcttttcccactaaacaataattttataattaaacctaaagtatgtccacgtggataccatcaattggttcaccacagcattagctttcacatcacacgagaagcttcgtctctaactaaaaccaaaaatactccagctccttcaccactctctatttctctctccaaattcatttcttctctctttaagacaagaagttatggcggattggggcccagtgttgatcgccgtgatcctcttcgtagttctatcgccggggcttcttttccagattccggcgggaggtcgagttgtcgaattcggtaatatgcagacgagtggcgcttcgattctcgttcacgccatcattttctttggtctcatcactatctttaccatcgccataaacgtccacatctattccggttaactgtttagccagacaaaccggtgctgcttggttttatttcaatttgattgtaaggtctggatttgttttgtttgtaacattttcggatttgtgaatataatcaaaatttcaccaaatgatacaacatccagttttgtttttgaatctggtatcaatctgtagagtttgtttgggatctggtttaatttggttttcaaatgctacttgacacctaatgtacatccacctaataagtgaaacgacgacgttttactattattgggcctgtggtccgttaaaaagcccaatatgctgtatctcgtttaatttcaggtgaatctttcgacgaccactctctctcttttcctctttgcaaatccttgaagaaatccaaaatccatagca

SEQ ID NO: 924 - DNA, 3000 bp, Unknown
  misc_feature (1)..( 3000): cDNA_ID_3597187_gDNA_ID_1620338_Annot_ID_153859 3000 nt of promoter + ATG
gaaggaagacataattctttactctgccaaggtgtatatatgaaaatctacatacataggcttaagagcatctaataagttagtggctgtgatcgctgatatctatttcggtctaatgttttaatccaggtaatcccaggcaatgaatcacgagtaatgaaaatgatgaatcggatagcagatatcgggccaaatattatcatgggtaagaatgaaatgctccacacatctggtcatgcctaccgtggagaattggtaagctgctgcttctcttaagactgttgataccttcagaagttttgttgccagctttcctttctgtttcttttcacttcatcaatcttaggcttttagcgcatatgtaaaggtgtaaaggcaatagttccctgtttgcaaactgatgaatatctaagggaaaattttgtttctaatgattgtaactattccctattttgaaggaagaggtccttaaaatagtgaagccgcaacattttcttcccatacatggagaacttttgtttcttaaggagcatgagttgctcgggaagtctactgggattagacacactactgtaagtctctcaccaaagacatatgaactcatggtagataaatagcatacaacataggaaaataccgattgtgaagattttttctaaaagttctgcaacatgtttatgagtttgatgaaatagatgcaaatttcatctggtcacaaagtgcctcaaccgtgaaaacagaatttctgagacatgttcaatttaatacaaaaatttcatggaaggatccctttattatctctcggagatataaaataaagaaacccttgtttgtctggtattaaaacctaggtcaactagctgaatgtttcactttttttttttttcattttctccaacttcaggttataaagaacggagaaatgctaggagtttctcacctgagaaatagaagggttttgtctaatggatttagctctcttggcagggagaatttgcaggttgatttgattgtcactgttgtgttctgtttatcttgtgtaaatgactagattaggatattgaataatcctagcgttgctgcagttaatgtatagtgatggtgataaagcatttggcacatcaagcgaactatgcattgacgaacgacttagaatttcttctgatggcattatagttctgaggtaaatctgaattgtaacattcctgtgccagtgcattttgttagtcgtatttaataatttgttggcttccttgtatgattttctataatccagcatggagatcatgcgtccaggggtctcagaaaacactttgaaaggaaaaataagaatcacaacgcggtgcatgtggcttgacaaaggaagacttttagatgcacttcacaaagcagctcatgctgctctatcaagttgtcctgtgacatgtcccttgtctcacatggaaagaacagtctccgaagtcctgaggaagattgtaaggaagtacagtggtaaaaggcctgaagtcatcgctatagccactgagaatccaatggctgtccgagctgatgaggtcagtgcgagactgtctggtgatccaagtgttggttctggagttgcagctttaaggaaagttgttgaaggaaatgacaaaagaagtcgggcgaagaaagcaccttcacaagaagcttcccccaaagaagtagatcgcactttggaaggtctggtcttactttcacatttgtaggtctatattcgggatgtaatctaacatgtttcagtcatgcagatgatatcattgatagtgcaagactactggctgaagaagaaactgcggcatcaacatacacggaagaagttgatacgcccgttgggagttcttcagaagagtcagacgatttttggaaatcattcatcaatccatcatcgtcaccttcaccgagtgaaacagaaaatatgaataaggtagctgatacggagcctaaagcagagggtaaggaaaacagcagagacgacgatgaattagctgatgcttcagattctgaaaccaagtcatcaccaaaacgtgtgaggaagaacaaatggaaaccggaggagataaagaaggtaatcagaatgcgaggagagctgcacagtagatttcaagtggtgaaaggtagaatggcattgtgggaagagatctcttcaaatctatcagctgaaggaatcaatcgaagcccgggacaatgcaaatctctctgggcatcacttattcagaaatacgaggttcgtctctgaacatatgaatctgtagccgtagatttgaagttcatgattacaagatcaaaagctcttaagttagcaaccaagatttgatgtaatacatttttgtgcaggagagcaaggctgatgagagaagcaagacgagttggccacattttgaggatatgaacaacattttgtcagagctaggcacacctgcgtcttaagtaatgtgatttagatgacattatcttcccaaaagaatcatctccagattttcttaaattgaacaaaaacagaaaagcattaattatattatgtatgtaaccagctgtaagatgatttttgtctgtagaactagaagctatcaacgcagaatccaaatcccaagggacaagaaagccatgactagttttttcggtttggtttaagattcgctttggcttcaaacacatgactaaccggaattattcaattttgatgttcatgtggttttcttattggttttcgttgattttatataccaccaatcactaatttttttaattaaatccggtttagatgctgttgtacattgaaccaacagttaaagtgagaaatgacggtttcacccttaaagcagcgtagcccgtctggtattccaccgtcgatcgccgccgtggcaattttggtaatttattattattttaaaaacaatgtgaaagagattaatgcaaagttgagagctgagtttccgacaaatttattggattgacgaactttgaagaagaagaagagag

SEQ ID NO: 925 - DNA, 3000 bp, Unknown
  misc_feature (1)..( 3000): cDNA_ID_3434283_gDNA_ID_1620338_Annot_ID_153855 3000 nt of promoter + ATG
tcaaatactcagatcttgtctgagaaattaagctgaaatctgataaatgggtttgtttaaattcatcttcttgttatctcttctatggagtttctacagtttaggctcatctcagctacaagcttcacaagcacaagttcttcttcagctgaaaaaacacttagaatatccacaacagctagaatcttggtatgatcacagaaccaatttctgctacttacaagcaacaccatcgatgaacatcacttgtttctctaattcagtctcagagctaaacatcttcggtgataagtcatcagaaaaagccaaaagctttgatggttttgctatctctaatgttactttatctgatggattctccattgaatcatttgtcactacactgtcaaggctaaaatctcttagggttcttactctggcttctctagggatttggggtcgtctccctgagaaacttcatcgtttatcttcacttgagtatttggatttgagcaataactttctgtttggttcagtaccacctaagttgtctacaatggtaaagcttgaaactttcagatttgatcataacttcttcaatggcacattacctagctggtttgattcgtattggtatctcaaagttcttagctttaaaagtaataagctatcaggagagctacattcttcattactctcgttgtcaacaatcgagtatatcgatttgagagcgaattctctgagtggttcacttccggatgatctgaaatgtggaagcaaactctggtttatcgacatttccgacaataagttaaccggaaaacttcctcgttgcttaagcagcaagcaagatattgcgttgagattcaatggaaactgtttatctctagagaaacagcaacatccagaatctttttgtgttaaagaagttcgcgctgcggctaaagctgaagcaaaagcagaagcagaggctgcaaatgaatcaggaaaaagaaaatggaagaaaggagctttaatcggcttaatcgttggtatatcaatgtcggtattggttttagtctgctgtgtatttatcttgctcagaagaaaaggagtaacaaagaagcatgtccaccataatactgtccaagataatcatccaactactggattttcttccgagatactctcaaacgcaagtaagacttttttcctaaaaaaaccgcaagtcttaaatattgtgaaaaagatcgacttactattatcctttttttgtgtgattgtgatttagggtacatttctgaaacatccaagtttggttcagaggatttaccggtatgtagacagtttagcttagaagagatagttaaagctacaaagaacttcgataagactatgatactcggtgaaagctccttatatggcacggtaaagttcatgaaaaccatttgtgttttcacttttcagcatcatcatctcctttaaagagattctgacatttgcttaacatctttcagctttacaaaggaaatcttgagaatggaacaaaagtggcaataagatgcttaccttcatcgaagaaatactcgataaggaatcttaaactgcggttggatttgctcgcaaagcttagacacccgaatcttgtctgcttgttgggtcattgcatagattgtggaggaaaagatgattacagcgttgagaaagtctttttgatttatgagtacattccaaatggaaacttccaatcttgtctctcaggttaaatcttgtttaaagctcaaatctttgcagttttttctacaaaatatatctgaagaatactaaaatccttctttcgtgcggtttttggttttgcgcagataatagttcaggtaagggtatgaattggtcagagaggcttaatgttctcacaggtgttgcaaaagctgttcattttcttcacactggagttattcctggattcttcagcaatagactcaagactaacaacgttttgcttaaccaacatcggtttgcgaagctgagtgattatggtttgtccattgtctctgaagcaaccagacataacacagttaagctcgtttctttaatgttctgtttctgtttcacatgatatagcattgttttcataaacgtttttaaagtgcttagacagaaacatagacttatagctacattgtgtgtgtccgatgattctgatcctaacattgactaacaatgtcaaagccagctcaaacactcatagttacacttttgtatcaggaaatcgcaaaatcatggcaaatgtcaaggctagaagacgatgtttacagctttggattgattcttctacaatcaatcgttggaccatctgtatccgcaagagaagaagcatttctacgagacgaactggtacggctttggcaatatcacattcacaaaccagagttaaatcattgtacttattaaaagtgtttttcttatataatcaggcatcgttggagagcgaagaagggaggagaagaatggtgaatccgacagtacaagccacttgtcgaaacggatcactgataagagtgataactctgatgaacaaatgtgtttcacctgaatctttaagccgaccgtccttcgaagatatcttgtggaatttacagtatgcttctcagttgcaagctgcttctgatggtgaccagtgttaatatattcatagcttcttcttctcttagtaaaaaattcaaacgaactttttaatgctttaaagattcgtgtaatgtgtgtgtacgaaaatcccctgttatttatgtaacgattgggaaaaatggaaattaataacattaactcctttacttaatcccaaaaagtgagtggcaataaatgtaaattaatgtaagtttcagggtaaagtttgtccacgagatcaaaaaagctccgacccaaattaagagacccgagtttatgaaacccgacccggtcattgctacatccctttgactaatgagaataaaaactctttttcgagaaaaacgaagttttctgagctaaactagatcagctatg

SEQ ID NO: 926 - DNA, 3000 bp, Unknown
  misc_feature (1)..( 3000): cDNA_ID_3059651_gDNA_ID_1620338_Annot_ID_153856 3000 nt of promoter + ATG
ccgaggaacccaataggaaaagacgaggagagaaagaaaaacaacagaccagaagcaggagcagaagtgacggaacaggaaacggtagacttaattcgagagctttggcggaaggtgaaagtatagggacaaagcgagagggcactaaaagctgccattttcgaaggagtagtagctggcctgcgaacatcggagtagatagaggaggacgcatgtgaggagaaaccttgcaaagaagcaggtttcatcatcactgtataacaaaacccaaaagatagggtttttgtgagcaggagaagaattggggtttaaggagggaagcgggaaagagagagagagatgagtgagaaaagtatctctgtgactgtaaactatctttctctcttatcggatgggagacgacgaatacaataaaccttctctcaattgaattgaaaaccggttattcctcaacgggacaggtcctgcatttgtagtggccactatatcaatctgaaataaaggagaaagactgtttggcccattactaggcccattaaaccattcggtaacttaatttatatgcagtttgctgtcaacgtgatggttttaaatgtctcgttcatagcggtttttttatataaaaatgtctcattcatagcaagtgattatcaggtcaacatacataggaagatggtttctcattcatagcaactataagttttttttttctttcaaatagcacgaatgtaaaaaaaaaaaaaagtttagctaagatttttattcctaaatataacatttcagataatcacaaagtagtgttctaaaatagtcatcacaaaatctgaaatcccatgaatatgatacattgatactgaacctgcaattttgcattgtctgaataaattagaaaatatccaaatatccaatatttgactatttttgttggtcaaagtcaacgatgataaagattgtcaaatcttatattactattacacttaacgtgagagacttgaaactggatatatttttaaaccgaagtcaatcttcccatgcttttaagaatacatcattgatcattatactcgtaagataaatcattctgcaaaacataattttccttttaacaaaacaaaaaaccttttatcaacttagtttatactcgtaaaccactttttagtttgatagtctctttataaatggcccgctggaagattggattcattggaccacttgaccaagtcaacatattcttttttgctttatcagaacttaaaaagaaatcatatatatatatatacacttccaagttccaactagtgataaatggatattgacggcttattatgaaaaatcaaagacagcgagttatcacatctacctaattcatacgcaaacaaaaaccatcttattcgatatttatatacgtattttattaaatagtatgaaaataacgttgattatatagtatttttttgtcccccacatagtactatagtataaaataaatgtgcataaatttattctatcagaattcattgtttgggaaattaatttttaaaggagagagtctctctgctccataactccattgtcaaattaattcaatgacaacgcatagtatcgaacattttcaaaccacactgctgtaatcgctattttcttatacactacaaatcaaagacttatcacacacacaccacatctgaactacgtacaaataattgaaaatcatataatctcactccaatttcttgttattatttgagttcaagtagtactagtagtagtcgtatataaagtgtgaattgaagagtaaacaaaggtacgcatctttgacctttcacactcgatatagaaaggacaggctgtgacttaatgttgggtacacagttagtaactcaattccctaggcctcaaccatttgcatttataacttcacccaccggtccaccactttcaacctctcaataagctttatggttgttactaaagaattattagtaaatgacaagattatatgcctatatataaataataatatgcccatacaatagaatcatagaattacattttacatgattgtcaaaaaaaaaaaaagaagtgttacacaaacaaaaaactagacatacataattttttagagcatgttaagccgatctaaaattcaccactactatttttagttaacaaatttctctagttagtttgttatatatctttccatcgttattgttttatttgtgtccatagtagttaaatcacgatgagactgtcattactattcaactacaaatgactataattattacgacaccacatttaacatcttctcctttggtttcttccggtatcacttggtcccagtttatatacatacaactagaaaagcttatgtatgcccagacaataatgtataccgaataaaaaaagaaaataactattataagtgcttgtttaataattgtaaacattatgcaaaaagctttgtcttctttttataaagataataagcataaaacaaagtcactttctataggaatgagtgatttaaccccacaaatttttaactcatgcatatcaaaaagaaagattcttgtatataacataacactactgttactctctcacttacctattctcactaacaaactctgaacaaaccaaaaaaaactcttcttttttctatctttcacgcgttgaagattcttgattttctttcttctccttccttacacgaccactgatatgtgtcggtgactgaaaccatctgttctcttttgcctctgatttatcgatatgttttaaagaaaaacggtgtttgaaacttttgtaatttaaggtactactctgctcttgttctgcatattgatctgctcttgtactactctgcttttgttctcaagattactctgtttttttttgtactgaagtgtctcgtctctttttcttttttttttattgcaggttcatcaaatactcagatcttgtctgagaaattaagctgaaatctgataaatg

SEQ ID NO: 927 - DNA, 3000 bp, Unknown
  misc_feature (1)..( 3000): cDNA_ID_3059710_gDNA_ID_1620339_Annot_ID_153884 3000 nt of promoter + ATG
taagggaatcacgaacgataaagcacataacaatttatgcaatctcaatgggatcaacacagcaaacatatacatcccaacagctctttcaattttaagcaagaatctctttttcaaacttcaacaaaagaaaacatagcaattatcaaaacagaaaaaaacttctaagcgaaatcataatacttaaccaataaccagactagactctacaacaacaacaaataaaaatgtggtattaaacagactacaaagcaaacagaacaggcaatgaaactagacagaaacaaacacaagttaacacaacaaagattatcaacatgtgtaaaagataatgctaccaaaaccataagcaaaaggcataacccaaataaaagagaactccatgactatgctctcacaaagagattaagtaaaaccaaaataactctttgaacttgaagtatgtcctctgcaacaccaaaattaaagtgtgttctctaattcttacaagttttgaaactgtgtttaactgttaaacagaaaacagcaccgtaccaacctttctcacctttcatttcactaacttaacgcttcttcttgctgcttgcctttgatacgttggacttaggtgttgccaccaagtatatgaaacaaaccaccatggagatcacggagacgagtgatccatatttcgccagcaacctctgcaacaattgaaacacggtaatatgagaaactgatatatatttgatgatttcactgggaagtgagaattacacatcggtcattgagttaccttggcctgagattattttggcagcatcaagagcaacatccaagacacaacagaagatagcaatgaaagtcaatattgagaagaaaagaaaaaaactctgactagatgattgaaagaatagtccttagaaggtcaaatttaccacgtccaaaggtttcgttggaggtttgtctgcgaggatatctagaggtagtagtggagttgagtatgcttcctacaaacaataaaaccataatacacgattacatcacaaaaccaaatatttagtaaaataacggccacaacaacagaaagtaattctgattagaaagattaattggggaggtttattgcttcaaccagttccaagaactagaatgaagggagcttaaaaatggcaaacctgaagagctggcttagtggggatgcggaaagtaacgacagcaggagcaccgtagaagactcctttaaccttggcctccaattcgatagaatgagacagaatacctcctctgcacagcaaatattagattagtgacgagagtaaaagctaaagcaggccaatataagattttatgattgaggaagaaactcacgcatcaagtctttcccatgattttgaagtgtttccattaacaacttcaaaagtctttttatcccagctattatctgtcagagtcacatcatacgccgacctgagagcaaacaccacaaatatctgacgcttttagctgacattcattaaaaatctcaaagtcatcgtagccggcagatacaaaattcacaaaccaaatccaaaattccgataaacaatgagatcagatcaaatggcgtttcgtttaactgatacgcatacggtagatctaatgatagctcaagcataatctcctaattctacattgaccaatctctccatgcaatcagaaattaacacggatcggaaatgaaaatggagaaatcaaacggattcgggaaataactagatgaaggatagagaactaacgaggatccttggttatagatgtcgtaggaaacggagacgcgttcggcgccagatttgagcctgttgagagtggctttcttgtgaaccaccatgaacggcacttccgaggtcgcgaacgaagcagaaacaagcatgaaaaccgccatggcggagatcagaagcttagctacagcgacggccatggtttgcgatctacgacgatgtaggtgtttaagcagatgcggaaatagatctacgaatgttttcttcagctcaagaaacctccgacgacgatattaatcaccaccaccaccacccattaacaaaaaaagtcaatgatgggcccaattgtttttcacctgataatgggcctacttataaaagcccattctaataataaagtgtattaatataccgtccaaattaaagaagggaagtgtgtttgcacttgcagtagaacaatgaagataacacagcctgtctcctgccacaatctaacatgtttcttttcccacaccacatttcgattggatccaaatattctctaatacttttataatcatagatgactttgtctattaattatctcgtctaattataaagtctacttaagatgtaatagccaacgattcatatcattcaaaagacatattgactcgaatcaatggaggttttgttaccataatctcattttcatttctaacaatcttttggttggagtaagaaaagagggtaaaaactgataaagttgatttgattcaattaatcaaggtggcgggaaagttaaggaaagaagtcaacgaggaaggaagtactaaaactaaaacaggagagccaataaaaagtaggcaagtgggtggggacatagaataagaattcacagctacccgtaagaaacataattaaaacttggattaaaccgaaaggcatgtgattttcctttgttggttaactaaatcacgtatatctatcgttgaatataagagcatgtggagggatttgcatcgaactctgaaacctgagtaaatcttctcttcccatcatcacatgcttacttatctcttctggttagctctctgagattctctcttccagattgttctttttatattttacttagagcttcaaaattaatccggatctatctgcttcaggttgttccaaaacatccttattttgacatatatatatgtcaatgttgtgtaggatgattttgtgagcaaaagatcatagcagagagagagagagagagaaagagagcatg

SEQ ID NO: 928 - DNA, 3000 bp, Unknown
  misc_feature (1)..( 3000): cDNA_ID_2128528_gDNA_ID_1620339_Annot_ID_153898 3000 nt of promoter + ATG
ttagactaatagacaggtgtttgtttttactttttagctataagctataggtttaaacttgatgaagcctttgaccacaaaaaaaaaaaaaaaaaaaaaactggtgaagttgtagtacatttgacgtgacgatagctcgttctgattgagtgcaagttagagtcgagagatactatatccttgaagatatatatcaacgtatcttcacatgttgttttcattagcaactctatcaattgattatcttcacatgttgttttcattagcaatatactatcatccatattaaagtcaataccgtatatatctcttaatattagtctacttcttctaattatgtagtcttcaatgattgtgttgttgtatccgtataaatataatcttcaattacaatctagaaatacgaatagtcgtcgatctcatctgcgattgcatgcttctttatcaaaggatggttcaaataagaaatgatatacatagttagaagtaacaacaaaacaataaagaaaaaggatttattgtaattccaatacaagtacttaaatggtaatcataaatcaaagcttaccaaaaaaacaataacaaaaaatataagaagttaagagatacaagcagctcacgagaggaagaaagaaaacaataaaatgttaaattaattaggcaacatagatgtggatatgaagagcgataatagagactgtaatgcacgcaaagaagataagagtgtggatgacaatggctgcgccgcttgtttgaaagccgccaaactcaaccactttggtcttccctggaagctgaaacaatactccaggcgtcaatacgatgaacagaaataccgacattaagactggtccccaattcaacaccatttcaatataaagaatcaatcgatttgatgtatatatgtctatgtaaattagaatcgttattgtatgagctaggtagtgtgtacgtttctatgcaccacttttatagagtgattgaattaatatggaggatcgtaatgaaacagtggcttgaaccggacgaaattagaaagtttgcaaggtgaaggaaagaacgattcccctgcagctactcgattgtatcaaagttatatattattatattgtcacactatgtattgattgttgggtatgctaagaatctgattcttgtctcacaaacatttttgttcaccctcttgtttttttgttataagagacatttgccttttttagttcttgttaggagagacatttggcctttgagagtctgtctcttttattcaacaaattcataataagtaaatttctatatatgcctagtaagtataagtgttttccatgaaaatggcggttactcccgacttatttgaatacaaaatcaaatggataagttgatcgaataattaggaaacgacattatgtgccaaaaacaaagatgataaaatatcaattgctgtccatataaatctaaaacttatccatatccgagtcaagccgctcacatctttattttattatttaatttaaacgcatgtttttatttaatttatttgttgatacgaacattttatttaatagcatgttggtctactataaaatctttccatatacttctctcatataaagacacgggaaaacgactcttcacccaattcttgcttgatttccaaatgctaatccttgatgataagaaaacgtataaccaaacaaaccaatcatattcatcaattgatttaatgccaaaagttaaacagtgtcttatgctatgtgcaaagaacacatgcatgcaagttgcgttcatactggcaaaaaatacatgtttgcaaattgcaagttgtgtaatatgtcaaattatatacagataatttttatttttatcacaaactaagttatttttccttttccaacattcataaccccactaaaaagggttggattgaaccttaacgacaggtcatggtggaaccacccccacccaacaggccacattttgattataaagaaaatttactctcgcctatatataacctcctcaacattctatgaaacagcgtattaaaaaatgataattttatctcatttcacttcatttgttacgtcatccaatttccgtcagaagaaaaactgtgataagatcgattccattcaactagttggtaccaacaatgacaagaagtatcacttttgaggatattcactaatgttaactttcgtgaataataactttttaaccaattcaacgtgcatgtatagttggtaagaataccagactattccacgtactaccaagattagtttgtgttttagccggcttgtataaaattaataaatattattttattattcttattttcataaattatgataaatatgctttgaattgctgtttaaattttcttttattaattggtccagcaaagacagatttaaatccagttaacgataatgttgaaaaaggcttaagggataatcaaccttaattaaaagactgaaacaatgacaggcacgccatttaaaaagatggcaggcacgcacagagaattggaaaacagtgacgaaattcacaacagtcccacggtgactgactactactcataattatcaacgagccttttgttctacaatttgtatacgacttcttcactaaaatccacttttttctttttcttcttcctcactaaaatccacttacaagttgtaaccaaattttgatcatattaaaattatcgtaattaacaaactaaacaggaatcgcatatctgcaatagtaactatttcacagattggttttatcttttctatgtcttgtccttttttgtccaatttaagaccataaaaggagaaaatcgtgtgaaagacaagacagatagacagacacgaatattcaaaaaaaaaaatttcttttctctttctaacaccacagatttcgcaatcgtgttttgatctgattcttccaggattctcccggtggcggagagaagaaacaaaggaaacccagaaagcatttttctca

SEQ ID NO: 929 - DNA, 3000 bp, Unknown
  misc_feature (1)..( 3000): cDNA_ID_2128549_gDNA_ID_1620339_Annot_ID_153903 3000 nt of promoter + ATG
aagtaagattaattagattaatgtctgtatctttttttgataaagaatgtgcatatgtgttatcttagtggtggtaaaattaaaacattaaataaagagacagcatgagtgttaaacatgtgtgtccaacaaataaagtgataattggagcgttactagaaaggtaattaaaataaactcaagtgataaacaacttttctggtatggaagaatgattgtaccgtacgtaagtgatattatataaataaccgtgtcgactctcgactctggtactcatcgaattcttaaaaatcatcgataaagtgcataagtacaaaacttgatgagatcagtactactattttcatcagcctgctagaaagaaaatactttatgacttgccttatgttttaagttttatgtggacagagacgacagtcgtacgtatgcagaattgtaatttgtctctttgacaacatggtcctttaatttcttatagtttacattactatgatagtcaaataatcatgagttaaatgtgcaggatgggatgtcatggctgttgaatccagcggatcaaaatctgccgttgattttggcggatcaaggattcgatgtgtggatggggaacacaagagggactagattcagcagaagacacaagtaccttaacccttctcaacgggtctggttcagtgaaccactgttttaaccagtagattacgtatatatctttactaaggaaactgatatttaacatcgttggcacgttgtggacttaggctttctggaactggacgtgggacgagcttgtgagttacgatctgcctgctatgtttgaccatatccatggcctaacaggccaaaagattcactacctcggacactctttggtgggtccaacgttatcaacatattttttctctgatttttttctttttcttatagtaatatatcttctcataatagaatgaaaaatgaaatggaaattgtcaggggacgttaataggatttgcttcgttctcagaaaaagggttggtggatcaagtgagatcggcggcgatgttgagtcccgttgcttatctcagccacatgaccaccgtcatcggcgatatcgccgcaaaaaccttcctcgccgaggtccctagcttctcccttgtaatacccttttttattcttatacaaatatgtgcctacagttatgaaaataacttgtttatcgtctttcaaaaataggccacctctattcttggatggccagagtttaacccgaaaaggtaaatcttcacccttttttcttaaaatatgcttgttattattggcttgatttgattacgtaaaatagttaaaacaacatttgcagtggattagtaggggattttataaaggctatatgccttaaagcggggatcgactgttatgatttagtctctgttatcactggtaacgctacaactaaaaaagtccaccaatctaccattgatgaattaattacatatattaattaacgtaattttacaaaaacataggaaagaattgctgccttaacgcatcaaccattgatctgttccttgccaacgaacctcaatctacttccaccaagaacatgatccaccttgctcaaagtaagtgaaacaaattcccattttttaaaaattattttataaaccttaaattgttcaaattatttatttgtagcggtaagagacaaggagttgagaaaatacaactatggaagcagtgatcgcaacataaaacattacggtcaagcgataccaccggcatacaacatatcggcgatcccacacgagcttccgctttttttcagctacggtggtttagatagcctggctgatgtgaaagacgttgagtttctccttgaccagtttaagtatcacgacatcgataagatgaatgtgcagtttgtgaaagactatgctcatgctgatttcatcatgggtgttactgccaaagacgttgtttataaccaagttgctacctttttcaaacgacaagcttgataatattattaccttgtcattagtttatgtaattgcatgtgcccatattcttcaattgtttccctctaaacaaaatgggcaaaaataaaattaaaatttttatgaaaaagtataccagtctactagcttctaattaaaataatcccaatatttaatttagattttttttttctttaatctataaacaatggggcaaccattatctaatttaccctagttttaggtatatttaagaaagaacactaaaactacagattcgtatttgacaaaaaaaaaaaaaggaaacgaaaaactatagtaaaacaaaattatgtggaatgcttttctttttaattttgtcgtcaaattgtatgtggatttgtcgttgaaaaaaaaacacatggattaaagttgggccagtttgatataactcaatgtgggctttaaaaatacgggtcgggtcttaacccggacagtaaaatagatagctccggtgggcatttgtttttgttttctctctcgagtctcgacaactgagaagcaacggaacaccggtgaatcccggaaagaaggtgaatcaaaaaagcaggtaccaagctgcgaatcttcgtttttttaaggaattctcgatctttatggtgtataggctctgggttttctgttttttgtatctcttaggattttgtaaattccagatctttctatggccacttagtagtatatttcaaaaattctccaatcgagttcttcattcgcattttcagtcattttctcttcgacgttgtttttaagcctgggtattactcctatttagttgaactctgcagcaatcttagaaaattagggttttgaggtttcgatttctctaggtaaccgatctattgcattcatctgaatttctgcatatatgtcttagatttctgataagcttacgatacgttaggtgtaattgaagtttatttttcaagagtgttattttttgtttctgaatttttcaggctgataggtttatatagcaatg

SEQ ID NO: 930 - DNA, 3000 bp, Unknown
  misc_feature (1)..( 3000): cDNA_ID_3059685_gDNA_ID_1620339_Annot_ID_153906 3000 nt of promoter + ATG
ggtacaatcattcttccataccagaaaagttgtttatcacttgagtttattttaattacctttctagtaacgctccaattatcactttatttgttggacacacatgtttaacactcatgctgtctctttatttaatgttttaattttaccaccactaagataacacatatgcacattctttatcaaaaaaagatacagacattaatctaattaatcttacttgtaagtttcaaactcgcacgcacatacgatataaggatatatgtacatatatatatatatatatatatatatatatatatatatatatgtatgtacatacttgttgatgaggcatccactggaagtatacacgtttggttttggcccacgtgtatatgtctatttatagatgtaaatcatcttgaaataatatatgcacatattctccatttgtataacttctgaaaacgggtataaaatgttctcctaataatgtttttctcactatcccttgacgtcactttccactttttcttactttcaaaaatttatgtaatggaaaacagcttcaatgtagtaatcagatattccgagtgcgatgcagtggtttaattacagctatatatgtttttaataatagactttgtagtttggatgtatttcatgcatgttggaacaaagtttgatattatcacaataattatctgcacataaaagtagcatgcgtgtgtatacacaagttaattgacggttaaggcgatgcaaaaaggtaaggaagagtaaaacttacgacaagaattccatgttgtattaggacaggttgtctctttcccccatctccggcgacggctccggctcgtccttccggtatcctttgcatattcaatatgtacccatcttgagtcaccaccttcataatttaacaattaaaatagcagctttatcagttaatatatcgatgagtaatcatcatcaatagctatatagaaaaaaaaagaatgtcgtacgtacatcatgttcttcgcacttgtaaccaaatatgtgaacagaagaagcgcatatgccgccggcagcagtcctctgcggtggctgtccggcaagcctgccgaaggttccacgagcttcaagggtcttgagggaaagagcgaagaagattaagacagataaggctaaaccgattgaaacggacggaaccataaccgaaccggccattgagatatatataggggttatcacgtacgtttataggaaagtgaaaatggttttatatagagagaaggggtgacggataagataatagaaaatggaattattagctatttataaaaatgcaaaaccacgttagcaactatggatagacaaaaacttatttagaaaaaaaaacaatttatggtgtgtaaacataaattaagaattgaatcatgcacaaaaaataagacaagcatttatgaatagtttctagaagtggtgaatcatccactgctatcgtcgatacaacatttactaaagtttctatatataagtggagggatgatcagtgtgaccatgccatgatttctaacttttttgagagagcgaggttattatgataaacatttaaaataatacgtggaactgagatgaatggaaaataatctttataaaagagaaaaaaaaaaatagaagatctcatgataataaaagtacttccatatgttttcaatgtgaagaaaagaatagtaaaggagatacatccaatagcttagtctagaaaagagctgactaattttttttaaaaacaagatctctggtttgtatatttgtatcgattacacagcctagatatataaaacacaaaacttgatggagacaatttcatatcctatatatacacattaatttaatgagtgaatagtaatagcaactagcaaggcaatctaaacaaaattaagaaaagaaaaatgttaaattcctgagatctataataactcataagcaaaaaatatatttaaaaaaatcatacaaatgttgtaataatatcattttgttttaatgtggagtgataaaaagaagataggacgaaagaagaaactgttaaaggcgattgtagatgctgtagggacggataaatggactatgacatcagtttccgttacttgtttcttctcgaactcaaagaagaaagaaaaaaaaaaaaaaaattctacatcggtacgctttcgtttcacaccctgcatgcacacagtgtccggtagtcaaaaatacaaaaaaaagaaaaaaaacctcgagacatgctaaatttggataatgattaataatttgggggtacacaatgttccaaataatttatatacaaagtcttgctttcatattatttgtgtgtccacacttcaacaatatagtattatactattatccctatcccctatgaagtatgaacacactttttatgatacgtatcatattcagaaaacatcaaaaattggtcataactctcacgtggtgtggtggatttgcctcgcctttcgtttctgttttttgcaaatatttaagaatctttggtcatttaggctttaatttagttactttaaatttatttttgttatagaagtattatgttaaaaacagttcgtgttcatccttggactaaccagacgatttgacaaaatccgaatatccgatcataaaattaaataatcagccgttattgttcctctactactacgttttaacttttaagaacttctcctggtactttgatgggctataagagcggcccaatatttcgactttaaaatgggccaatctttggtaaaggcccaattatagtggcgcttcttcttcttcttttcctaaacaagcaatggcatggtttagctggtgagccagtttataggtaaaaaggataatttaagccatttaaaaaaacaaatctttaatggcgtaattcaaaaaacgtgcacacctatctaagtaccaaactctttatgttatataactattgtgacacaatttcaaatttgctaactcccaaaaaaa

SEQ ID NO: 931 - DNA, 2237 bp, Unknown
  misc_feature (1)..( 2237): cDNA_ID_3059681_gDNA_ID_1620339_Annot_ID_153909 3000 nt of promoter + ATG
ctcgtgatccagattgcgacatgaaaattacatgtttgattccatttaatacgtacaatattaattatatgattaaatatcgaacttcttttgttgacaaaacatgtcgtcggtcatatatattacttagttatgtactttttttttgttgataaagcataaattatctgactactactgtagtacatagcttagtggttatttttgtttatgtgtcataataataaaccgttcgaatgcatattattgattttagttatgaacttctggtaataaaacagtagtgttaacaaacaaaaaataaataagagctattaacgcccaccagcttgagccatcccaaaaaacatatatgcccccccaaaaaagttagaaaactatgcgtttgggatcatttcccttctaatcactaattaggacaaagcatggaccacctcctaattgccctaccttaatctgctaattaatcttacttactgaacatttatgagtctaatgattttatgaacaacaaatcttactaactacttaaaggcaaacgtatagttattctcttcttttgttacttgtgcttactgcgtatggatgtttgagttgaagtgatcgaaaagataattgaaatttccttcaaacggttatttggttctattacttgtgtttttgtcaaacgattttgttgtgtctatttttggaaaatcacaaccaatccaacaactaaatgaatcactaatttctttgaatttatattagtgcaaaccaaaactaaattaatttttattaacaaaagagaaaactagaaacactcaaaaccaaagtcggattcactattcgcctagagtcgagatcaagcagtttatagaatattcaaaattcaaatcctcgacaatatttattaagaatcgtttctttgttctgattaattaattaagacgtgaagaaagtgtaagcaaacaatgccgatggaatataatcaaagtggcaaaaggaaaacaacttgttacttttttcagttttgaaatttgaaaagctttatagaagtaagtcatacatgattatacgtgtaaatcaaatactatatgatttcgaattcatatttggcggcagagattaaatatttaattagtttgcttcatccttaaagttccatggcgcaagcaaatatcatgtctgataaatgataactaattcaatcttcaaatttagtctaccttaaagcaaaatgacttttccttttcacatccatgcgatattgctaaaatctattaaactgtagattcgaaatatcttattgtacaaatgggccacgtaatgttctcgtaatctcagcacaattatttgtttataattgttttttcctgtttgaatttatttattaagttaatattcaaagatggtatgctctaaaaagcaattattcacactaatgttacatacttttctcataataaaaccaattatgttcttcttgaaaaagtacttttcatttaatcgattagattaactaccacgataactaccaacaaactttgcattcctttagtttcccaaacctacattaaaataaaataaaaatcgccttatgaataacgaatgctttttggtcgggaatacaaattgagataagaacctgatattgttaatagttttttttaaagatttctttagaaaactgtggagtatttgaccagagttgattgacctaattgaaaaataggtcatcaagtgtagtttgtgttcgaactttaatgtgccaaactgcaaactagagactaaactgaaaaaatggtactatcaaacaagacgtataattgtataaacgcaaatccaagatactagttaaacgagctaatttgagtttgagaattagataaccatatagttgcccaaaaactaaaaacgaattagataacatatactatatattagtacatcatgcagagagagagaaaacaagtttagttttcacatgagttcaaacaattcggtagaaaaaggtcaaccatgcactctcctcaagaaactttgtcattcaaataaatctggtttggatccgttgacgaaaaaacaaaggcccgttaggcaaaagactgatgataatgggcctgattaaaaacggtaccctttattgtcgttttgggataagctggaattttgccgctgtgtttttttctacttatttccgtcactgctttcgactggtcagagattttgactctgaattgttgcagatagcaatg

SEQ ID NO: 932 - DNA, 3000 bp, Unknown
  misc_feature (1)..( 3000): cDNA_ID_2128563_gDNA_ID_1620339_Annot_ID_153907 3000 nt of promoter + ATG
agcaaaagcatggtttcaaaactctaggtaacttgttggtgtggccttaactcaaacaaatagccctatacttttccttctatatttatcaatacttcatactcctctatacgcaggtacacttttttcatcaatgatgtttccagatcgttcccctagtgacgttcatctatatacaacttttattggtgggagtaggaaccaggaactagccaaagcttccacgtaagtgaaatttgactgcttacgaaaagctacaaagaatcgaggcatttataccatttttctagtttcctactttacccaattctgactacttttttttctttctggtttaatcttcgtagtgacgaattaaaacaagttgtgacttctgaccttcagcgactgttgggggttgaaggtgaacccgtgtctgtcaagtatgtgaactttggagatttttttgatttgatcgttttagtgtacgaaagagaagattaccacccttatagataaacaatatatgttatctgcagccattactattggaggaaagcattcccgttgtatgacagcagctatgactcagtcatggaagcaattgacaagatggagaatgatctacctgggttcttctatgcaggtaacttcaatttaaagtttcagtcttatatgatccatgatgatgaatgtagtcagtatatggcctcgagacgattcattgcagttatttatctattgtgcacggaccaaaataaacaggtaatcatcgaggggggctctctgttgggaaatcaatagcatcaggttgcaaagcagctgaccttgtgatctcatacctggagtcttgctcaaatgacaagaaaccaaatgacagcttataacattgtcaaggttcgtccctttttatcacttactttgtaaacttgtaaaatgcaacaagccgccgtgcgattagccaacaactcagcaaaacccagattctcataaggctcactaattccagaataaactatttatgtattgtttggtctgttttcttgttgcatcactggtatggtctgtctaggtagaagaatatgatagggtgagggattttaggattgaagaatctttaaaacaaattgctgatattgtcttatcttgaagatatcatttctgctctctagacaagttggagagaaacttgtttggtttctggtgggaaggggatgttgatgttttaattgttttttctccaaagccacaaccataagatggtcccaaaaaggttgtcctaatgttagatgttagtatctgaatgcccgtttctgttcgtcccacatgctctcccggttccaatttcgtggagtcttatgttatgtcttatcattctcctataaagcgttatctgtcttaacccataatgtcttgttaagtctctttttgataccaaagcagaatcagtaatagagcttgcattgttctctagtccttttgttcctttttgtggtatgcttaataatgatggttacatatcttttatgtttatattagttttataattttaatggtaaatcataagttataacactaacagtattgaaacatcatattggctatgaaatatactaggttttagtaacatcctgaaaatgctaacgaaagtattagccaaattttaaagcatcaattgtgattacactcacgattgtcaatttaaaaaaaacaaaatgtttgttaaaccttttttttttttgtgcaccaacaataacaattttgttaaacaacagtgaagaaacattttaatgttcatacttcatatactgtataaaaaaaattgacgcatgtgagaccaaaaaaagaagttaattaatacgatggtccggtctttgagagtagaacagacctgtgggacatgtactgtattgtgggccttaaaactttagcaaagcataatcaccacctttgtctctaagtaattgacctacttgccctctttatgccacaagtctattggcatgtgtctcaaaaaactatatgctacaatctaaacattgtggattcgtgttttagatggtttgataaaactatcttattagaaatgctattatatggttgggaatgatataattatttattgccatattttgtccttcaacgaaagctacttctaccggacaatgtttcgtattcgtagagcaaaagcttccttttgtcatttggttgtcatttggtatcgtagaagggcagtttggtgaattaacaagacatggaatctaatcacacacaaaaatcaatgtttaaatcttataaacaaagtggggaagaagagacatgtgttaacggcatcttctatgagtcaactaaagtcacaaagcatacactaataaacaagtatcatcaaatcagtaatcatgctttatctataccaaatttaaaatcaaatttcatttgttttctcattatcttacagaaaaagagatttccagacaattggtcataaaaaggaacaacctttcatcaaattgagtgcacattttttgctttatgattgtttttcgtgacccacattctaaatttactgtttctttcataaagagaagaagaagaagaaaaaagattctcagataaattactgaagctgccattaatgctgctcaactcttttgtcattaatgctcttatcatcttcttctctagcttccctagtttctttctcgtctatgtgttgaatccgacaaacagactcacaagaataccgacattctcctccacgatttctgcatttgtcctcactctctcttattcttcttttgctttttgtttcctgacctctttctcagggattttgattataaaccaattcagttccttggagtttgctccataggagcgtctgggatcacgagcttggtttgacttgagttgactagaaaacacctagatgggtctctttcattttcctctcagaatccaagtctgcttctagttctagggttctgtttcaattcatctttgttttcttttcctgcaatg

SEQ ID NO: 933 - DNA, 3000 bp, Unknown
  misc_feature (1)..( 3000): cDNA_ID_2128553_gDNA_ID_1620339_Annot_ID_153904 3000 nt of promoter + ATG
agttcaacatctggatattcagaggctaaagctgttactcttttcctccacaatattgatgcctacatgaaacaaagaaatttgcatttcgtaaaacacacaaaagtggaaaaacaattcagtgaactaacagaacgtacatccaacacattggctttgtcaacagaacaaagtttgccacgccttttcctagcagtctcgaatgctacacgagcaattctgtcaatctgaagaacataaatcaatgcattaatatccatacattgccaatattgtcacagagcacagtgtgaagggttattacctcgtgagcagcgtagatctctgtactaacgccgacttcttcgccattttcattgatcgtaatgcctcttggctctccaaagtaaatacctcctgtgagctccctaacaatcatcatatcaacaccttctgctacttctttcttcagtgtggaagcatcaactagctgaacaagcaaaacagaaacatttgagtttatttacaactagaagcaaaattcaagtgctaagcaaatcaaaaccgaagatacctgtggcaaaactgtagcaggtctcaaattagcaaagactttgagatctcttctaaggtaaaacagagccatctcaggtctcagatgtttctcattcttgtcccatttgtacctgaacaataatcatccaaacctcaagatcagaataaatttggaagcagattgctaaagaaacagcactcacacacataccctccaatagctccaagaagaatggcatcagatagttttgcagccgtgaaagtttcctccggcaatggaactccaaccaaatccaaggctgctcctccgacaggcatctccttgaaatcaaactccagtcctgtgatacaaaagcaaagacacaatcatctactggctaagcaaacacactcgttgtttccaaaaaccattgagaaagagaaagaaccttcgagagatccagctttctgaagcacattcttagcaacagagataacttctggaccgataccgtctccgggaagcagagcgatgttataccgttttttcccaggtgaagcggcggcgcacctaattcgatacggcgcacgaaactgatgatcggtgagagaactgtatttccccgggacgatcttgatcgcattcagactgatgttcgtttgcaaaaacgccgccattttttttgggagttagcaaatttgaaattgtgtcacaatagttatataacataaagagtttggtacttagataggtgtgcacgttttttgaattacgccattaaagatttgtttttttaaatggcttaaattatcctttttacctataaactggctcaccagctaaaccatgccattgcttgtttaggaaaagaagaagaagaagcgccactataattgggcctttaccaaagattggcccattttaaagtcgaaatattgggccgctcttatagcccatcaaagtaccaggagaagttcttaaaagttaaaacgtagtagtagaggaacaataacggctgattatttaattttatgatcggatattcggattttgtcaaatcgtctggttagtccaaggatgaacacgaactgtttttaacataatacttctataacaaaaataaatttaaagtaactaaattaaagcctaaatgaccaaagattcttaaatatttgcaaaaaacagaaacgaaaggcgaggcaaatccaccacaccacgtgagagttatgaccaatttttgatgttttctgaatatgatacgtatcataaaaagtgtgttcatacttcataggggatagggataatagtataatactatattgttgaagtgtggacacacaaataatatgaaagcaagactttgtatataaattatttggaacattgtgtacccccaaattattaatcattatccaaatttagcatgtctcgaggttttttttcttttttttgtatttttgactaccggacactgtgtgcatgcagggtgtgaaacgaaagcgtaccgatgtagaattttttttttttttttctttcttctttgagttcgagaagaaacaagtaacggaaactgatgtcatagtccatttatccgtccctacagcatctacaatcgcctttaacagtttcttctttcgtcctatcttctttttatcactccacattaaaacaaaatgatattattacaacatttgtatgatttttttaaatatattttttgcttatgagttattatagatctcaggaatttaacatttttcttttcttaattttgtttagattgccttgctagttgctattactattcactcattaaattaatgtgtatatataggatatgaaattgtctccatcaagttttgtgttttatatatctaggctgtgtaatcgatacaaatatacaaaccagagatcttgtttttaaaaaaaattagtcagctcttttctagactaagctattggatgtatctcctttactattcttttcttcacattgaaaacatatggaagtacttttattatcatgagatcttctatttttttttttctcttttataaagattattttccattcatctcagttccacgtattattttaaatgtttatcataataacctcgctctctcaaaaaagttagaaatcatggcatggtcacactgatcatccctccacttatatatagaaactttagtaaatgttgtatcgacgatagcagtggatgattcaccacttctagaaactattcataaatgcttgtcttattttttgtgcatgattcaattcttaatttatgtttacacaccataaattgtttttttttctaaataagtttttgtctatccatagttgctaacgtggttttgcatttttataaatagctaataattccattttctattatcttatccgtcaccccttctctctatataaaaccattttcactttcctataaacgtacgtgataacccctatatatatctcaatg

SEQ ID NO: 934 - DNA, 3000 bp, Unknown
  misc_feature (1)..( 3000): cDNA_ID_3059691_gDNA_ID_1620339_Annot_ID_153899 3000 nt of promoter + ATG
tcaatccacacccttccacaaggcactcatactgcataaagatgttaatgagagcagaaagaaggaagaattagcatatgatgtgactttaaagagatccatggcaggagtggtatcacagtcactagctaacagtaagagctctgcctcaaaacgcacttaatatttggacaaagagataaagagtatataaagcataccatgtcataaccccgagaaactttagcttgaaagaaagagtcgtgtgcttcggatatgtgaatacttagtaagcgagaagtagggtagacccttgagcacactgaacaagaggcagtgtgccgtgcattatagtgatcttcaaaatggtccaaagatttcaggcgttcaggacagccaacaatgggacacgagattcttctgctcaaaatagtcaaactcatgaccatcaaatttcgtagataattgtggaccaaatttggaattgaaactagtctacataaatttgatcagtgacacaatgccatattactgattgccacttaaaaatgtggatattgaaagaaaactacatagataacagtgatcaaattcatagccatttggttactattagctagaattcttacacgcactaccaacacatatgtgaactgcacagtaaacaatcagaaataggataaatggcattgacaccaaaccagattcaccaagacaaaaaaacaaaaataacagtacagattcttagcttcagtataccaatcaagagaataacacatcaaaaaccaatgtaaaacacatgaaactcttgtaagcaataatctaatctaaaaattataatcattgccatagttgactgaattgttttcatttactatcagaaaacagtccgcaacaaaaaaaaaatctcatccgtgaagaaggagaaatacctggtttcaatttccacaaatttatgcagatggttgatttcatcttctgtgaagtccaatgtcacctgtaaattaaaatcctcctttatgactcaactcttgcgagcataaatatttgtagatgataaacaatctacagcataatacttataaaacgattactaagcatcatataactacatggagaaggagaatgaaacaatcgtttaatccaaattgacaaagcagacctaattacaagacttcttcaaaatgaaaaattcgctgttacagaataaccaaacagatcgaaagcaaccgaacagttatcatcactaagaaaatgaattccccaaaaatcgtttctggatactaccacaaagaaataattcgacctcaaaatctcagaaccgcttcgatttgagctatgctaacacgaatatcatcatcaagtattcaagtggaccattaacgagagtgtctagacaagaaaccgattttactgaaaattgatcatgtagattgtttattccctaagaaaagcattacgtcagattcgatcgattcagattccataaggagtacctgtttagcaagtagctcgcgctcgacatttccagatgcaaagaacggcgaatccggaggaaatcttcgtcggattgggttccagtacggaaagcctaactcgcctaccgtatctaccgccatacccgtagccatcgcttccggcactgagcagagcagaagaaattcaaaattttccgtttacgtctcacaaacatgaaacaagtatccaactgaacatttcctccgctccggtttattaactggatccttcctggactatatgatatcttgttcggcccaaagaaggcccacgtataagaaacaccattttctttttcttttatatctagaaattcaagcccaaaaatcttatattttccaaaaacgggattcacaccagattaaatttatcttctttggagaaaaaatcctttccaacatgtttcgaacctagcaccttcacttgagagatttaccactacctcattggttaacaccactatatttttaaactcgagtttcttaacaaaactcattatgtttctatcagttgattaagaaatgaagagagaaaaaattctgaatttttattttttattaattaaatcagatagctagaatgttgatcatgtaatatggattcaaacattttctaaatcaatccagattgaacttttttctttaatcaactttatggtggtgtatatagttaattaaaaacattttctatatttctatataccaaagtaatttggttaagctctaatgtgtttgtcacttcgtagtttgtacacgtgctgatataattatatattggtcacctgcaatgagcttataaatagttttctaatttgtggttgaaattgaaatgatctagaaatcttctcactaacattatatgattcttttgtagaaaataacactttagtcatcagcaatttgaatatttgctaagtttctattatcatcaaaaggggaactagtcctgtgatatgataaatttatactattataatttataccaaaagatatctgtatcagaaaataaccaaaattgggtaatattaaatgttaaatttgaatttcggctacaatagaggaaccgttgagctaaagttgatgaactaaattagaacaggtattccgctgaattcatggcgatcagtcaaaatcattatcatattaggatggacaaagactaattttcaaactcatcttttgaatttaatttatccattttgtgtttaacgacactatattatacgtttcatcaagacaaagtattttaaaatatcagaaaaaaattccatgcagatgactgacttaatgaggtttgttaaactgtcactgtcagttaaaccccctaactcaagaaatgtgtactcgcttaagtaaaatttgagaaatccttgttgtaaaattctggcattcacctgtgaatgtgattagattttaatcatcaaataacttattcattaacaaaaaattaaaatataagcacatttatactatagagactagatccagtggctatagataaatg

SEQ ID NO: 935 - DNA, 3000 bp, Unknown
  misc_feature (1)..( 3000): cDNA_ID_2128521_gDNA_ID_1620339_Annot_ID_153893 3000 nt of promoter + ATG
gatcaactgcagagacagatccaatcaacgcgtctaagatatcattatccatagggaattttccactcacaatcacctcagccacttccttagcctccgttaatcgcttagctgaaatcaaatccagaataaaagctcggtaatcgctgctcctaggtgctactccgagctttctcttcttctttaaaacaacctgtctctcatacagattcccagtaactacaaacgcttcagctatgaccctataagccataaaatccggtttgcaatctatgttccttagctcttccaatatataaaaagcatccatttctcgtgaacacttacaaagactatggagaatcaacagtgcaatgattgagccattgatattcaaattagcctttttaacctcatccaccaatctcaagagctgattcgtttcagaacttctacagaaccatcctatatagacaccgaatccaagagtgttcaacgaaacacctttatgacgcattttaacaaacagtttctgtgcataatcataacatccatcagaagttaaaccagctaaaagacgattgcatacatcgggatgaatctcctgacccgttgaaaaagcttcttctaaaacccaaaacgcactctgagctttcctacccagcacaagcgtatcaatgagggagcgatacacggaagaatcgagaaggattttgttcgatttaacctgtttgaaaagagcgtccatggcggagaactgacgagaaagcgaaagagacttgaagatagagtggtaagatatggagtcgtgagagtaacctggttgctgagcagcccaattgaagaaaccgagagcaagagaatgatgattcagcagaaacgggtctatgactcgagccacaagcgaagggcttattgagtgacgaaaaccgagaccgtgaagactctgttcaatcaatggactccatatccgagcagctcgagagcttccggaaacttttagcagctctcggccgatcctcaccgcaagctccgtcgcaggtctcatggccgagaagctgacgtcaacattttcagggagtcgctgacaagttggagaaatcgaatttggttaatgagtccattagttagaagtcaaactcatactggcccagtccaaaaagtgatttttagtgacccaaaactttgcatacgagattaatccttattacttgcccatttttggcccatcaaatatctgcatacacacagtaaatgtcgttcaattgtttacatgagaattgagaagtttcctagaggaaaatgacaacaattcacaaccagacatgacaacaacaacctcactttttggtaattttgcagatggggtctataggagtgacccactaaaagaataagaagaaaagaaagaaaccattacatgttttacggtttcagtaattaaatttttgttttaaaaagagaatatattatctctacttgggaataatgtcgactgggagatacaataaggaaagtgaaaatataggataatataccaaaagaagatatgattgaggaacaagaaagggagatatgtcgacttatcgagtgtccacgtgaatttgacataagtcgatcacattcttaagaaaaaatatagaagataatggagtgggaacaatggaagtgactccagattgcaaaatttagcatttgtaagtttgtttaaatctggcacaaaagtgtattgctttccctcttggtccccatacctataccacctacttctgtttgttcctttgttccttgttcctttgtttcatcccaatatgcttccctgtaatccccaattaacccatttgctttatcattatcttttcatacttgttcaaactaatctaatctgcattgtctatggtgtttgtttcacacagacgcctaggttcaagattcaccatctaattcttaccactaacaagttcctatttgatctacaaaaacaaaactatgtgcttctaacgctaaggagatgggtgtaggataattaatagaggagaacaaacccatagcattacgagttgtaatattaaaaacactgaagcaaacaacagtacctgatgtcgtggacagcttcacttgtctgaatcaactagccccaaagtcttcgttgttttgtcacggagctcccatatgcctcctggaaaaagtactctttctttacttttctgcaggatggtcatcaatccaaattgcattttcttcttgtcggagacagacagatcaacaaagcagactctttatataagaaaattattaccacataatgcagcctcaatcactctaggaatagaatgcagccacaatcactctaagtgagcaaggagccagcattgattgttgtttcaagtaaaataaaataaatctctaggcaaagcagtatcagtgtaaaacacagtttacattgttactataatcaaacacagaatgagtttgtacctatgtaactagatttcaagcagagtgcatactccttctactgtactagagaagaatagaccatttcactcaatttgcacgaaagaaagtctaaatatcaaggtttttacaacacagagcaatagcaaaaattgactatttattcatgctttatctgcaaatgacttgtaaatgtaaacgccacataaaatccactgttttacaatgtagaaactcaaatcaagataaaatagtaatacctgagatgctcgatgattgtaattacggatagctactccatcaatgaatttgaggcgtcatgtaaccacaacagtaggggctcaagtatgtaatggccctccaacttgttcttgatgtgatcttgaaagagaatggccaaccaaaattttgtagctttcttggtgttggtctccactgtcatcaacctaaaagacttgagatacagttgcaaccaattcactgccacagtaagactttaccaatcattgttctctataaaagtcactttctcctctagtattctgtagcaactgaagcacgaaa

SEQ ID NO: 936 - DNA, 3000 bp, Unknown
  misc_feature (1)..( 3000): cDNA_ID_2128498_gDNA_ID_1620339_Annot_ID_153887 3000 nt of promoter + ATG
tattgaaccaattaatacactgtaagttgactgactaattttcagtgaaatcaaacaaccaatactaataaacaacatcataagagaagcacttgtgaagcatataaaccagaaaatgtgtaaacttgtgcttcttcatcaccccaaatgcaagaaatgatgaatcattcgagaaattagaaaagaaaacagcaaaacccagagaaaccaaagtaaatcgagaaatgtagacaattaccttaactggatttccgtgaagaaaaacagataaaaattggaactttccttcggacacagctgaaacgacctgtcggattcgccggccaggctccgaaggaaatagtactaatgtttttttttgggtttaaggagtgaaaaagcggcttaagactctattagagaaggaagagaacgtgagacacaaacactgttttgtttgcccttcccagaatggacggttcagattcaatctctgggtcgagataccctttcagctattagtaagccactctactaaaatttgtactttgtgttaatccatgaaataatgttgacatctttctttttctcctgcatttttatttttagatgatagtaccaaataagtggttgatgctgtcaaaatcgtgagaaaacaaaacttggcccactcaatcccaagaatcagaaagaaaatttttcattgatcgataattggataggaaaattgataacataaagagtacttgcgacaaaaaaagaggaaacacaacaatcccaaaactgcccttgttaaagaccacttcaagcattctggtaatgatggagtttatacagcaaaacttttccggcagcgttccccatagccatgaagccacttccggggctgaagtctaggcagcgagggtaatgcattgtgctgtttggtggcggccagtttgagaagacggttagggatggaacatggactagctttacactgtttttgttcattgtagagactatagctagaatctgagcatcatggttgaacttcatgaaatctatcttggatgtgagattgtccactgtctttatcggctttcttttgcctcccacaaactcagatttcttgtaaatgtttacgattcctctgtcggttccagaagcaaacaatgctccgttaagcgaactgcaaagagaagtgccacaagtgctgccttcatccacgcctttgtataagcatttcattgttctcagatcccagacatagacttgcccgtcacctcctgagctcagcaaatgcttcccatcttcactaaatgctaaagacctaactgaaccattcatctttagggttcctatcagctcttttgtttttgtagacacaagtaagatataaccttcgttgccaacaaaagctatggtgttagagtcttgtgacacctcgaaatattccaagcttttctcctctctaccaaccaaagggccaattttgtcaaactttgccttctccaaatcaaagctgtaaaagaactttcttcttccggagacaatgacctgagagccattgggcaagaaagccgctttacgaatgggacagtcctcaagaaaaatgctctggatcttggtgttcctctttccatcaatctggaaaaaccttaaccgtcgatccaatccagcagtgagaagcagctgagcgttctgatggaagtggacagagtttattggaccatttgaaggatccgctgcattggcatccacaagcttagagtattcaagacgaccagcacacagcttgttaccacgagacttcaccacaagatcttcattcgttcgaaggatatcatcaactcctccatcctgagtatcatcatcatctgaagactctccatcaactatttgagaatctggccgagcccaatcagtccccgggtttagcttagcatgatgagccctcagccttgcaatgtactcagacccagagatcaaaccctcattctcctctttccttagcttccttagacggttgacactagctatatcaacgtttatctgtttctcttcttcatcctcccaggcagcttctccctttctaattgccacaacttgaccattctcttcatcagaaagctcttcatcatcatcaccatcatcctcgtagtcaggaatctgcctcacagcagaacggtctacatgaaacaaagccgaaccatcttcttcttcttccttaccaaacgtaacaggagagtagagtgacccgaatatcaaattctcaagctttttcatttcaaccagttccgattcttctagcttctgcttctccttctctgtctttcttctctttcccctagtgagatcatcatcggacccaatctcttcctcatcttcaacatcttcgtactgtttcttgagctcctctcttttaatacccttacttttcggagcattctgagataagctcatctttcaataccactaattcagagctgcatgaaacaaacaacgataagattcgcaagctcgttatcaatccgtaattaagctctcatttcgggaagaattactacaaaagctactaatttgacctaattcatgcacaaatttgattacaatgaagaaataacttacaacgttgacgagcagagaaaccttgtagccggtaattgtcggcgagagagcttctacccttctggttggattttttagggttttagaatttcattttccaacaaaagataaacaaataaaaattggaacttgtcgttaatacagccctttaatgggtcaacgggtcttatgtctcttgaaaaagcccatgggccaagacaggtaaaataacaatgtcactttcgtaattatcgcaaagtatatgccttgttccatcagattccatttgcccaataaagcccgagtttcgagagttaatacctcattggtgcttttggttttggcaaagcgtgagtgagatcgggaatcaaacatcgcctccgtctctcatttcaaacgctatctccatctccttcctccgccgccgccatg

SEQ ID NO: 937 - DNA, 3000 bp, Unknown
  misc_feature (1)..( 3000): cDNA_ID_3059699_gDNA_ID_1620339_Annot_ID_153891 3000 nt of promoter + ATG
cctgatggttggtggtgtccttctttagcttcagcctcaaggaacttatccaattcattgcttatgagcttcaaatcattctctgtcacatctgcatcatctattgctgggtcctcaaatgacatgccaaatgtcggcgttgctggttgttcatcaagaagtgtttctccaccaagggttccaatggcaagaaatccatcaaaaaaatcactgtttctctcatccttgaagtcttcctctgtgtattgcttgggtcctgcgaaggagctttcctggaacaggttgacctgttttctgaatccagtattgtatctggagccagcacatgctgttgggtaaacctcttggctatcaagggatggatgagctgaaagaatggaatagctgttgcctgaaatggtcatgtgaagagaagagttctttatttctttgaataagtaagaacggccagtgagatttggaaaaagatgcatttgcacaagaactagggaaaatgtctgagttattgtaacatgcacgtagaggcatggcatttactagataatactcgctagggagagctggtttggctgctatctatcactcacaaaatcgaagcgcaagacaaagttggtttcaggcaaattgagtaggtgagctttttattcagctagctgacacccatcataatgctttgcacacgagtgcatgatcctagtcttttatcaggtcagcagattgattttctagaaatggatgttaatagtagtgagattattactcagtcctgaaatgcttgctaagtcctattgctattctcctaggattcaaacacacttcatgttcttgttctacatatttgacaagaaaagaagtgccagagaagtacagtcaaattaccagtagaagcatcttttaatggctctttgctattctcccggaacttatgatgcatccagccccaaaactgccagaaaatgagcttttgtaagtgttagctatgagatatttaattttggtttttagatatagaccataccttcattttcgtgcttcagttgctacagaatactagaggagaaagtgacttttatagagaacaatgattggtaaagtcttactgtggcagtgaattggttgcaactgtatctcaagtcttttaggttgatgacagtggagaccaacaccaagaaagctacaaaattttggttggccattctctttcaagatcacatcaagaacaagttggagggccattacatacttgagcccctactgttgtggttacatgacgcctcaaattcattgatggagtagctatccgtaattacaatcatcgagcatctcaggtattactattttatcttgatttgagtttctacattgtaaaacagtggattttatgtggcgtttacatttacaagtcatttgcagataaagcatgaataaatagtcaatttttgctattgctctgtgttgtaaaaaccttgatatttagactttctttcgtgcaaattgagtgaaatggtctattcttctctagtacagtagaaggagtatgcactctgcttgaaatctagttacataggtacaaactcattctgtgtttgattatagtaacaatgtaaactgtgttttacactgatactgctttgcctagagatttattttattttacttgaaacaacaatcaatgctggctccttgctcacttagagtgattgtggctgcattctattcctagagtgattgaggctgcattatgtggtaataattttcttatataaagagtctgctttgttgatctgtctgtctccgacaagaagaaaatgcaatttggattgatgaccatcctgcagaaaagtaaagaaagagtactttttccaggaggcatatgggagctccgtgacaaaacaacgaagactttggggctagttgattcagacaagtgaagctgtccacgacatcaggtactgttgtttgcttcagtgtttttaatattacaactcgtaatgctatgggtttgttctcctctattaattatcctacacccatctccttagcgttagaagcacatagttttgtttttgtagatcaaataggaacttgttagtggtaagaattagatggtgaatcttgaacctaggcgtctgtgtgaaacaaacaccatagacaatgcagattagattagtttgaacaagtatgaaaagataatgataaagcaaatgggttaattggggattacagggaagcatattgggatgaaacaaaggaacaaggaacaaaggaacaaacagaagtaggtggtataggtatggggaccaagagggaaagcaatacacttttgtgccagatttaaacaaacttacaaatgctaaattttgcaatctggagtcacttccattgttcccactccattatcttctatattttttcttaagaatgtgatcgacttatgtcaaattcacgtggacactcgataagtcgacatatctccctttcttgttcctcaatcatatcttcttttggtatattatcctatattttcactttccttattgtatctcccagtcgacattattcccaagtagagataatatattctctttttaaaacaaaaatttaattactgaaaccgtaaaacatgtaatggtttctttcttttcttcttattcttttagtgggtcactcctatagaccccatctgcaaaattaccaaaaagtgaggttgttgttgtcatgtctggttgtgaattgttgtcattttcctctaggaaacttctcaattctcatgtaaacaattgaacgacatttactgtgtgtatgcagatatttgatgggccaaaaatgggcaagtaataaggattaatctcgtatgcaaagttttgggtcactaaaaatcactttttggactgggccagtatgagtttgacttctaactaatggactcattaaccaaattcgatttctccaacttgtcagcgactccctgaaaatgttgacgtcagcttctcggccatg

SEQ ID NO: 938 - DNA, 3000 bp, Unknown
  misc_feature (1)..( 3000): cDNA_ID_2128505_gDNA_ID_1620339_Annot_ID_153889 3000 nt of promoter + ATG
ataattacgaaagtgacattgttattttacctgtcttggcccatgggctttttcaagagacataagacccgttgacccattaaagggctgtattaacgacaagttccaatttttatttgtttatcttttgttggaaaatgaaattctaaaaccctaaaaaatccaaccagaagggtagaagctctctcgccgacaattaccggctacaaggtttctctgctcgtcaacgttgtaagttatttcttcattgtaatcaaatttgtgcatgaattaggtcaaattagtagcttttgtagtaattcttcccgaaatgagagcttaattacggattgataacgagcttgcgaatcttatcgttgtttgtttcatgcagctctgaattagtggtattgaaagatgagcttatctcagaatgctccgaaaagtaagggtattaaaagagaggagctcaagaaacagtacgaagatgttgaagatgaggaagagattgggtccgatgatgatctcactaggggaaagagaagaaagacagagaaggagaagcagaagctagaagaatcggaactggttgaaatgaaaaagcttgagaatttgatattcgggtcactctactctcctgttacgtttggtaaggaagaagaagaagatggttcggctttgtttcatgtagaccgttctgctgtgaggcagattcctgactacgaggatgatggtgatgatgatgaagagctttctgatgaagagaatggtcaagttgtggcaattagaaagggagaagctgcctgggaggatgaagaagagaaacagataaacgttgatatagctagtgtcaaccgtctaaggaagctaaggaaagaggagaatgagggtttgatctctgggtctgagtacattgcaaggctgagggctcatcatgctaagctaaacccggggactgattgggctcggccagattctcaaatagttgatggagagtcttcagatgatgatgatactcaggatggaggagttgatgatatccttcgaacgaatgaagatcttgtggtgaagtctcgtggtaacaagctgtgtgctggtcgtcttgaatactctaagcttgtggatgccaatgcagcggatccttcaaatggtccaataaactctgtccacttccatcagaacgctcagctgcttctcactgctggattggatcgacggttaaggtttttccagattgatggaaagaggaacaccaagatccagagcatttttcttgaggactgtcccattcgtaaagcggctttcttgcccaatggctctcaggtcattgtctccggaagaagaaagttcttttacagctttgatttggagaaggcaaagtttgacaaaattggccctttggttggtagagaggagaaaagcttggaatatttcgaggtgtcacaagactctaacaccatagcttttgttggcaacgaaggttatatcttacttgtgtctacaaaaacaaaagagctgataggaaccctaaagatgaatggttcagttaggtctttagcatttagtgaagatgggaagcatttgctgagctcaggaggtgacgggcaagtctatgtctgggatctgagaacaatgaaatgcttatacaaaggcgtggatgaaggcagcacttgtggcacttctctttgcagttcgcttaacggagcattgtttgcttctggaaccgacagaggaatcgtaaacatttacaagaaatctgagtttgtgggaggcaaaagaaagccgataaagacagtggacaatctcacatccaagatagatttcatgaagttcaaccatgatgctcagattctagctatagtctctacaatgaacaaaaacagtgtaaagctagtccatgttccatccctaaccgtcttctcaaactggccgccaccaaacagcacaatgcattaccctcgctgcctagacttcagccccggaagtggcttcatggctatggggaacgctgccggaaaagttttgctgtataaactccatcattaccagaatgcttgaagtggtctttaacaagggcagttttgggattgttgtgtttcctctttttttgtcgcaagtactctttatgttatcaattttcctatccaattatcgatcaatgaaaaattttctttctgattcttgggattgagtgggccaagttttgttttctcacgattttgacagcatcaaccacttatttggtactatcatctaaaaataaaaatgcaggagaaaaagaaagatgtcaacattatttcatggattaacacaaagtacaaattttagtagagtggcttactaatagctgaaagggtatctcgacccagagattgaatctgaaccgtccattctgggaagggcaaacaaaacagtgtttgtgtctcacgttctcttccttctctaatagagtcttaagccgctttttcactccttaaacccaaaaaaaaacattagtactatttccttcggagcctggccggcgaatccgacaggtcgtttcagctgtgtccgaaggaaagttccaatttttatctgtttttcttcacggaaatccagttaaggtaattgtctacatttctcgatttactttggtttctctgggttttgctgttttcttttctaatttctcgaatgattcatcatttcttgcatttggggtgatgaagaagcacaagtttacacattttctggtttatatgcttcacaagtgcttctcttatgatgttgtttattagtattggttgtttgatttcactgaaaattagtcagtcaacttacagtgtattaattggttcaataaatttttcataattcatttcttaacatgattttacctcattcattatatttatagatttagatcccttgataatgatctgatattctttctgtgaatttgaaagttgcaggtttccacattgcacagctgtaccatttgtcgagatcacaacacgcaagtctcttagatttagcaagctt

SEQ ID NO: 939 - DNA, 3000 bp, Unknown
  misc_feature (1)..( 3000): cDNA_ID_1009090_gDNA_ID_1620340_Annot_ID_153924 3000 nt of promoter + ATG
ggagggagatttgcgaaaattcacctttcttgtttagcttttttgaacatgagtttttgattaaacttaactatatggaaagtcttgtggagcagttgaaatccatcaagaaggataagttttcttgtaatgataagtggttaacccttaagcttcaaatcaacaaaaactttgaggtaacgcttgttgattacgagatcctgaacaagatattttgggatatataattgtgagcgattgatcgatagtaagatttcggatatatattgggactttatctgaaaacactaaacaataagtcgtaaattgggagtacgtaaaaacattaagggtctaaatgaaataaaacctataatataactaggtttagtgacgtggcatgcacacgtagattaagcaatgccttggcaacacgtatgcaaaaacccatatgtgtgcacctgtgaagtgttccaataacaattcaaaagctccctgagcaagtgagaagagaccacactgagaagaaaaatccttcaggttatcgaaaattcccggattttactctttgggcggtggccgatttcttacgcgctctttttgtggcgactgttgtatacgcgcgagccttcatggacacgaaggcggttggagtttctaaggatacggcggcgtcgatggaagcgtcgacggtgtttcctgggtttaaattctcgccgacggatgtggagttgatttcgtattacctgaagcggaagatggatggcttggagaggtccgttgaggttataccggaccttgagatttacaatttcgagccttgggatttacccggtttgtcttcgaattcgaaccaattgattcttttgtgtctttcttctacttggaatttgattttgttgttcttcaggcttcaggagagatctctattttgggtgcctaagatataaagtttctattttttggctcttggattggaattgacaattttttttgtgtgtttgttctttgcagataagtcgattgtgaaatctgatagcgagtggttcttcttctgtgcgcgtgggaaaaagtatccacatggttcacagaacaggagagcaacgaagatgggatactggaaagcaactgggaaagagcgtgatgtgaagtctggttctgaggtcattggaacaaagaggacgcttgttttccatattggtcgtgcaccaaaaggcgaaagaactgactggattatgcacgagtactgcgtgaaaggagtatctctggtaaaactgttctcgagagtttgttttttcttatagattaattgttaaccattacataagaggtggtgactttggctactttttgagtctctaagaggaatacagtaaaattttaggagttttgtctttggcttgagttgattgattatgtttatgtaaattctaggatgatgctatggttgtttgccgggttaggaggaacaaagaatacaatagtggtacaagtcagaaggcaccaaagccaaattcatcagccgagaagcatgcgaaagtccaaaatggcgctacgagttcagggagcccgtctgattgggacaacttggttgatttttacctagcaggtgaatcaggggagaaactactcgctgagatggcagagtcatcagaaaatctacaggttttgtcacctggcttctaattgttgtatgatggttcttgattgttgtcgttcttcttaatgaatgttatgtgtgtgtggtttaggtggataatgacgaggatttctttgcggatatcctaagagacgaaatcatcaatctcgatgaagcggtgatgacagggaacacaccaaacgaagtgccaacactagaatcagcatcaatggagataagggtacttcctttaccaaacatgatagacaaacaaatgtcatcactgttagaggaaagaccatcacagaagaagaaaggaaaagacgccacggaatcattgtcgagctgcttcgtgggtttatactcgatcaaatcagtgaacaaggcacgatgggatgttattataggtgtagtggctctgatagcaatgttgttttatctagaataagaggcttatggaagtagcgaaaaacagtgtcctagctatgtttgtatcatcttttctcggacattgacaaggattatatgatgtttttgtgtaaacggtttatgttttacacttctacttcaaatctgtgcaaccaaatcaaaacctgaaatatcaagcacagaagaactagtggatatagtttttacacttcaaggcttattaagtggtgtgtttaatgagaatcagagaatggataaatgatgggggcaaattagtaaatgactattttccaaatccgtactgtttatctttctcgtccagatggttgttgcactaagatttgtagaattttctcgccgccattaaacctctgcttttgtttctttctctcttcttctatacgagaacccattttggagaagtcaagtttcctcaatactccgtcaagccgattttattgatctcgatcagtttcgtcaatttttccggtttaagaaaccctagaaaagctgatgattcgataatgaagtttgatttcactgtgataaatcgatctgtaagttggagatacttaatcgtcttcgttatatcttctacgatgcttcaattttgctttgttgtgctgaggaaattcagtttttctgtagtatgtgttatttgcttatccttagtaagttagttacatatgaaggagattcgtattgaaaccctaggtcattgatttgatggagttgctttttatagtatcagcttacactgtttacattgttctacttttggtttttaattagaaaatttgaagtgagtaggtgaattttaagtcgcatcgatctcattttcgatatatgtctcaattcgattaggcgtggtctttggatgtgtgtttaggatggtatgaaatggattgattgtgaaatttggaacaggttttgtaagagctgaatagaaaatg

SEQ ID NO: 940 - DNA, 3000 bp, Unknown
  misc_feature (1)..( 3000): cDNA_ID_3059723_gDNA_ID_1620340_Annot_ID_153944 3000 nt of promoter + ATG
aatattatataatttgcatagaaacttgaaaacaacttatattgtgaaacaaaaaattttatctaaaacaacttatattatgaaacggagggagtatttatctacattcgttataattattttttactttataaatatacttgttttctgttctagtttatgtttgtggggaaagaccgggacacatagtagagaaacattttgcaatgggagagagccttaacggtaaaaacaaagtagacattaataccgaaaggcgattggcagatcagaaatcaaaacaattcaaagaacaaggttgttccgaggaagaaactgaacaagccatgaaagatttcggattaaaaaggttgttatacaatatcaaatactgaaattagaaaatagatactatgaagtaactcgaagcattttcattattcatatatataatgttaattagggcaagactttatgggtggccaaacacatatgtcttcaccaaagcaatgggagaaatgcttcttggacactatagagaaactatgccaattgtaatcatacgtcccacaataatcacaagcactttctcggacccatttcctggttggattgaaggtttaaagtaagctatccatttatcattcctcattatagtagttactttagattattcatccacgtacttgatttgtttctgactcaacttctaatgtgtttattgtatgtatgaagaactgtagacagtgtgattatattctacgggaagggaattcttaagtgttttctcgtcgatcaaaagacagtatgtgatattgtaagtttcactagcacattaccaactttgaaaaatgtaaactaaaattctatttttactagcttgattgctaacaaagaaatatctctatataacaagataccggttgatatggtcgtaaacgcaatgattgcaatcgcagctgaccattgccatgattctggaagtcatacagtttaccatgtcggctcatctaaccaaaatccggtgatatataaacaaatttatgagatgatgagtcgttatttcatgaaaagccctcttgtcggacgtaatggtatgcttatagttccaaaagttacaagaatatccacactggctaggttccgtgtatacacaaatcttcgctataaattacctatacaggtaacagcttgcataaattgcacacgatttttttttttttctgtttgagtgttattctttttattattttaatagcaacctctcattttggctttgtgttttttcttctttagatattgggattacttagtgttatttccctatcccaaagagataaatttgcacttcacaaccgtaaattcaagatggccatgagattggtgaaactttacaagccttatgtactcttcaagggcatgtatgtatcactctcatatttcctccaacattccttttttacaagtattttcttccacttttaatgtatctagtagatatttttcatgccttagttcacgttttaactatagtttgaaattctattgtgtattcaatgcagatttgatgataaaaacatggaaactttacgtatcaagaatgaagccaaagatatggagaaattgtttggcaccaaccccaaatgcattgattgggaagactattttatgatacgcatatccctggcctcatgacacacgtattcaagaaatgaacttcaaatacaagttaatatacgaagtcaagtccaaagatattgttttgcatgggatgaagcctactatatataattactaagtatataaataataaatcgatggaaaatcgacgacaagtaatgttgtctttgtttgcttcttaatgtataatccatatttggaatttgcctatctaaaatccctcggcttgtctttggttatatataaaattggactactcattttgacaagtaaacatatactactttttaagtcaagaacatatactacttttccgacagaatcccacatttctttagttcttttactttgataagcaacgtcatcacttttaatgatattttaagtgaatgaaaaagagatgttgagtgaaggaaaaaaaagaagaaaaacaactagacgtaagtaaaattggactactcattttgacaagtaaaggtgggcttcggtgaagcaagaggttacaaagcaaatggacatcaaccttaaacactagtatataaaaagattttacaagtgacctgcgcttgtagttacctagttcagctaaaagtaaaaaaatgacacaaatgtaatggacaagtactgaaagataattttattggatataaatgatgtaaccactgacactgttgagcaaaccttcacggctcattaaagatttataaaggacagtaagaaaaaaaatatgtttccccactaggctttctatttttagtatcactctaaactctagcgagtgaagatggctaaagtatagctagttaatgcttaatgcgtaatataaatatagttggtatatgattaaatactagtaagtctggttttcaagtaatgcagtttaaatggttcactgatgaattaaaattgacacacaataaattgtttaaacataatataaatgaggaaattaatgttttgaaggaacttcaatacagtataagaatatatgtgtttctcaaaatggtgatttatgtatagttttctagggtctctccttaactccgttgctagacataattggtgttcgtgtataaatgatttgaatctaacaaattgttaggttgaataaaattttgcagcaaatttgaaggtggatgaatttaagagccgttaatatagaagaactgcaaaagtacgttatctatttgtgtaaagccaaccaccaaaaaacaacgcattttggttcctttaataatcatttctttcttttatataaacctaagatacgttccccatatttcactcactcaagaagacatctaaagccatcaaaaatatatccatagaagcttcatcgaa

SEQ ID NO: 941 - DNA, 3000 bp, Unknown
  misc_feature (1)..( 3000): cDNA_ID_2128687_gDNA_ID_1620340_Annot_ID_153942 3000 nt of promoter + ATG
ttgtgaagggctttggtgaccactctcatcagacggttctaaagggaatgcatgagcttgctcgaccactgagtcttgcctttctcttaaagttttttcgattagtgtcttgagaaagttcatcacttgaaccgcatacatcagtgctgtcagtggatcatccatctacaatacaagtgtttctcaatcattttatcccatctgaccccgagttaaacattgataatcaaccttgttgttgcagactcacctgtgtcatatttggtgcgaaaaccatagcgatgttgcgtgaattcatcttgtttagatgttcatactgaacaacatctgccattagattgatggcccaatcaagtagagcagcttctgtaggtggaagaagcctaacgagctcaacattttcctcttctgtttggcactgcatcacctgttcaggcgacaacgaatcaagaacgcttgtcggcagttctctaaaccatgcctgaaaccgaaaaccagaattaaaaaccaaggttcatatataagttttggaaataagatgtgcatatgttacataccttgataagccctgccaaacagtgaacatcgattcgctcaggtataaatcctcggtttaattgttccctaaccgcctcttcctcactattctcagcagtgagtctaaaaatgccctctgcctaaaaaaataaatgaagaaatgattacatggaaagcttataatatattcactttggagtaaactcgatgaagcaatgtacattacctgcaagcctccttgactatataaacagttttgcatcagcaatagtatggttggtacacaattgcctcttgaatcatacgataattgcattgattcggttgataccccaaagactgttgcactaaagtaatgagataccaaaagaggtaagagatgggatagcacacgagagacaatttatacttccaaaacaaatattccgagaagagcaaagttacaattgcataggcgcagtttcacccttttcaacattgatcttatcgattaagcatgtaaatagttggatgaacaatgcaaccttcacagaatctaacaactaagagatagtatctaagacatcaaatatagatgtttgaagacaagtaactatagtataactgcaagaatgaacacattggttcatggctcaatagcccaatcttgtaaatatgaagtgtttagcttccacggaaacacatagctatgagactgaaaaaacagagagagacaagaacgtgctctaatcacttcatgtactgactgataaaggaatcaaaaatcaaataagttcttctcgttttggtttcactaattccacataaaccttaatctgtatacaaccaaaacttagaggttctacaactcgaaacaaggaagccttaatcagaagcattctatatccatctgctcacccaccccaaaattgcaggacaagatcattgttgtgaggagacttttaagagcaattcaataaaaaggtaggatctttggacaatgtacctggcgcttggagctcttctaggaacttcaggctcgaattcaacaggcaaacccaagaagccattgaaacgatcaaaggtaacgtgcgccacgtgtctgacattggtaggccatccaatctccatgctacaaagctccctccggttactcttgcaagaaatcaaagatctcctgaaaatggcaacaagaagagccaacaacgaaatctgatcttccccaccatcgtcttcttctcctccatcggtactgctccgtcttctcaaatcttgttcttcgattgaggcatgaaagtcaacatcttgatcgaatctagcaactgggtttctccggttgtggtcagagctaatcaagagagtcgcattagagcgagaggcgtaagataaagaagaaggtgaaggagaagaagaagaagaagaagatgaatgagaagcgcttggagatgaaggaaagtgaagaacttcagtcatggcgcttcagattttggcaaaggaaacaacttttttggttcaaatcatttgtcaatgaaagaaaaggttttgaattgaaggaaatgtataaacccggaaatagagctcaagatcgaagattagattgttgattcaaaaccctaattagatgaattcggttgccactaatgaacaaaaaaacagagttttgttactactaattaaatttaaataaatgactaaacattgaccataaaaagtggttaaaccatataaaaatagttgaataagataagttttggtaacacaaaaaaaaaagagaatactactgattgttacatatttatgattgattttagttaaactattggaggttttacaattaaattagttaacattaagtattgatataaaaggataaacattgatatattaatgtttacaagtccttatcacttataaatgtggatttcgtttgggggaaaatcagtatactttatgatttttgcacgttttctaaaatgtgaaaccatgttatgttcttagattagtagtatccacgttttcacaaaatataccattcaaacgcttgctctatagtacataatccctatgttgagccagtagttaagaagcattttgctgaatttactaaaacaaagatcaaggattttattgcgttttaaagataaactcgtgttatgcatacaagtgatttgcttacaaaaaattatgtgatatatactcttcctatgggagaaaaaaaaaagaattgaagaaaacattagaaaaacgtatcttattatttgcattcggattgccaattttattataaaatagaaccagcccgacattagaaaatcataatgtgatcgcatgagtgagctagaatcaaatactatatccatgaacgcacgttagagaatcgtgcttgccacacatttggtaacaaacttgaacactataaaagttgttaacaatttttctacagttccccacatactagaattcatatagaaatttcaactaaaa

SEQ ID NO: 942 - DNA, 3000 bp, Unknown
  misc_feature (1)..( 3000): cDNA_ID_3059719_gDNA_ID_1620340_Annot_ID_153946 3000 nt of promoter + ATG
ttcatgagaaaagaacaaattagaatttctttttggctttctgttaacaagatacattgtatgaaatgaatctgacccgtgatgacaatgcaacaataatactagtacggctctaagagtcatagtcaaaagagatggtgattataagacagcaattacgcatgtcaacgtcacaataatgcgtgctactactaccatcctcctactgtctgctacgtcaacaagtggattgcaatcagacggtgattgtgtctcttttcattctctctcttttactaatttctctgataattaaactgagaatgtatattaagaaaaaaaaacaaaaacaagagaggaattttcatacacactaacttaagactctttgtaagttttcccaaatatggattttctagtataaatatgagttcattagtttcaccaagcctacaagcatctctccatctcaaatcatattcacctaaaaatcaggtcccctctctttatatctctaacattcttatatcagatcatattttttggatttcttgttaagtaacaccaatcttttaaaagtgttttcaggttaatataaaagaataatgatgttttcggtgacggttgcgatccttgtttgtcttattggctacatttaccgatcatttaagcctccaccaccgcgaatctgcggccatcctaacggtcctccggttacttctccgagaatcaagctcagtgatggaagatatcttgcttatagagaatctggggttgatagagacaatgctaactacaagatcattgtcgttcatggcttcaacagctccaaagacactgaatttcccatccctaaggttcactcttattctcaatattaactctcgtacatgtcacatgcccattttcaccattttagatatacagttttgatactttactttgcatttattttgctatatgtaattgaggatattgttttaatttctttgggttttttttttggctaaatgagaattcagtgtctttggttcttaaaaaaaaagtatttgttaatggtaaacgctaaacgctatttgagtttatgttttttcaagaactgaaaacgttttattgaaaatatacactttttttgctatttatagaaaggcatatcacatctagacgcaaacgcaaaattgacttttgaagcaaccacaatcttaaatgcaatgaaaaattacttcttcttttttctttcttgacgtgtctttttaaattttttgcaggatgtaattgaggagcttgggatatactttgtgttctacgatagagcaggatatggagaaagtgatccacacccatcacgcactgttaagagtgaagcatacgacattcaagaactcgccgataaactcaagatcggaccaaagttctatgttcttggtatatcactaggtgcttactcggtttatagttgcctcaaatacattccccacaggtaataaagagttggaatcatgttctgttttttacactttttttgtgtctcataatttaatgttcctttttgtggggttcatagactagctggagcagtcttaatggttccatttgtgaactattggtggactaaagtgcctcaagaaaaattgagtaaagcgttggagctaatgccaaagaaagaccaatggacgtttaaagtggctcattatgttccgtggttgttatattggtggttgacccaaaaactatttccgtcttcgagtatggtcacggggaacaatgcgttatgcagcgacaaagatttggtcgtcataaagaagaaaatggagaatccacgccctggcttggtaatatgattaaccttatacaatattgcattttatgacaatgatgttatttagatttaatacattttattttatgatctatattaaccacaggaaaaagttagacaacaaggagaccatgaatgtcttcaccgggacatgatagccggattcgcgacatgggaattcgacccgactgaattagaaaatccgtttgcggaaggcgaaggatcggtccacgtttggcaagggatggaagacagaatcattccatacgaaattaatcgatatatatcagagaagcttccatggattaagtaccatgaggtcttaggttatggacatcttctaaacgccgaggaggagaaatgcaaagacattatcaaggcacttcttgtcaactgatgatcatctctacacaagatgccacgaaaaatatagcatatttaatagattttatttatggattataatattatagcatattataagtttgtaagtaagatgaaaaccacttgaaagtcattaatttactataaaatacttgttatcttccactaatagtcattaaatcgaaccaaaaatgtcacattggtcaaagccgtgtgaaactgagagagaatgatgacgtcatcaatctgtgtacataaatgttaatggacgtagcaaaattcgcccaaccaaaacaatccgactaaaagggaacttttttttttccgtctgatctaaaacaacaacaacgaaagcttgacctcgttgaaaatcttcgggtgagatatttttcaaagctttggtctttgtctgaattacgctttttggattctccgagcttaataatagcgaaagttcgtttctttgggttcttctccgcgattctagggtttttccaatttctcgccggcgttgaggaattttagggttttcgtgttgtttgtctttgattcatggcttgggcttagatggaaaggtgagaatttctcgaaatcgttcttcaattcttgagaattgcgattttttggtctttaagaatccgttttactagtttcaaagttaacacctttattgctactatgtgcttcccttatatcgctcttgtggtgtgcgtaagagtgatgatgttactgtatttatggatttacgaaactctcgtttttttatttcaggtttgagttgcttttggagtgaagcaagtagaccaaagggcataatg

SEQ ID NO: 943 - DNA, 3000 bp, Unknown
  misc_feature (1)..( 3000): cDNA_ID_2128697_gDNA_ID_1620340_Annot_ID_153945 3000 nt of promoter + ATG
tgatactatatcatatatgacttctctctaggatgcccactcttgttaacttataattttctgaaaacagctgaattttgcgcaagaactcgataaatctctgtcagacgcaatcttagatggttataacatcttggtaagttgcaaatttctatagcaatgtctagttttctagtctcttttataatctgaatgtagaatgaatgaaagagtccttttttcagggtcttaaattgcccaaagcagtacatcgccctggtgtgggaaatgttgactattcaggtccaacctcatcatgtgtatctggtctttcattcgagagattggacatgagaaaattaaatgagagtactccattgtataagagggtactttctgctttaattgaggaagatgatggagaagaagttgtacaattcaatggagggaagaatctgtctcttcattacgctagtgacgattctcactgtggttcatgtacctatattgacaccgagttcagagagagagacagaatggaatttgaagtagagtcaagtggggattttcagacccctaagagcggtttgtttgacagattttccagtgagaggagtgttgtgtctaaccctttcagaaatggtggcatgtctatatctgtgcatagcaatgaacagtggattggggatgatgatctttcacattcagacgctgcactcggtaatgagacatattcaaatagtctgggtcaattgcaagctagggaagtgaacattcccaacttcccggtttctgacacccagtatcagcttatgtctttggatgagcgacttcttctggaactacagagcattggtgtgtttcctgaggcaatggtaggttttgcatccagtcatttaatctttaaagaacttgagctaaataaaaaaaaacttgttactctagcttggtcactgatttccagtttttatttttatcacagcctgatctggctgaagaaactatgagcactgatgttatggagttgaaggaaggcatttatcaggaggtaaacgcaaaacaaatatttcatgctttacgaggaagactttttgtcagatcgtcattaaactttcgtctttgacgcatagtaacctttctcatattccatttctgaccaatactagatcctaaacaagaagaaaaagctggagaagcttatcattaccatccagaaggggaaagatgttgagaaaaggttagctttggcttttttagattcatatcttccaagttacacctttattttcgctaagatttgaggtttacctgcaggaaaattgagcatcttgctatggaccaacttgtggaaacagcccacaagaaaagaatggtaataaacgaaaattaatttggatgaatgattgtggaatgagaaatggggttcttaattatatgatattgctctgaaaacaggcatgccgtggaagtaaagcagctaaagtcaacaaggttacaagacaagtggcgctggggttcattaggcggacagttgctaggtgtcgtaagttcgaagaaactgggtttagctgtttttctgatcccgcacttcaagatatcttgtttagttctcccagcaacgatgcaaaatcatcagaaaatggcggctctggaacagccagtaacacgctcaatgaaccttctaatcatcaggctgaggccaagggttcaggtacccaaaatctgaactttagatgttgattctataattgatttttctatagtttcttcttctatggtgtatgacaacatcgataagattatttcagattaatgcgagagcacatccttgataaaatagtttgacagtggttatactttaaatctttttgacggaaaatttgatgagttatttgggttttgtaggtgcagtgtctagtacaaagaggagagaagcattgatagatgatgttatcggatgcgcttcctccaaagtcacaacgagcaaaggcagtgccgttcttagtggaggaggggctcaaggtaaaagaagcgagagagaagatggtttcaggaacaagaacaaaccaaaaccaaaagaaaacaacaacaacaacaacggaaaccaatcaaggtcgacaacaacatcaacacacccaacaggaccagcaagcagaggggcctcaaaccgaggagttacctctggagatggtgcagtcgacgacgaagctcccatagatttctcgaaattagcgttccgtgatctagacgaaatagatgaacaggcagatcttggaaactggttcgagggtcttcaggatattgatacagcaggtcttgatgaggttcctatggatgatctctcgtttatgtttggataaggagaaaacaaaccacatttgacaggagcgaaattggtcttgactcttgacacaaacacccacacccacaagtattcttatgattttgttttctaactagttttgtatataaagaaagatttgtagtgaataggaatgattgtctgccttctaggctgagtattgtttcaactatgatttaaaatatatatataacatatgtattttcttcttcagagtatctctttcattcataccttccctgtggtgcgtataaaaaagcttagtacaatctacttaacatttcttgatttggttaaacaagttttgtttagtgtttaaaacctttctgaagaaattaggctttaattcgcagaaataataaggcctataatattttatacgtttctatgtgggcctaaatactgggctttaatgagaagaaataattagggctagagttttgtcactagtggttcatataagtaacagacgattgcttgtgacgccgttctttctctgtttccgaccttcccacaggtaaatcaatcatcttcttcaatacttttgtctttccgtccatcggaggattctcaatacgtttcgttacaacactgttaaatctcattttcctgaatctccgtttacaggaagcaaatttgtttcagggagtaccaaaatg

SEQ ID NO: 944 - DNA, 3000 bp, Unknown
  misc_feature (1)..( 3000): cDNA_ID_2105845_gDNA_ID_1620340_Annot_ID_153929 3000 nt of promoter + ATG
cgtctctttttctagccaactggtatccctataaaattggcagctggatttgttggtcaacttgaggctagagaggcagctggtcttgtagttgacatgattaagcagaagaaaatggcgggcaaggctcttttgcttgctggacctcctggaactgggaaaacagctttggctcttggaatctctcaagagctgggaagcaaggtaattttggatgtctcattttgtatcttctttgttacattgtttccacatggcttcattgtatgaagcttttttcttttacttttagcttattttatctggattgtttctttcttgcaggttccattctgtccaatggttggatctgaggtttactcatcagaggttaagaaaacagaggttctcatggagaattttagacgtgccattggtctacgtatcaaggaaaccaaagaagtctatgaaggggaggtgtgttgctatttgcggtttcttttgctgtgttcttatgcaatagcatgtctcgctaattggtttttgacatgttgtccttgtgttctaggtcaccgagctgtcaccagaagaaactgaaagcctcactggaggttatggtaaaagcatcagccatgttgtaattacactcaagacagtcaaaggaaccaaacatctgaaattggatcccactatctatgatgccttgattaaggaaaaggtcagttcttggcatgcgatgctatgctttggatgtggtattttcccctaagtttttgcttttcagtttgttccaaaacctgcttttcttttcacctttttggttttctaacgatgtcattctgtggggacaattgtgtatgaatttgctgattactttgtcattctgattggtttctttttatatttttgctgtttgcctctcaggtagctgtaggagatgtaatctatatcgaagcaaacagtggagctgtcaaacgggtaggtagaagtgatgcttttgccactgaatttgatctggaagcagaagaatatgttccacttcccaaaggagaggtccacaaaaagaaagagatagtgcaggtttaccttctttgacctctcccttctgtgtagagtaattattttctttgttgatttattatctgttatgtattagtttgtatgtgtattaaccttagttcctaagtttattaagactacttgttactcaactagaccatatacttttgactgataggatgtcacactccaagatctggatgcagcaaatgctcgacctcaaggtggccaggatatactttctttgatgggccaaatgatgaaaccgcggaagactgagatcactgataagcttcggcaagaaattaacaaggtgattttcgctagtacatgggtgatttttttaagcatcttactttctcttttgcaaggtctaatatttttatatgccattgtaggttgtgaaccgatatatagatgaaggtgtggcagagcttgttccaggagttctatttattgatgaggtattttcccaaataaagttttttttcattccactattgatcttgctcaggactcaggagcagtaagaatacctttgtttaattataaaacctcaggttcatatgcttgatatggagtgcttctcatacttgaaccgtgctcttgagagctcattatctccgatagtgatatttgcaacaaatagaggtgtttgcaacgtaaggtgagaagagcgctagaccttgatagacattttcctttggaaatcttgtgagtttttgttaacttggtactgtgatttactttatttgcagagggactgatatgcccagcccccatggagtccctattgatctattagatcgattggttatcatccggactcaaatctatgatccctctgaaatgatccaggttactcaattgtcatttagcttttggatttcaattactacgaacaacattctaatagatttatcattttgttcacagattatagccattcgtgcgcaagttgaagaattaaccgtggatgaagaatgcttggttctacttggggagattgggcaaagaacttcactaaggtactgtcatcattgcttttctaagcaaaatttctgttcgtgaatctaaatactaaaaccttttttgtgctttcactctcaggcacgctgtgcagcttctgtctcctgccagcattgtagcgaaaatgaatggccgtgacaatatttgcaaggtagatttacttgtgaaatcttagaacaataaaacaaatgtaaaatatgtggatgttatgttattaatccttcatcttaaattttgacaggctgatatagaggaagtaacatcactctacttggatgctaaatcttcagcaaagcttttgcatgagcaacaagaaaaatacatctcatgagaagaacactaatcgcacattttgttgaaacatctcataatttttctgtcgttttattttgtaatgtcggaatatggagaatgtctaatgggattacaatttggtttctctgaattcatttatttatgtgctatttttttgtttgtggtgctaactaatgaaaactgaaatatggtttcacgtgtatacacatacatggtcgtgagattcaaacttttggtttcatattgagttcccttgttacattacaatacacttattcaagatcaaactgtttgtggaacataacattgtgtaattgtctatttggttactgttaaaagttgatgttgcgccaaaaagaaagaaaaaaaactctattatcagaacagagtcagcagagtcggagattataaaacttgaggatcaaagtgggaggagtaccataagagggtgtccctgatccgtacaataataacaaggtcaaatgtataaacaatagaaaactgtggggtttttgggtaaagacttatcacggttgggaacagagacaatcttttgaataaggtgaaaccaaaagactagggttttgtgtgacaaggaagaagacgaagacggcgatg

SEQ ID NO: 945 - DNA, 3000 bp, Unknown
  misc_feature (1)..( 3000): cDNA_ID_3059738_gDNA_ID_1620340_Annot_ID_153932 3000 nt of promoter + ATG
tagtcgggcactacacatgcatcggaacaaatgtatccagtatatggatcacaaagctttagaatgataggagctctgcatctggagtgacattttgcacagaaggggcgagaactatagctgttaagaaccacttcaactctaacattattgtagttgatgatgcgtcctggcatgagacgtgaaaagtctccaagcacacattcaatatgtgcagtaaccacacatttagagcaagtgtagaaccacttacttggatctgtttccgcctcgcaaatatcacaccaatattttccggttgcattttcgccatagcatagggaaagaggatgattgtcgcagctgtgctttaccgtttttggtaaatcagtacagtgtaaatccagatcaaagtcacaagtgtcacaggaaagcagataaccatctatctctttataacatgcatcacaacagtgatctttcttatgttcgtaatatagaggatgtctgtgaccatcatgaatgaccggttcagaacgcgaaccacaacgtacatctagaacccaccaatcagaaacgtacctgaaaccagtagacttcgttctacaagcatagcagcgaaagacatcgtagaatctaaaatctttgctatggaatgtacgaggtggtctggaccatagtgtgaatggttttgtgtggaatacatgtcgtttcttttttggatgattagcgcatttctcatggagaatgaaacgacattcctcacagttgtagatcggatcggaatagataggaaggacgcatgcttcacaacgtgagccttcgtcacgattgatattgtccttgttgagtcttagattatgttcttcatgactgaaatgcttgatcaagttatcacccaccactttgaacggcacaatatcttcgtcatcatcatctggtgtcccttcgagttctaccccatcccatacgtcttttcttgttgcacatagtgaatgagctgcatagttcgggcaacgagggcataaataagccccatggtattgacttatatctttgcgacaaataccgcatctcgagtacccaacaccgagatgatgggtgaaagagatgcgatgatcgtgacggttgatgtttatgacacgtggtaagtcaatacaagttctatggacaacaaacccgcattgaacacacatgtaaggacttcgatcaccttgcatcccacaagcattacattcaaatgagatgagtcttgataagaggacaagtcgatgctcgtgcgtcttatgatgctcgatagcaagtggtggtggatcttttgtacagaatcgacatacgctgaagttgcatatcgagcagcgataaagcactttgtctggtcgttctccacataaaagacatgtctcttcagcatcacttgttagtgattcatattcaagtaacttgagagaatgttgaggatgagaaggatgattcacctcttgggaaagattgacacactcgacatgaaagtggacttcacattcaagacatgcataagaacatccaccattatagcccttgcaaattccgcatctgcgcctacccggctttgcgggttctttcaagaagataactggatgatgatgagactttggatgttcgatagaaaccggcaatggatttatcccacaagtgagatccacgatgaagtcacattttgatgaacaacgataaccaaaagcgaaaaaagtcttgccacatagattacatttacatgggttccttagagaattgtggagtttaagagtgtgttgaggatgagaaggatggttgataatctccggtggagcctctgcgcactctttgtggaagaacaaactagtagaggaaggctcgttgcaacggtagccgccatagatgggaccttttatattgcaacctttacaagaatcattaacaaaacgagtcgaaatggtcaaaggatatttgtgagttggtagtattttgggtggtagatccattttgtgattcaaatgcggtttgttttctggagatctcaagataatactacatcatatgaatgcatctttgtaaccccaatataacaaagacacgtaatgtgtgaacaccttaacgattcttgtctccaatgaatcatgtgcaatcgatcctgttttccacgagatgattataatatatagttgaattatttcatattcctaactgtttacaacctgcacacattaaattatcttatcatcgttatagctacctatgaatataatagtatgaaaatacccaataaattaatttcctaaactcaacatctaacgtgttaacaacagctaagatatataattatattgaatcatttctgcaatttcatattctctatcgtgacactcggagtcttgagatcgctagatttctttgaatactatgattggtaaagtcgtgtgtaaaaaagttagaccgagacaaaacgaggcacaggaagaacaataacagttgggctttttccagataaggcttcaccttttaacaatcaaattctacatattgggcctacgaagaggttcataagatttgaatagacaattagaaaaacagcaattatgtgacaaatagtgttttattctaattttggatgactatcggtgaaattttaattttaatcatcatataacaaaacaaaattccaaaacttcaaattctaaaatcaaaatttttaaaataccatacaatttctttttttttaaacaattgtatgttttgtattgacaaaattagttttattgattagcaaaaaattcgtttaagaccttaaatttgtcctttgttaattgttataccaaattttagcgtaaagacaatctcttgaaggagaaaaggaaaacaatctctctttctgtgacctttcgcaacttgtcaaagcaccacgaccttctctctacggagttgagatcaatccccccaaatctcggtgtggttcctctagggtttttgatcggaatcggaatcgataatctaaccggcatg

SEQ ID NO: 946 - DNA, 3000 bp, Unknown
  misc_feature (1)..( 3000): cDNA_ID_3059734_gDNA_ID_1620340_Annot_ID_153935 3000 nt of promoter + ATG
actacaataatgttagagttgaagtggttcttaacagctatagttctcgccccttctgtgcaaaatgtcactccagatgcagagctcctatcattctaaagctttgtgatccatatactggatacatttgttccgatgcatgtgtagtgcccgactatcaatacagctaagacaactatgtagctgtttatttcactctattgtttctcgtaattttttggatgtaagagtttatttccaactacaagtgctaagcattctggttatattcatactgtgttcatcagtacaggcaggattaaactgtatcgatgacatatataaagtcgtaacaagttatgacaaacttgctaaaaaggtagtagcaactaatatgatttagttaatgaaaacatagacagaaatgatggaaacagatatttgtgaatcagaaatgttattaaacaaagatgaaaactgaagtaattttaacaacaaaaataacgaatatgtgatgtacattgcaaatgcaaaaattataaagacacagcggataaagttttggaaatacagagaacaaactcactcacgtgactaaatctaaaagacaaggcaagagttcaatgaacctctgtatcattttgattttgacatttacaagagttacataagcaaggaggaccatgacatgtaacttcaaactcacagtcattttcatgacaaaaccaaggcttcaaatcgaaatgatgcgactgagttgatttacaaaaacagtggtccgtttcagtataccttagataaggccgccagattttaagatctgcatgatggtaaagtgattcctccgcagaaagatgcgattattatgtacagcaagaaaactatcaagcatgtcaacaagaccctgccgaacacaaacaagaaaagcagttttgttgattaataaaagtgatctggaactcaagcatcaaaacaaaacaataatgaaatttctttaagcagaggtggaatcaaggcagtgtagttcctatcagccaaaaattagatattttgtcgaggagaatttcccaaaatcgaaaataatgttgaatcttagaactactgtatctctagtttaagaaacatatcaataaactatgctgcaaaggcgagttgaaacacctagaatgtagaagagcgtatctcttagttagcaaagaaaaggaatgaagagaatctagaagtgagagagatccttacaggagcttagcatttttcatccaaagagctcggcgaaggcgcttagattgcttcctgaagtgaaacgagctatcttgcattgttgctgttttatcaacaagaagctcaatcctatcacctctttccattatcttctcaatgttctctaccatgaccgatcgaatctgtaaacacgataacacaacaatgagataacaaacttcatctttcacccaagacagatttaaagaagcctgtgtgagccaagaaggcgtaataactcataaaaattcaaccttttcaatggatatagctgagtaatatctagagatcatacgaagaaacaattatacctcactgacttctcctctaacacgattgagagtatcaacactaggattactagagaagaactccatctgctgatgcaaaacccttgagaattcatcattcattgcataagctggagcattatgagccactttgccatagtttttcatgaatctcatatgaatctcttccaaatacgaaaatggaaccctccctgaaaatccaatcaccaacacatcaaaacataaaactcagaatcaattacaaagactaaatcttcttaagagagattacgattcggagaaagtgaaaaatacttacttccaaaggtatcattggccatacagagaaaggtaagaccatcagatctaagaatatggaagatataacgatcttgagagaaacaaagtctttcatcggagatttccggtgaaagcttctcgaggatccgtcgcaccacggcgcctgtgtttcccgtaacggcgctgaattcagctaataccacggtacctctcgctacaacagcatagacaatcgccatcggagaatcttcaattagagtgattcgatgacagagagtggagatcacgcgctccggcggcgagaaagttcaacgtcggctttgctgcgatcagaacagagtataaaaatgcgaagttataaggttaggtgcaaacgtttcgaatataaccccttgttttattgttacgtttttaattgtcacctaaaatattattttgttacattttaaaccctgatgcatcggtttacggtttaccaatttattaggccttggtaacttatccgaaaacaaaccgacccgaaattcacttttcggtttgggttcggatactccaataataacttgatcgtttccttctttttaatttcgattatccggttcggttcgagtatagcacgaataaaccgaattaaaattaaagccctaatttaaatataccgatcgagtcttcggcgagcttacttcgccttgaatcgagtcttcgacgagtctccggctgcgagtttctcttgctccggcaaacagacctgtcattgcttctctctccggctaactacacaggcgagcttctctatttattttcttctgtgtctccagttgcttctgatataatgaatatgctcttgaagcaaattgtttctctgcttctctttctccagtgaattgtttgttgtattataaacgaggtttaggaattgggttaataatattggaggattgtgtttgtattctgtgtccgacgaacaaatgacatttccgatttctattgtgctacgagctcagtgtttagaagggttttgatgttctctattgaatattcatgttatgttagtttgatgattagatgattttgctttgcaattactgtgtttttttgtctgactggctctgatattatacaacgtgtttgactccgattggtatcaatcttcttcttcgtcttcagaagc

SEQ ID NO: 947 - DNA, 3000 bp, Unknown
  misc_feature (1)..( 3000): cDNA_ID_3059725_gDNA_ID_1620340_Annot_ID_153941 3000 nt of promoter + ATG
tctttcatgcgtcataccaacaatggacagtcttacctctaacactcgtaactataacgaacggctatacttgcatcactctgtcattttcgattagccttataccattaatctgagagaaatggtgatctatgagcatcattaatagtgatctattgattgtgactgcctctgcatctagagcagaattgacaatcctaacttcggctgcaaaagcaaatatgacaaagcaccaatcctaacttcccattcaaggaggtcattaaatgtattaaattaggtttccttgactctagtcgattaaaacattgtagtacatccacatgtgaatctataaatagagattgatgcaaaaaggaggtcattttgtagtcgaactgttgaagcaccagaactgtgagactcagtgatagtacaacccaaattaacaaaggcagataaacaaaaaaaaagttaacacaataacaataaacaaaaaaacttagatgccataacaatataaaatacttaacaacccaaataaaaaaataatgacatatgaataaaaaaaatgtgaacacaataacattaaacaaaacaaaaaatatagcgcgtaactttattcaactgtttatacgcataatggattgttgcaagtagaacgacatgatcttcttatctccccgtctttgggcttactaataactctcaccgatcccaaattcaccattgcctgaccaaacctaaccaagaaatcgttaccgttggctatatccgtcaccatcttacttgtcaaatcgtcgatggcaagtttttgatcgatatgaaggactccacggctaacttttatctctttgtagaaagatacatccatagtattcgagctagtagcattttgatccagactaatgatgccatcggttgatgaactcttagggcatttggcgcttagttcttcgaccaatttaggatccatagatggatcaggcttttgcgtgttttgaaagttatataatctgtccataatgaaggaacaatgtgtcactccaatcgtatgtccacctatacatttataaagttaaacgcaaaacaaatgtcactataaatttagaaaaccaaaagatttagtagttgtttttactagtcattttagaaactaaattcaaattcggtagggtgatgtttgacttgtaaacaacaaaaaatatatgatttgaatttaatatgtttacttcacataccaagaagtagaaccatatcgttaaggctaagtttcctctgatcaaatttagcagcagtttccgcgacggtcatctttggagacggcaaatcgacaagcaaagccgaagagattttaccgtccaatcgtcctgttggtatctcatatcgtgttttccctccgcttgccttcaaacaaaaatgtaaattatatttttgaagttgattaggaaaacatattatgtaaaataaaaggttgtagataaaagagaggtgtttacaagagtaacaagatctctagtcgcgagagctatgatatcagcacaagaaacgaccctgtcacattctttttcgaccgcagacttaatgtcatctatcacttcgtatccgcgtacacttagatttggtgacgcctttttctcactgttcgaaccatctagaagaagcgatgcatcacacccctacatacatttttgatacaacaaattaaagatcaatatttatttcttttgagactctctaggatattctagagaaatttgtagtataatgaagtatcaaccaacttacgttgctaaaacaatcgtgaaaataaaggcggatcattgcgggtgcaatcgatgaatccttgatgaatgcctctccaacaactttagatacgatgttttcgacgttttggcaattttgactgtagaatccgagtcgaagctggccataacaaccatggccgaagctaagtagagcaagggagaggatcaatacttcaatggtcgagatcttcacggccatttttagttgaaatttctatatgaattctagtatgtggggaactgtagaaaaattgttaacaacttttatagtgttcaagtttgttaccaaatgtgtggcaagcacgattctctaacgtgcgttcatggatatagtatttgattctagctcactcatgcgatcacattatgattttctaatgtcgggctggttctattttataataaaattggcaatccgaatgcaaataataagatacgtttttctaatgttttcttcaattcttttttttttctcccataggaagagtatatatcacataattttttgtaagcaaatcacttgtatgcataacacgagtttatctttaaaacgcaataaaatccttgatctttgttttagtaaattcagcaaaatgcttcttaactactggctcaacatagggattatgtactatagagcaagcgtttgaatggtatattttgtgaaaacgtggatactactaatctaagaacataacatggtttcacattttagaaaacgtgcaaaaatcataaagtatactgattttcccccaaacgaaatccacatttataagtgataaggacttgtaaacattaatatatcaatgtttatccttttatatcaatacttaatgttaactaatttaattgtaaaacctccaatagtttaactaaaatcaatcataaatatgtaacaatcagtagtattctcttttttttttgtgttaccaaaacttatcttattcaactatttttatatggtttaaccactttttatggtcaatgtttagtcatttatttaaatttaattagtagtaacaaaactctgtttttttgttcattagtggcaaccgaattcatctaattagggttttgaatcaacaatctaatcttcgatcttgagctctatttccgggtttatacatttccttcaattcaaaaccttttctttcattgacaaatgatttgaaccaaaaaagttgtttcctttgccaaaatctgaagcgccatg

SEQ ID NO: 948 - DNA, 3000 bp, Unknown
  misc_feature (1)..( 3000): cDNA_ID_1450208_gDNA_ID_1620340_Annot_ID_153930 3000 nt of promoter + ATG
aggcaaagagaagagtcgatagaatgtctctgatctttttcttggttgtttatggttctacttgtaaaggatctctagcttgtagagaggaacaggaactaggctttttaacaagctacaagctacgatcctttattgtagatccataaacaaccaaatttctcgtactctcgaagctgcctctgctgcctctgatcttacttttgataaaatattaaagaaagaagcaaaatccaatatagtttattgtaaactcattcaagtcatgcatataaacattgtattattgttttcgttagaaaagtaacccagaatgttttaaaaaatagaagaggttgctttgcttttgaaaaaaagccgaaaaacgccgttttgatctataactcactatatcctcggtcttagcggatgagtctagcttctgttcctgttcctctctcaaaatatgtaccgaacaattcacaattctgtggtttcctggtctatctcggaaggccgcttgtgaactttgcagttagtagtcatctgggaagatgaactgaagatcttggttgtctctgtacacttgaacgagagttgcagctttgtatacaaacaaaccaaccattgctggaactatctgcaaagcacaatcgttgtggagaatataaaggttcaaacttgtctaagaacatgtgataactttgaggtatcacggataaacatagctaaaacctcgcaacgtggaatagcttacctgaaagtcgaacaagtcgttctggaaatacttgtgagagagtatccacaaaccataaattgcagctggtatcaccaagcgtggagaagagagagccatgccactgcccctgattgtcctcactacaaagtcctcaaggtcttcacttctgatcccgattctgaattgggacaatacaaaagcaagttcagagcaatgtgagtatgggaagtgagaagaaaacgtgaccagactaaaaagttgtcaaggtctttactttttagacttttttttcaggaagatatcaggaacagcttcacgtgatagaccatcagcgtatccatacaaaagctgaaggtacaagcaactgcactatgatcagatttggttaggaatacgcgagtgctcgatcaagcatgttgcagaactatatcttacaacgtcaaggtctatttatgtacaaaccaattaaaatagacaactaacctgaatagaaccccaactgcataactgactgcagcctgtcatatgtcagaatatttctttcagacacattttcgtatagagaagccatagtataaactggttagagctttgacagagcttacctgaactgataaagctagtaaacagtatccgctgcatccagttccaattacaatcgacaggtacatgagttcacgcttcagctacaaaaataaagacacaaacgcagcaatttcaaagttcattctacacaaattgactactggtacatactgaacagccattttgcataatagagtgttttgttgaatcataaagatctgactggcagactaattaagaaaacatactgaaaggaataatcatacagcttcatatttcagaaagttaaacttcttccttctctcgctgtcatctcgtagtgcctgcaatcaaggaagtaggacaaacgcagcagagttttgcaatgagaaggacgtgtgaatgaatgaatacagagaacaagaacattcataaatagatgaccaaccttagctagagctttcttattcatgggggcagaatcactctcccaaccaatccattcttgtgtcggtttaagtttcaagaaaccactttcatcatcatcagcgccatctatcaagctttcctgcatatacaacataaagacattaataaaggagctataccaagttaccaaccaaagtaacagtaccaagtataagattgttgccatgaaagctataaatttgtgagatttcagaaattcacaaaccaatactggatttcataaaaatgtagtcactcacataacaattgcaacaggatcatataactatcaaactattcctcgatacaaagttagcaattttaatcgtcaaaagcaaacttagaactgaagaaaaaaaactagctacagttactaatgaacaagtgaaagaaacttaacccgagtatcatctagttcaacagctgaagaagaagctccattggaattaacatcaatagattcgagaatctcctttaaccagagcctatcagaaactttagatatgaaatctccattttcttctctgtctttcatgaacatttgcaacacatcctcctccactagctcactcactaaaaacaaagcaaaagacatgaaattttccacaaagagcgaacatttgagtagtaaggttcaatgtagagagagagattgtcaccagagcgagaagcggcattaatggcggccaagcgatgggaattcctgttgggaggtcgccggagatgatgcggcggagaaactctcaccttcgtcggaggaatggttccgccggaaaaccaagaagcggcgggaatcgagagactctccatgtagcgagagagtgagacggcctctggtttttttccagaagaagaagcttatcactattgttgatgaagagaaagaaagtttccaaaaagaagacccttttattattcatatattataatttcaccccttaatttacatttatgactattgagtcctgtctttttgtttcgcccttttctctaattgttttcgttttctttctatttctgagtttaggaagtgtggggtgattttgtaaataaaggataatataaaggcccattgttgcaacaacatgtttaacatataaactttgttaggaagaggttttggcaatttggagtcagagggaggcgttgcaaactcaataaagctcaaaactttccgccgtcgttttcgtcgtcggagaatacaacaaaagacctaaagcagatcaaagtaattgtagttgacggagatg

SEQ ID NO: 949 - DNA, 3000 bp, Unknown
  misc_feature (1)..( 3000): cDNA_ID_3059746_gDNA_ID_1620340_Annot_ID_153925 3000 nt of promoter + ATG
caaatgcaacgttcaagagctgtaggcatgagtttgcggtgcttacctaagaacagaccttgtgaatcgaagaaaagaacggtgcagtatagcgtgtagccttccctctctatcacacccataaccaagtatactttgtacttcttggccattaacgctaatcgttccacttcagggcctaacacaagatggcacagatgaataagtagaatgtaatttacagtttacacacacttggtgattcaagaaacactataactagtagagactgaaacactcaattgttagtagatgatcacactaacaattgttgggtttattggctatgagattgacccatgtgaaagcccaagtcactgggcctttcataagttaagcccatgtgactgttgctgaaatgatcttatctacaacttcttactcttggagcatctgtgcctcccttgaatgaagcttgttgtggagtcacgggtggagcaaccaagctacgtctcttgatgaactggtcagatcttggtgatgctacaagctctcatgtaagaaggaagaggcatctccctcaaagcaacaagaaccaccttgataccaaaaaaaaacaagaaccaccttggttgtttgttgcagtttctgttacagtgtcgtagtagaacagaagctgttttaaagacggctttggtgagaatttattagatcttaagtgtgataagctaggagatacgtgtggtagctgaaaaggaggttatgagacacgtgaataagcaaagagaagcatagaagtcatgtgaaaaggagttaaaacagagcaagaagaaacagattttgtaacctcttgtcaagagaattgatgaagttatgcatgtattgatgtgtttttaacaaacgtatggttttatggaggagagttaggagatctcttgaaaaaatctccattgttagggtagttcttgagtttgtatcttggaatgagaagtgataaaagataagagttcatagcttcaaacttatcaaatggtgcagtgaacgtgaatcgaacacgcgacctaagtgaatataaaagagggttgcctagttgttctatgttggtagctagttagagaacaatggatttatgtggtaataagtgcgtgccctggtattcatgctaagatccaaaatcgaaagaaaaaaagtgagaacataatcggagatatggtggaggactttattaccaggaacatcaatggcagaagcatggtacttgcgaaagtcatctcgtcctttagcggtacgagaaccaatagccaattcaaaggtagagccacgtggatatccaccgatgaaagcctccgggaacaccactagctgagatccattctccgctgcctcagaaagcagtctctctgccttatctgacaaaatttcgtggataaggcatcgaaagcgatctcaccaaccatagtgaatcaaaaatcgagaaaacaggaacgaacctagcgtggcgggagtatcgtagaagactgtagaggcttggacgactgtagctcgtacgatggaggaggaatcgccggcggacatgtcaatctcagggaagatttgatggccgttggtctgtggagccgccgtcatgtgagacgtttcttgttgcatggacatgagagaatcagagaaagagagagattccttttttttttgtcaaagaagaaagattccaattgtgttgtatcttgtttacttggttggtgtgtgtttaactttgatattatcgtgtattttataaactctctctttttgtgtgtcgattcttttttagtgaagggaaaaatgggtttaaaaaatcctcattttctctaaaaacatttacaataaccatcacctatattggtatttatatgcatgcatattgtacgatggaggaagaatcgcaagtgtatacgtcaaccacgggaaagatttgatcgatgttgaccggaggagccgccgtgactagagacatttattggtgactggtcagtttgtcaccaataagatatatagaggaaatgagtgattctagtagtagtatcttcttgatgggcttggttggtaggtgtttacttgtacaacacatgatatatattttgatttttactctctttttaactgtagggggaaatgccaaaatgtgtaaaaaaatcctcatttttttctaaaatcatcacctatatttatagattttttacaaaattcaaaagataaaataccccctcgataacaaaccaaccttaaaaaccaaacaaagcgtttgtttatatattttggttgttacttgttagcattcaatattaattattgtttacttttcgaaggtatgaggattagaagattagatgtttatctcttttcttagttttagacttgatctatatccttggatggtgttataaaaggtatcgaactctttcacgtatcattagcttttgactaaaatattgttgaagagttctattttttagttcaaaggcctatgaaaggaggatttttaattctaaagagttttggtatgaaaaaactcttaaatcatattatcgttatcgatcattgttgatcttgacaaaatataaatttgttgctgaaataatttggagaatttcttgttatgattgtttatagtttccgttcatcatcaactttaaacttttaattgtacgagaaactttcaaagtaatttttggattcacatcaccaaaaaaattaacagaacagagttaaccacgttaatatcactttagtttttttacaaataatgatttgagtataatttgatcgtaatttgtaaccccatttcatcatggaaacaacaataaagttcactcatacatttcgttttccctgtcgtaccttgacacagaaacatagtccacagattttactactaatactatttcgaagacgtacgaggttttacggagggagatttgcgaaaattcacctttcttgtttagcttttttgaacatgagtttttgattaaacttaactatatg

SEQ ID NO: 950 - DNA, 3000 bp, Unknown
  misc_feature (1)..( 3000): cDNA_ID_2130308_gDNA_ID_1620341_Annot_ID_153968 3000 nt of promoter + ATG
tcttgttttatgtacttcaacaacattgtgataggcttatgattaaaatttggattgacatcaactgaacaagatttgaaaagtattcgtatgaaaaaataaaaagataacaaaaattatatgtcatttaagtcaatatttttttatcttctgtcattacatatatcaatattagagaaatgatcatgtcttaaatgatttgaaaattgtctaacttgattataaataaactatttctggtttgatgtattcacctgatataatattccaacaacagtgttatcgactcatgattaaatatatagaattgatataaactgaataagatttcaaaagtattcatatgaaaagaataaaaaaaaaaagcaaaaattaaagcagcatttaagtcaatacttttagatcttctctcattgcatctatccatataagagaaatgatcgtgtattaaattatttgataggtctaatgttttaaatgtttattatttgaaaaaacttgaatgtcaatgttatcaaagactcaaaataaaattactaaactaataagaggttaggtaacgaacaagtacaacaaaaaaaatagtaaaataaaaagagtataataaaagtagtgcttaatttattaaaattaattttttattttatttttattttgaagaaaacaattaagagtaggattgatgatatatttaatttgcttatttaatttgattaatattttaatttaaaaaatatagaatgacacatgtcattttcttgtgtgatgatgtgtcatttatttggagagagttggccaactttcatatatatgatttataatctccaaaaacaatgctgtcaataaatcaactgtcagaatctaccaaatttatccaacggtcagaaactcagaatctagtcattacattgcctctgccattgaaagtaaatattgtccgttggattcttcatttttacacattgcaaactagggatatcaataatcagccattgtgccaattatgttgagattattgtaactaggtaacgactaacgagtgacaatgaatggcatatagacaaatttattctttattaaactgttatctgaaaattaaaaaatgatttcttccttaacttttaggtaaccgttgtttaacatatccaaattttaagtttttataattattttactatcagtttatatatgttattcattcacacaaataaagatatttgaaaataagcatttaataaataacatgatatatatcacccaaaggatggaacaaaaaaaaatagaaatttgacactattgaattagcattaagttacaccattacctcttacttattattatttattttttctcttacttaatttcaatcctaagtaacaattttgtacataggtggattgtctaaatattcttgtcgtgtaaattattgattatatttttgaaaactaaaacacacgatagagctgaccagagaccaatcaccagttagacatgccaaacatgctcagacattattaattaacggaatgattaaaaacacagctcgttagcaacgagagacattcattatagagttgaaaagaagaaagaaaaacgacatagacatataatggaatcgatggagacagagagtggtatggtcagtgcctcagtggtcactagtcaaaggaaaatcgtttcctctgtctaaccaaaaaacaaaatgtatttcaattttcttaaccaatttccagttttttttttttgtattatatcaatccagttaactgattttatgtttgattcatttctcactgatatctaaacttattgattttcgtgcacattttcaaatttgaaattttggatgtaagtatgtacagttaaaaaaagttatgtacaacattttagtaaagaacagtgtttttttttgtcagatagtacataaggagttattacacgattttttaataaccacgttttgtgtgaacattttccccaatacatttggtttcatattcatatccaacttactaatataaaattagtactaatctttctgttgacgaaaaaggttaattattttggaattttaaaggtcgattaaaactactccaccatcaagccatctccaattttaaaaagtaatgtcaattacatttcccaattaatttttgtggcttataaagtcttgacatctctttgctctttggacccgccttaatgtttttttgttcatgtaagatctttttctctctttcctctttccatgtttatgttttctattatttagttggcttttggtattttgttggtttctgggtttaagccatttttttcccaccgcctctgcagctctgcttttttagctgctattttttttttttgcttttggtatgtataatcggatttcttctttatcatttatcaaatgtttgaattcttccatctctcataattcttaagtggtcgtggtgtgtactatctcctaagctctctgttttttttttgtttgttcattggctatatttcaggtcttcttcttcttcttcaagaatgagctaatactcacagaagaagaagatttttctttggatttttcactactggtaagctcggttcctccctcttttgactgtaatttttaaattcggttttttttttggtgtttttctgaagaagttctgattattttatttgtgaagtttggatctttcttacagatttagtaggattaaagaatgttgttgtctgtagttaatcttcctctgtaaatctatatgctttgttacaaatctatgcttcaggaatctagggtttatattccactttgtttactttaataaaatatagtttcttaaaccctttttgtctgatgaatcaaaatctaattactttatttgaatcaagctaaaataaattggtactttaacatccccacagtgttcttctataatcttgattttttggaaattttccagaggcattgttgtgaaattggatggtagtagcattggaatg

SEQ ID NO: 951 - DNA, 3000 bp, Unknown
  misc_feature (1)..( 3000): cDNA_ID_2130333_gDNA_ID_1620341_Annot_ID_153977 3000 nt of promoter + ATG
ctgtccggtaaactttggttttaaaatatgtgacaactttgttttggaatggtttgaatcagcttggttcgttattccaaccctcacaaagttagcactaaataagaatggttttaatcaagtcctctaagccacagtggacccataagaatattactaattagaggctcctaagggacggataatgatatggacggactttattcaatttggttccaccaccttcttttattttgataatgtggttccaccaacttacatcgtcgtgttttttttttgtttcccctctaccatattcaatgatttctttttgtattaatgactatagtttgtgaattttattttattttatagcatatatctttttgtcaataaaatagcattttgcaaatgatttttaaataaaagtagtttgtgaagattgaatatataaatacaaacttcgatcactcatatgattattccaaaaataaatgtgaattaatgtatgtacattcattgcatgtagagaaatgatataatgcgcctacaataatgtcccaattgtagaagaagaagtatccaagtcgaaagagactagaagccaactctgacccgttaaacaagtttctaatttattcgtatctgccctttgcattttcataatgtataacatcacacctctaattttctcatgattgaatttttttaaaaaaacactcctaactatgtatctttttctaattcacagtaaaatatctaaggtggtgtgtgtgtgtgaattactaaacgtgttaaccaacaaataaatctagacttatgaagtattacacattactaacctctaattcatgcatagcacaaaattctctaaagagaaacacgtaggttttagtaaaaacattaagtagatttcaataggtagattaagagatataatactatgatctagtataaaaaaaaattaatgcattttgagagtaagcaaaacagaagttgatcaagactcaagatgctagagatggtactttacccgaaggtggagagttgcgcaaggaagaaaggatactccttgagtggaactaacgcgagcttatacatcactctgtttccgacgccaaacgccgccgtaaccgccgcccatatcactatctccgccgtcttaacatgctctccgtcgatcacatggacagtactactactgctcccttcgatctcgttatcgccgatcgcgtaaccatacgcgcctggcttcttaatctccgcctcagctccgtcgtcaaatccatcccaggatctcgccgcttggataatccaccgcctggaacttggaacgatcaacggtagacgatgatcgatgtggtttcgacggattagggagatggattgaggtcggtttgcggaatgggatttgaccgaggtgatcgaggcgaataaaccggtggtaaaccggcgagaagtcgttgccatggtggattaaggatcgagtgagactggttctgctggttttgagggggagagagacggaagtgagttgctgacttggactttgcctttttatctctctcttttgtttttaaaaacaatttgcattaacacacgctgcccaacttgttttgcaaaatacgacaaatgtttttttttcttttggtaaatcatcgaaaagacaattttaacccttatcaggaaatttcagaaaaagtgattataccttaaattagcccgttatcggtattttagacattcctacttttaatagaaaacataaccaataagtaatgatttaatttgtgctagtgttgtttacacatcactttctacaattatgttgttgaaaatgtaaataaaaatagatatataagtagattaatctctatgtaatgtggtagtagttcctttattgaatatattcgttttttttatgaggggaagatacttcaactataattttagaatttattattaatctttgaaatggtatatttgatcaaccatatctagtgtatatttacgttaatacaaggtgtagggtgtagtgatgtttttaggctcttttgttatgtgaactcttatgtacactacatctaacttgtgatgcatggttgaaaaaaacgtaaacatttatactaaaaaactgttggacgatacgatagtgaccaagttaagtagttagccatgcgcagaatttaggattttggcttgctaagttcatgttcatgtgatgttttatggtgattgatgaggaatggctcaaagttgtgtgttgacaagttatgataaaatatctgaaatacttattatatgtgtttatatatataggatcacataatacaacattatatacatactgcattcttatatgaatatttgaacttaacatctagcttttcgaattaaaccaattttgatgaacttttggaacaaattcttttaaagaaaaaacatatacgaaaaccgaagtgagctctaatatcgatacaatttgaaccgaattgaaccaaaaagttcaaaacttatttccctttttttgttttgtttcttttcaaatacgatttcaatccaaaatcaaaatcataccagaccgaataaccctaaatggaaaccaaaccaacacgggaccgaaattagtaccatcaccgctagatgcgaaaagtataataataatgtgaaagtatgacaaaaaaaggggaaaagacatgtctttgtcgtggcgtcttttgattggcccaatgcatagaactagactacacgttgctgtgcctgaactttcccttccctgccttcccctccttcactcatcttctcttgtagctgtgcagtaggtcagactcttgtagtgaattcactgcaaagtaagggaaagcttggcttggaaatgggagttgaacaagccatcgattcgggctaatgtgtatagtttgattcgtctggggagcttttgagagatagcaatttagttttccgcttacgaatgatctttttctgatgcgtcattttgattaagtgtgtacttctgcaatg

SEQ ID NO: 952 - DNA, 3000 bp, Unknown
  misc_feature (1)..( 3000): cDNA_ID_3059821_gDNA_ID_1620341_Annot_ID_153980 3000 nt of promoter + ATG
tctctctttcttgcttcaaggagcaggtacagtattgaaggtccgttactcacctatttacaaacctttgaattttggtgacattattctccttaatctcaaattcctttttcttataggaagtcatctttatagatagccaaagacgattaaaggtacattacaatccccaacaccacattatcagaagtttttatatgtttgtttgaaagactcaaaaatcatctactttttactaccacagggtgcttcactcgatctatttatagtaaattcatatggttcagctttccaagtaagtgtttcaccctaaaaatttctctgtaaactatgacttgcattccaagccaagtaatcttgtctctggtggttttgtttccttaccaattaggccatctgcattgcgttgcttcttccatttctttcaaaactttggggcataccgtttaaccaactcggtacctacctaaaagatggtgcggtttgttttctcaacaatgggacaataacaaaaggatgtgatggggctccgtttttgcctctgttgtttgtgataatgaacattggctataacattgctcttttaagactcctcaagatttcatccgcggtggtttcatgtcttgcatcaacagtctcagtgccaattgcagtgtttctgttcacaatgccattaccgtaccttggagttgcatcatcactaccaaaagggttcatgggaggaacaatcatacttgtattgggaatgattctttatagttggacaccacacggagctaactcttctcatactgattcagtcattccttcacctcctccaacatagagagggcttaactaaggggttttgcttttatataaagatttgagagatttatgcaaattcggtttgtgtttaaataaacttatatttgatcatatgatgttaatggaaaagttgacattttgtgtgtgttgcgttcacattagtattctagttcattagtcaacggctaacataatcttgtcttcaagagttgttaccctttaaacatatcactacaaatcgtgtgctaaaccatttaaaagacaaatcaaaacaaaataagaagaaaatagcctgcaacaatcaaagttacttcatcaaaattgttaaatagtaaaagactaagcaaatcctacaaaccactgagttttcttaaaccatttgattctacttgtggcaaggtctcgaagacaccacaagttgaaggaagactaataatatttagctaataaaggtcatctttaactaaacagattgaatcactattgattccgttaccaaattcttctaccggtgcttttagtgtaacccccagaccaaatatcatcatctccaatagaatctactctttcccatttgttactctcaactctcaagattcatcttaaagatgtaaaacaaatgtttctcttcaactagcttttctaataaactcaagatgatcaaaacctcttctgttttctgaatcactattctcctcttccaaatgtactcccactcttttgaaacgtactcaaacggatgatcccaatatggggtttcttcgacttcttctttgggaaaatctccagagaaatcgacaatcttgatgtgatcatcagaagtatacagataaagcttgctgttcttataagccagatcccaaaaacccaaatttgcgcctcttgtataccaattcaaccaacaatcatctcctttcttgtgtgtgaacaactcaagcttattgaaaattcaagcaacgacataatctcctgttctttcgtttatccacagaacagctgctctttcgcttccgaagatatctttcgacacacgttccttatgataagactcaacgaaataacctcactcatcaccaccgcttcgtttgaatctcacttgtccaccgcgtattgacgtctccattgatggaagattgattctttcgcccggtaacatgttaaagatagaaaagtcgagataagaatctaccatcaatagacagtttccgaagctagccatatatataatagctcttgtcagagattccaaagagtttcgcgttgtaaatcttgtcttctccgggatcgaacaacatcgaagattcattatggtaatatgaattgccatggatacagaggccgcttcacgcatgttttccaaacggagaaccactctaagcaaacgttttttatacggtgaaaatctatagtgctcaagctttcgattatcggacgtaaaagattggaccaatcttgattttcagacattttattcactcatcaaatgtctgcgcttacatcacactaatgggagctatagggttagggttttagggtttacaaccaaccctgtacatttccctttttgatgttctgcttttcactttgataattaactgtattttatattttactttcttcctaaatacaataaatttcttaacacattcaaaatcccatgaattagaaaattggttttcacatgtttcagattgatgaatgaaaattctcatacacctgattacgtagtttcttatgagatacatttataatcatatttatataagatttaggcaaaggttctaatcttgatttttatgagtagttgtggaatatagaagataagaagagacagttatgtaacaaaaattaaaatcccagaaattcctctcaacctttgtcttaaatccctaaatgttgtttttactttaaataccaaaattacagacacgttttggtcctaaactttctccctatcaacaaaccctataatcctttgaaccgaataccaacgaagaaaaaaaaacattctattcatagccattcacaaccaaaacacctaacgttttcttgctaaagaagaaacaaaaaccagaggaagaaaagcaaaaaaagtaagagaagaaaaacacaaaaaaaaataaaacctttctatttctcttcctcctttgagctttgacctctcctccatctcccccacccttttatgcaaca

SEQ ID NO: 953 - DNA, 3000 bp, Unknown
  misc_feature (1)..( 3000): cDNA_ID_2130357_gDNA_ID_1620341_Annot_ID_153985 3000 nt of promoter + ATG
tcctccaatcgtgatttctcttctggatccaagctgatgagctctacgtcttcctcccaggtcatcactcttctctttttatgattgtgaacttgttttcgatggttttgatcgatttctggttcagttttttttttatccttcttaaaggattttatactatagatgggtcgatcaagtgttattgatatgccattgaagtgaactaagcttgaaatgagccaagttaagtcttttatggggattcttacgaagttactgaatctgatgtgaatattttgtggcagatggttcagctcgtagctgacaagcatgtacgttacattctgatggcagaaaaggtacctagaaactgtatagaacctttgctcgttttctctgtttatgtcactgtgattgtatagcttatgttcttcttttcaattgctttttgaattttatttaatttgctagaagaaagagagttttgagtctgtggtgatggatcatctaagaatgaatggtgcatactggggactcaccactctcgacttacttgacaagctcggctgtgtttctgaagaggaagtcatttcatggctcatgacttgccagcatgaatctggtgagtacttgagtatcagatcagctctttttttacttactgatagaatgatgtaaaaaaagggatacatgggctaggcagtgaaagcaggtgtctttgacaattatgagaaaataatcattggctgtgattgctatataagaactagcaataagatctatggggacctttaaagttgctgggtggtttcatattttggttcgtattcataagatgtcgccacagtcgaagttgaaaacaagttgttcttttctgagcaggtggctttgccggtaacactggacacgatccacatatcctatatacactcagtgctgtacaaatcttggccctatttgacaaaatcaacattcttgacattgggaaagtgtcaagttgtatccttttgcacttagctttttgtcaatgtcactaactcgttcttcttcacaaatagtcatggtggaactttcatatgttaattaatcaatgatgttaaacaagaaggaaaaaccctgccttatagtagatattattatgttttcctatatacaatattagatgttgctaagttgcagaatgaagatggatccttctcaggagatatgtggggagaaatagatacgaggtgtttttccttgccatgtattacaaagacatttatatatttcctgttggtgatttcactatgttgaatcttaacagcaagctgtttatgcaggttttcgtacatagctatttgctgtctctcaatattgaaatgtcttgacaaaatcaatgtggagaaggccgttaagtacattgtgagctgcaaaaacctggatggtggttttgggtgcacacctggagcagagtcccatgcaggacaaagtatgttatgctatttgagtatttttctgtgccatcttcccaattgttacttgcaattagtgttataggtgactttacagaattaacaaggccaaccgcatcactgccgtttaactattccaatgactagatactcagatgtttatttttctgtagtcgacgtgctattgatacatctttatgtaaattgtataggacagtttcatggttgggagatatggtaaaaagacggtattctttatttgtttcttctgttactgcagttttctgctgcgttggtgctcttgctatcactgggagtctccatcatgttgataaggactcacttggttggtggttatgtgaaagacaattaaaggctgggggcttaaatggacgtcctgagaaactcgctgatgtaggcattaagctcatctccaatgagagagacctttgtatgatttccttggttcttacacattttttactgttcttatttccaggtttgctattcttggtgggtcctatcgagcctaatcatgatagatagagttcactggatcgacaaagcaaagcttgtcaagttcattctggactgtcaggttcgtctccaacaagaaaattcatatcgttactaataagccagttttgattgaaagctctcatctcatctatctaaatttgaatttgaataggatttggacaacggaggcatctcagaccgacccgaggatgctgttgatatcttccacacctactttggagttgcgggtaactttcatttgtctcttcttttagctcatctcttgctgtgaagccaaaagtggtcttatttcatcaaattggtgcagggctttccctccttgagtatcctggagtcaaagtaattgatccagcctatgctttgcctgttgatgtcgtcaaccggattatattcaccaaatgactgcaatgggtatatgatcttaatggtcaaacaatatggccgcaaggctctctatatgatttgttcattgaataatttacttggcggttttagaagttatgtatgctcaaggaggaggagattgcaatttgggtatgggaacagtctcaaatctcaatgttgtataacttgctacattattgaggtttctgatgtaatggaaacgaagttgtgttgctgctacattatataaatcacattaatgtgttttttctccacacttttcattctgatttacttcttgaaaaaagtgaactaatgtgtttaggagtgctcaatacttatagaccgaaccaatttaattaacaaattgaacaatttagagaaattgcaaagattatagtacacaaatcataattacaaataaattttatttccattgcagtaaactaaaaattaaaactcttgtatcgaattttgcaaatatatttccttttaaattttttaccttggggtttaaaaaaaaagagtaaaagaaaatcaggatgtctaaaccctagtacgccattagagagggttcagctcaagtgctctgtttttgtttgtttggtaaaaccctaaaagctttcgagccgactcttca

SEQ ID NO: 954 - DNA, 3000 bp, Unknown
  misc_feature (1)..( 3000): cDNA_ID_2990975_gDNA_ID_1620341_Annot_ID_153989 3000 nt of promoter + ATG
ggatataaacaaaaaccaatgatacgaacagatgcataaatctcattaacagtgatgaacaatatatatattctaatgggtcaagtcccacgaatgctcctctataatctctttgtgaaaaatcaacacacaagcaatttttaaaacaaagcattttaatctaacatatgaaaagtaaatatccaacaaaatatttgaaaataaaacatcaagttcttcatggatggttccctattcatgtaactttacttacaaataccatagttattgtgtttatgcgtgtgattttcattttgatgaaaataactaagaatagtatactatattttggagatatgttataattttgaaaaaatcacaaattaaagtttataattatattcaaggagattttacaagattatagaaagactttacaaaattttagaaaaacaaatcataaaaattatacaaaactctctagtaatcatttaaaatcttttaatttatctattttttatatattttaaaagtcattaaaactttttcacaatcacaaaccaataaattaatgaattacaattttgatcatagcaaaagaaaatgatagacttcactacttcagctaattgattacgttgttgctcttgttgaattctcaagagctgcattgaccaatcacttcgtttgctttgaacaataatcttcaaagagagatgtgtttctatttcatagagtttcatcatcaaagagcactcaactaatctcttttggacatcgctcatcctcggttaaccataacaaaaagttatgaatattcacagacatagaaataccagaaaattcgtacagatcaagtgagaggatttatttgaaagagtcaagacttattgcatagaaacaaattataatattaatcacgtaaataatactactacttacaaaaagagtaaacttcacttgatatatacttatactacaagatattcaatttttgtatttacaagaacttgtgggaaaaaaataaattaagaagatattataacgacattaactctgacaaactttgtaggtagggattggaatttagcaaaaaactttgtaggtatgagaaactactggagcaagaaactacgagtagagaaagttagaatttaagtcaggtgagctgttggcatgtcacatgggacgcaatgtggatttcatgtgcattgttctttttatatatctctacatctcattctgtcgctatccgatttccgatccacaagctctacaagaccaacacattcttgtttttgtacccttctaatttctcatatttacagctatatgctgttcttagcgtaatttatttatcacgtcttgtttatgatctaaatgatggtgatataagggcgacattggttttgttattgatatcattagtagtgcttttggtttcgggttttcttttgcattgttatagaaagtagaaacgtaagcatgattaatgttccatggaaaatttagtactaagcgaaaccatcgaaacatcacttttttattgttatacaagcaacgacaaagttgagaaaacaatatttaagttatccgattattagtttagattttccgaatagcaaactgatatatttattgattgacagtagatcgacagatgtaagaacttatagaatattttaaagatttcaaagtagcaatttagcatcagtagttaaatctaaacgagagtatccaatgcgtgtgttttacattatcgtcctaactacggtaatatgcatcaacttttttcttcaactctctcgtatagatctgatggaccaaaaaacaatttctgcatatatttcatataaactgattgctatgacatgcatgcaaaagaaagatttaatatatattttacgaaagtaactaaacttaactaactagttaatataggtacgaaataaaccattaagaattcatctactctccgaccatggtacggtgatttactattctccgcattgtcatacgcaatgagaccatttttttttcccgtggttcttagctcgattttatactgtcacacactcattacaaggtattgctcctgcctgttcctacggcttttgatgagtttgtttatgcatttgacgtgtattaagtgtgtaaccaaagagagcttctctaaaattgtaagttgcgtttggaaaataataagaatcttgacattactaccgaaatacttatcttttctatgttagaccaatggtccaagactccaatgttagagatttttttactattcatgtgacaacaataattggtatgtaggagtgaaggaagaaccgacaatcacaatccaattaacataaagtagctcccacatcttacccaacgccatcctcaacgttgatatctcaccatccaacggcatccagcttccgatagattaaaccaatcacagccgttggatcaaattttacctttccctcttcttactctttcataaataaatccaacttcttcactctccacccgtctcacttcctctcctactccggtcgacgattatcccaatctcgccgggattctcctctgcaccgtgagttattgtttactctgctatttcctttttatgtattgtttcctctctagggaatgagattatgaactcctactacttattgtgatactttgatcgaatcgtcttcctccaaatctgtatccgctcttgatctgtttcatattttctctcttaacttggattttgattttctatcacttgaaaatgtgttgccgttttgaattccgtgaagaatttgaaatcggagttttcttctctgcggcgttgtgtttttttccgattgatttgttttgggatctgatacagattgtttgatttcagatcttcgagatttagttgttgacattcgatataatttcatttggatctgatacagattcttttgctttcaaaatccgttgtttactgttttgttcatgtaatgttgatttcagataaaatagaagatg

SEQ ID NO: 955 - DNA, 3000 bp, Unknown
  misc_feature (1)..( 3000): cDNA_ID_2130369_gDNA_ID_1620341_Annot_ID_153990 3000 nt of promoter + ATG
tgagacgggtggagagtgaagaagttggatttatttatgaaagagtaagaagagggaaaggtaaaatttgatccaacggctgtgattggtttaatctatcggaagctggatgccgttggatggtgagatatcaacgttgaggatggcgttgggtaagatgtgggagctactttatgttaattggattgtgattgtcggttcttccttcactcctacataccaattattgttgtcacatgaatagtaaaaaaatctctaacattggagtcttggaccattggtctaacatagaaaagataagtatttcggtagtaatgtcaagattcttattattttccaaacgcaacttacaattttagagaagctctctttggttacacacttaatacacgtcaaatgcataaacaaactcatcaaaagccgtaggaacaggcaggagcaataccttgtaatgagtgtgtgacagtataaaatcgagctaagaaccacgggaaaaaaaaatggtctcattgcgtatgacaatgcggagaatagtaaatcaccgtaccatggtcggagagtagatgaattcttaatggtttatttcgtacctatattaactagttagttaagtttagttactttcgtaaaatatatattaaatctttcttttgcatgcatgtcatagcaatcagtttatatgaaatatatgcagaaattgttttttggtccatcagatctatacgagagagttgaagaaaaaagttgatgcatattaccgtagttaggacgataatgtaaaacacacgcattggatactctcgtttagatttaactactgatgctaaattgctactttgaaatctttaaaatattctataagttcttacatctgtcgatctactgtcaatcaataaatatatcagtttgctattcggaaaatctaaactaataatcggataacttaaatattgttttctcaactttgtcgttgcttgtataacaataaaaaagtgatgtttcgatggtttcgcttagtactaaattttccatggaacattaatcatgcttacgtttctactttctataacaatgcaaaagaaaacccgaaaccaaaagcactactaatgatatcaataacaaaaccaatgtcgcccttatatcaccatcatttagatcataaacaagacgtgataaataaattacgctaagaacagcatatagctgtaaatatgagaaattagaagggtacaaaaacaagaatgtgttggtcttgtagagcttgtggatcggaaatcggatagcgacagaatgagatgtagagatatataaaaagaacaatgcacatgaaatccacattgcgtcccatgtgacatgccaacagctcacctgacttaaattctaactttctctactcgtagtttcttgctccagtagtttctcatacctacaaagttttttgctaaattccaatccctacctacaaagtttgtcagagttaatgtcgttataatatcttcttaatttatttttttcccacaagttcttgtaaatacaaaaattgaatatcttgtagtataagtatatatcaagtgaagtttactctttttgtaagtagtagtattatttacgtgattaatattataatttgtttctatgcaataagtcttgactctttcaaataaatcctctcacttgatctgtacgaattttctggtatttctatgtctgtgaatattcataactttttgttatggttaaccgaggatgagcgatgtccaaaagagattagttgagtgctctttgatgatgaaactctatgaaatagaaacacatctctctttgaagattattgttcaaagcaaacgaagtgattggtcaatgcagctcttgagaattcaacaagagcaacaacgtaatcaattagctgaagtagtgaagtctatcattttcttttgctatgatcaaaattgtaattcattaatttattggtttgtgattgtgaaaaagttttaatgacttttaaaatatataaaaaatagataaattaaaagattttaaatgattactagagagttttgtataatttttatgatttgtttttctaaaattttgtaaagtctttctataatcttgtaaaatctccttgaatataattataaactttaatttgtgattttttcaaaattataacatatctccaaaatatagtatactattcttagttattttcatcaaaatgaaaatcacacgcataaacacaataactatggtatttgtaagtaaagttacatgaatagggaaccatccatgaagaacttgatgttttattttcaaatattttgttggatatttacttttcatatgttagattaaaatgctttgttttaaaaattgcttgtgtgttgatttttcacaaagagattatagaggagcattcgtgggacttgacccattagaatatatatattgttcatcactgttaatgagatttatgcatctgttcgtatcattggtttttgtttatatccaaaatcatgattcacaatctctctttttttatgatacttttcatgattttaatttgtgaagaaaataagataaaatcataatcgaataacacaatattttataatcattaacagtcatggaaattgttgtttaagttgaataacacaaaatttgtaatgattttattaaagtatcaatctaataactccagatttacaaaaactttaaatttcttttttacaaatcaaaatctaataacaccaaactttaaaaaaatcttacaaaattttaattaaataacaaaaaaaaattcatgacattacaaatcatttaaaatctatataaatcacaaaccaataacaccctctaaataaaaaatatcaaattaaaatataatcgtcatcttcatttttttttcgttccgcatatggtgccgtgtttttatttctttgatttgtaaatccttctatggtttctcaatcgagaagaaggaacccaacactgagatcc

SEQ ID NO: 956 - DNA, 3000 bp, Unknown
  misc_feature (1)..( 3000): cDNA_ID_2130361_gDNA_ID_1620341_Annot_ID_153986 3000 nt of promoter + ATG
ttaaatcaagaaaaccgagaagcagtagttactattttcaaagactcgttgttcaacactcttcaatctcatcccaccacatagaacacataagttacaatcacggcatataacgtacgatatagtgtatatcatcagtgtaagaaaaaaagtaaataaatatgttttttgtgtttgcacaaatgagttttattcagacaaaaattcacaaaaacttgtaaaagcaaaaatttatctattgtgcaatggattaggacctgtgaagacccttctcttgccatcttcaaaaacatcttcaccaccaccttcataattagtatattttgatcctcttgatgacgcagcattggagtcaagatcatgaagctttggatccaaatttccagatttcttcaagcttccatgagttgagtgatgatgtatattaggagaagacgatgaagctttagcgtaaagaaacagaaacaaaagaagaagaaggatgatcaaggcaactgtagtgatgtgtttcctagattttcttctagagtagtaatttcccatctcttaggaatcttcaagatatgaagagtttctctataaggtatagattatatatttagaatcgatttttgcaagtataaaagatctgatcaagatctcttaaataaattctctctcaaagtctgtaagaatgagaagagaggaatgaaagtgatggaagaaaaagctatggggcttttaacctatgacttcctctaaaagtttgttgctctccctttcttattctccaccactttctacaaataaagagaagagaaactagatagaggtttgtaaatatatatatcattaatttttaacgaaagttttttttgtgtgttgaatcatttccaaaggtcttagctgggattactaggtcaagtggtagtaattagtgtggttaataatatacttatagtggttagttttagagagtaatgagggtgtgataataaagcatatagaggaaggtaattatgtgaagggggtcaaaagtagaaagaaatagaaaagagagaagaaggggccaaaaagggaattggagtgatgattctaagacttagctttctttggggaaaatgatgttgtcttcactccctttttcttcacccacatttacactcactcacacacatgaaaaaatccacttaccacttgaatcttcttcctctccattttatataaatgttgtatatctatatttgcttctcgttttttagtctttctaagattacttttttttttttaattttactttattatgagttaagaaagagaataaagaaaacagtatcacaagaactaaattacatacatgatacatatatggatatgattctccaatatgcatcttctaccttcgataaacgtatttacaacttgtgcaacaaatgtttttaagaaatcaagctgaaagtttatagaagaaaaaacaaagacttacgtccaatatttgtcaagaaacaccatatgtgatatgtacctcaatatatcctcatcagtcatcacgtttttatatattatattcccatttattttacagcagacaaatcatcatttacatagtagagagcaggtatacaaactcaaatccccaaaaataccattattccattttgttctcgtcaagcactttgtctctgatgttatatcagcaaatatacacgtatgtattcatcgtatgtttcatcttaaattgtagaagatattgttaggcatgtctcgatcggattagacctgtccgaccaacccaaaacactgaaaacttacattatttatgttttgataattttcggtcttataatggttttttagaataacaattcatgtttttcactcaagtaaataaaaaatatagaaagagataacaatctaaatcggatataaatagtcgtggatatttttgtttggataagagtaccaccggttaaagagagattcattactcggttcgaatacggtttagctaatggaagatccttgatttgtctggttaagtgggccgtgttgaaggagcgcgtgaagcccacgcggagcccttgaataataataaaaaaaggctgactgtaatttgttgattatattgagagagaagccaacggaagaaaacagagaataattcctctctcattggtcatcagacacaaaagactctcaaaccctaactagtctcgctttttcgctctctcgaaccttcttcgatctctgtcctttctcgatcacttgctaaaatcaaaattttaggcgggaattcgatacccaagcccaagacccaaacacttcccccctcacgtttcgctgctttcgttagctagctttctcaaacgagatctgggcttgtcgaaagaaacgtgtatgttgattgtttcgattctttctcctaccaattgaatctgagattttggttttgctattgggctctgtcttgtttcgttttcgaattccaaattcctcaatttcgaatttctcttctgcttgaagcttttttatcgagtctaatcttcgtttctagtgattacttcgcttgtctgattttttttttgttagcttcattcctaaatagaacaaattgatgaaactttcttgttgactagatccaaaatgtatggacttggtatctaattttacttttacaaacttccgaaaactttctagggttttgtttctgatgctagtttcattttttttgagcttggagcagaaaagttgagaattgatagcatctaatgctaaattagattttcttacttcttagttttggtcactatgaaatatgagctggtgcttagttataacttttgtattgtttgtgctacagaattgttagtttagatagtatcgaagctgaatttgctttctgtagtagtattatttccttatcactctatgctttttctgatttttgtttccttgtgtaggatatatatgcagtgagccagtgatcatgcaaaagaaattcagagtgcgatagagaagatg

SEQ ID NO: 957 - DNA, 3000 bp, Unknown
  misc_feature (1)..( 3000): cDNA_ID_3059815_gDNA_ID_1620341_Annot_ID_153983 3000 nt of promoter + ATG
tgcaccattcattcttagatgatccatcaccacagactcaaaactctctttcttctagcaaattaaataaaattcaaaaagcaattgaaaagaagaacataagctatacaatcacagtgacataaacagagaaaacgagcaaaggttctatacagtttctaggtaccttttctgccatcagaatgtaacgtacatgcttgtcagctacgagctgaaccatctgccacaaaatattcacatcagattcagtaacttcgtaagaatccccataaaagacttaacttggctcatttcaagcttagttcacttcaatggcatatcaataacacttgatcgacccatctatagtataaaatcctttaagaaggataaaaaaaaaactgaaccagaaatcgatcaaaaccatcgaaaacaagttcacaatcataaaaagagaagagtgatgacctgggaggaagacgtagagctcatcagcttggatccagaagagaaatcacgattggaggagactgaccaagatcggaataaaaaatctaacctttcactaacatcaaaaccttcttcttccttagcttaggattttaatctagtccaccccctcagcttcaaacattctctagttagccccttataaaaaaacatatgtttatttatttattttaaatcagaataataataaaagacaagtaaaactagagttttttacttatttacaacccaacctctatgttggatctagatccataacaattttggatcttttattctcaacaaaaaaaaatttaatttctcagatcaaatttttttcatctcaatttatttttctctcaattcaacaaaaacaaaacttttgatttgtttcttcttcttcttcttctctttactctcttctctctattccatatataatctttcgtcttctttttgccttttcattctttctatcaatccaaagatccatcttttttaccttttcatttgtttctatcaatccaaagatctatctctattccatatatgatgattgatggtgttgtgtttaattagagttttatttcttattagatttgatagtttgatctcttttcctctttgattttgtttgaaaatgatggattttggatgaaatttcgattataatttagatttttatgagtacaattcaaatttgaattaattatctatttaaaatcgaaattgtcccttaaaagcctcttgtaatagccattacgacttagtttttaggattacaattgggattcgaatgaatttgaattttgttccttagagacagtttgtgaaatgcattaaaacaaaatattatgagattgcttttgaatgataaaaactagaagaaaagggaagaaggagaaagctgtggagaaagaaattgagaaggagaatgacaaagagaagaagaagacttcgtgtttgagtctttagatagtgttgtgtttaggtataattgtggctaaatttttagatataattatgttgggtttttgggtttagatacaattgttcggctgtcttttggtttttaagataatagatctaagcgtttaggtacaactggtacgctcatgtacaattatgtatctgggtttaggtatgaatctaagatttcttgtcaaaaaaaactccaaaataaatatgaatctacacgtcaatgtattttgatccaaaacaaaacacaaaattttttatgaatgttagtattttattttattaaataacagtgttttgaaaatgaaaaaaaagtttgaaagggaaaaatatagtttatttaactataaaattaagtatttttgatgacaaaaaaaactaaatatttttatcacaaaagaataaagctaatttttattataaaatatctacaaatatctaaaaaatatctataaatatctgaaaaatatattgcccatagttgtacagttgtactcggttgcacatttttgctcatagttgtacaatatcgagaatataataaatctagttgttatcaactcaaaattaatttttatgggtagaacatatggtattcccccatcaaaatacaattactttgtatcggtgtatttatatttatctaattacaagtatttaaaatttttaatttgttttgttaaaatatacaaagtaaccatgaaagtttaaggttgttagtgtatgaatgttagattttgtgataagagtttcattaatttagaaaatatgatttttgtcaaaaactaattatgtaatttcattaccattgtgtatgcattatttaagttttcttagtttggatttaaattttcatattttataatattctgaaaactagccaagtgaaaagaccttagttgtgcgggttgtacttagttgtaccaatacaaaacatattaatttgtataaatacgacaagaaaattaatagtatccattataagaaacgcgtatgactgaagtctttttgattataacttgaaaatgaaagagaaaaataaaacgatatgtaattatatgtttttcgtagaagttcatcaacatagttgtacctattggtttctgttgtccagcgtttttttgtaggtttaactgattaatgagataggaaataaaatgtaaatgattggttgattttaatagattgtttggtagcaaaacttaaatagaaaattaaaaaggataaaggagaagggtaaaattgtatttcaaataggttaagaaggagatggggtagtaagaataagtgagggtttttcaaaaattgattcaactaaaagggcaaagtaaaatcccttaccttaccttaagggttctattgaaaccgcgaaccggccagctctgctgcaatttggcaaaaaccaattgaaattcaaatccggtttaaccggttttattaaatgatttgattttccgttgactttccaattgatcggccaataacaaaaagagaatggaaacaatgataggaagctgaatcaagcaagactcgcgagaagctgaatcatcaatg

SEQ ID NO: 958 - DNA, 3000 bp, Unknown
  misc_feature (1)..( 3000): cDNA_ID_3059833_gDNA_ID_1620341_Annot_ID_153969 3000 nt of promoter + ATG
ctttccttctttgcacaacgcattcaacaaaatgctacaagtataagcattcattttcacgccagaatcaaccgcagtctcataaacacccaacgcagcctcagctttctcgttactcgaataaccatcaaacagaatactgaaggtgaaagcatctggtacaaaccccagatccttcatttccttcaaaacattctctgcatcttccaccattccagctttaaacagccccttaagcaaagtattaaacgtaataagactcggttcgatatgatccgctttcatacgttctctcactttaaaactcttttccggattcccagctttgcaatatccatcaatcaacgtgttatacgttatcaaagaaggtaacaatcttcttgcaagcatttcgtcgaacaactgttctgcatcattcatccttttccctttacacaatccatcaataaggacattgtagataaacacactgggatagattctatcgtgcttcatccggttaaacagctctaaacctttacctacatcgctcaatttcacagcagcttgaattgctttcccatacatgaacttactcggacgaaaatcagattcgagaatgttcaaaaacacgtttatagtcactctgaattgtttcgtcttcacaagatgatcaagcaaaagcgttaacgaatctgagctgggataaataccttcattcctcaaagcgaaaaacaaatccgcagcttcagaaatcatcttcgattcgtttagtagcacggagagaagcaagtaggagaaatcgtgtttcaacgacggagatgataacgagaaggcggagaagagctctttcggcgatgcgaaaggcgtagaatccgatcgaagcagcgaagagagaacgccacgcgccgtttcgattcgattctgctggagaagaactcggagattccgtagcttttcgtctccggtgacgggattcgtaggcggggcttgttcgggttgagattcgggttcggggtcggtggaggcagagaagagacgacgacatgagcatgctgagacagagtcagtgaacttgacggtggcgtaacgagaagatctcgaaacgagtcttaagcgagtcaccatcgttgagctgccggcgacgctctgcaaaagtgaatcttaacgaaataaccttaaaataaaacgaatattcggacatgaatagaactttgataatcattttgaaattaaaaacaaaattgttcatttcattgcttgattatactgtttgattaaagttttaaggaaactttacatttttcatttcttgttgtcacacactagtatcacaggtcacaacaaggtaagaagctattgcagagcaatgttctctctgccatgtatgagttaccttgtcacgtttggcttatgcactaatgagatagtaagctatattaatttcaccatcatatcaatttaacgattcaaagcaccttggatcgcatatacaacacacagtgaaacctatttaaagatgtaaatacgtaattatccaaaaaaaatacttcaaagcaaaactaaactcaacagtactaatctcgtaaattacagattgatagggatgagttatttgcataattgtgatctatacacttataataaacagagatcactactgtaagaaacgaaactagaatccaattccaatggtttcggatgaatcatcttcttcaacctcaaaagtttactcaaaagttttttaagttgtggaggcttagatagaaacatcttcaatgtcaggggcttctctctaatacccattgttatcttcgaagcttgtttgattctcaatttcaacttcaccagcaagggttgcttctgacacaaaaacggatgcaataacaactcagacgcggtacctctcttctcatgttcccttgcgaaacacgtttcaataaactctcttgcatcacaaggcacatattcaggaatatttggagcttcaccatcactaagaaaattcacgaaatcgacactagtaactctttcccatggctgctcacctgtataaatcttcaacactaagcaccctaacgaccacaaatctagggttttcttggcaacaccgtcgaagaaagactcaggcgttcccacatacgggtaatcacttttccagtgatccggaacttctccgacttgtctacagtttccaaaatcaaaaatctttaactcgcacgaagcagaatctttccgagagaagataagaaggttatcggatttgagatcgcaatgaacataaccgtgactatgcattgagaccaatccttcgagaatcatccgcgtgaagtctctgatcatcggatctggtaactttctgtcgggataattctccatgaatgaacttaaactcccttcgtttgcgtattcaagaagcaatttgtaaactttgtgtccgtgttcgttgaaatcttcttccaaatcgtctccatagcaaataacgatgttgggatatcccttgagttcagacagaatctgtatctctcttttgagcgcgtcgtattcttcgagatcttcagcgtaagatgtttttacggcggcttgtaacgaggaaccatcggttttagtgtatctgatgagatcaacagaaccataaacaccttttcccaagaatttgtgatgcagaacccgcacgtgggagttggcacgtgtgaagtcagtgaagaataaagaaggatctggaagtgacgcgtggcatgtgttggtttgcagatcagaattggccgttaggcgtgtatatgacgctgaggagagtcatcgttttcgatcatcgaatcattttgtaatcttctaaggtttttctgtgaaactttgtagctagtttctctcatctcgagagctagcatgagatcatttggtattttatgaacatcgtgttgatcatttgattacaagttattcaatcgaaagttatctgagttgatttgttgggttttctctattaaaggtatcagagccatctctttccttggaatcatg

SEQ ID NO: 959 - DNA, 3000 bp, Unknown
  misc_feature (1)..( 3000): cDNA_ID_2105148_gDNA_ID_1620341_Annot_ID_153976 3000 nt of promoter + ATG
caaccatctgctactgtcttgctatctttcgttacgcctaatgtggtctttagttatgtttggtgtttgaaatttaggtttccattgcgaaactgccagaaaaatttatcctaatttattctttttttttaatatgctttttctttcagggttttggtgttgaagattcagatgctgagtctcctagagatatccattgttcagtcgagagtacagacttttccgctagagtgaaaaaacatattgaagaacctattaaagatatagaagtttctagcgtttcacctactgaaaactgttatcaatcagggagagaggctataccctcagttactcccagtactcctctcacggcccttagatacacaacatcagctgagaaacctgcaagtaaaactactggctcatcaacagtaaattcgaagcgttcttcgtcctggggaagaggcaacgtaagttttccattgtctggcatgaaaagtcgaattctgttgtcctagtctctggagctgacttgctatgcatttattaagtatttataggatttttttttgtaatttttgtctgtccttgtaactctttgatcaccactagacgaaattagttctcctgatctctatcgttgtcaggtcatgatatgaatttcccttcagttttcttaatgccatgcttattggtgctataggctagatgagctgtttccacttgcataatcctataagaaaactaaccatcagcgtcttaggaaaattagatgttactggaagtcccatctatttggaataaattatcttagtacaagttagttgcatgtatgatgaagtaaatagttgtagggaaattgagtttaaggtgatatctcaattcttttctttgtttactgtgtgcagggcaagaaaacacctgctaaaggatcatttgattcctcaggaaatgacgagtaagataactcatcctgaatgtatacattgtggttctttaacactcctatgaaacctttttatatatattctattggcgaaacccatatgagatattatgtatggttaaataggttaaataggtcaaaaaggtatttactgaagcaacattctatttcgcttttgaattgagaaaataattttttctttgttctaaaatgagcttgatgtatcctgatgcaatgcgtttgctacttgtaggcttcttatacagaggctcgagcacatgaaagatgaactgcgacaacgaatcgctaaggaggtacttgttcttgcactagaagtattatgtgctgataccataatgttgttgtattgattgattagaccactacaggctaaaggaaatgcggctctacaagctagcttggagagaaggaagcaggctttgcacgaacgacggttggcacttgaacaagatgtataaaccttctcttgagattttacgtttctatcctctattttttttggggtataattttgaggggaaataaacttccattttgctgaccaagcttgccatgaaattgtcaggtgggtagattacaagagcaactgcaagctgagagagacctacgatctgctcttgaagttggtctaagcatttcttgtggacaatttagctcacaagctgcggattccaaagtcagtatacactttagctagagaaagcagttttttttttttggttctatctcttgctttccttagttctaacatcacaatataatgcaaagacaagggcagagcttgaggagattgctcttgctgaagctgatgtcgcaaggttgaagcagaaagtcgccgaattacatcatcagctaagtcagcagcgacagcatcacttaagttcactcccagatgctcaaagccatcaccagtttctccataatcacaatactcaactgtgagtttacactcgatgcctggttctagctcttattcaatagttcaaacgagatattactcgaatgtaaactcgctaagagaaataacaatctattttttttcaaattcgcaggaagtcttttcaacaggactttgattccattcttgctttcgttaatcacgaaagaaatcagagaacggtacaaatcttattatgtaaccgaggaatctctattatcttataaaaaatgattctattatctgtcagtaacattctctgctatcgaataatctaggatgaaactagcctaagagcagactggaggaatggcagaggaaacaacagacaagtaccaggctcaccaagcttgaatgcagcatccttaggcatcccaatggaagagtattctccggttagtgatagtcttgtttaaaccaatctcacgagattcaaatgtgtaaaaagtgtgagtaaacggtcttgtaggtaatggactacggaagacatcatcatcctcctgcaacatctgcagctctcatggagctaaccactcgtctggatttcttcaaggaacgacggtcacaacttatggaacagattcagaatcttgacctcaactatggttcctcttcttcttctctgcaccgatcctcttctccaccatggaattaggctctttgagaagctcttgtccaaaaaaatagaaaaatgtaaagaaagtctcgtctgtgcagactcttcatgcttgtaaaaccggttcaaggttaaaccaactatatatttaccacgaaattgatgagaaattgtttgctcttgcttcgttgttagtgtgatttatgtgagtgaggtttgtaaaaagttgtgtgtatttcctctgtttttgtttctacattttaaatggttggccgacatataaattcagtttattgaaaagaagaagtaaaaaaagattctctagttagtgctacaatgagtcataaccttttattattccggaagaattattcttgaagggaaagaaaaaaacgcgctttaatctctatatataacaataacactttgggttttagactttagatacgaatcaaaaacatttgagataaaaatcagaaaagtaaagagacgaaaatg

SEQ ID NO: 960 - DNA, 3000 bp, Unknown
  misc_feature (1)..( 3000): cDNA_ID_4282072_gDNA_ID_1620342_Annot_ID_153999 3000 nt of promoter + ATG
ggctttgctatccattaagacaattatgtttgaaaaactcgattacgtgaatttgatgaatggttttggaggtaaaaatctaaatagaggtatatttaaaaaatataattttgtttttttttcctatttttttgcttacaaaatgcttataaagttcaaaaaaaaaaatctataaagttttagtataacttttatatactattaattttttgattatgcaaaaaacaaataaagggcataaatgttttatatctgtagggcattcctacaaatattaaaagttttagtataacttttaatatatatatattattgtttttcaaattaattcttactagtcaaagttaatgggattgttagaaattattcacgtaaacaaacaaatatatatttatatatatatgtatatatactattattattcaaattaattcttactagtcaaagttaatgggattgttagaaattattcatgtaaacaaagaaatatataaaattttcttctatttaaaaaagcaaaaaaattgactcttgaattttggtatagtactggtttagctaaggatgtactaaaatttattattgaagttgatcgatgaagatgacaacaccgtactatatatatacacatactaagagggagaaaataaaacacttagttaagtatacatcgaggaaaatgactttcaaaattaagaagaatggtttaatggtgcaattgcgtattagttctcatatgatttaatttttaaatatctattttcacttttcgtataaattttacttattctaataatatctcttaaatttataagatcttgtgtgaccgttttttggtatgtgtcactagttacattattgaatttaagggttcgataaaaacttatggaatgatcgggtaaatatatttaaccacggatacttatttgattttacatctaggttttttaatgttaaaagtagattgatcacctaaatttaagtctagggatatgtacgaaacaaaaatgtttaacaacatactcgtaagaaccttaaatgagcaatactttctttaccaatgaaagctgctgttagagggcatcctgaacatgtggaggttaaaattaatgactctctaactattttgttcaaacagaatttcatagattttccattttttattttactcattttgtaaataacctcattttaccattgatcaaataaatttaacatttcatataaaaaaaaacctcatttgaaaattgtatttaagtattcaattatttggagattgtattcaagtatttaatttgacaaatataatttggttaaatatttcaagtattctaaaaacattcagatatttcagttatttcagatagtttggttattttgagtgtaaacataactaatatctttaaattataaattataaatttggctatcttgattatttgaaatataattaagaataacattttagatatataattgtatttcagataagtctgacattcactagatttttaatttatttttaattttattcccatattttttttttttcttctcataagtgtattatattaaccaccaaaagaggaaacaaagcattaaagcttacaacgatatgtgcagaaagaaaagttaggcccaacatagcccataagattaacatctacggcataaagatgttttgacatttggactctatccaatacacgtgtccacgtgatattacaactgcaacacaagatgaagagtcatcggaagtgtaccgacatcaaccttcgccgccgatgaacaccgaatccggtgaggaatgcatcgccgaaacatcgcacaatgaatccttgtaaccaccgaaataaaactgaacggtgctccatttaaaagacacagcaaaaaggaatcataataagcatcggaatattcttcaatctttcaacccgaagacataatcgcttgatagatttctgcaaatcgaagtttctaaagacacaagacagaaattaatcttaagtaactagcacctaaaactaattaccatctcaaatctgttgagatttattgaaaaacaaaactaaaatatcaaagcaatcagcataaaactgattgactacgagcaaggatacaagcggccaaaacctcttatgaaagcaggatttgccgtacgggaaccggtcatctccactaaaagagctagaagataccgggcaaaagcccaaattatttggaacggctatcatcggaaaattcttgtaggtggagacaaaaagctttccctctctgaaggttttgtgagagagaagagagagagaagctttagctctttttattcccatatttttttaaaaaaatcattcagatattaattatctagttctgttcgtttccttccaatccagttcagtttagtttggtttattcggttctgagccggagcaacaaaaggatcaatcttaaaatcctcgttatgttatgacgattttgacgaggaccaatattgtaactttctatagtttattttattattcctccttgtagaatagtttatttgcaaaataaacccatattaatatctctttctctttttttcaccacactctctctctctctccggctcacacgagtcgctaatcaaataaacctaaaccctagatcgtgatcggcaacggcacctcctcgtcggcgatagcttctcttccactaaaagaaaatcctcttcggtattcttcttcctctaatcaatctctctctccgtttcggattctcatctccactcgatgactagaaacgtctcgatctgttttagatttgacaacgattcatgattctgattcgttcattgatttgattctctttgattttgtgttaactctcgtttataagcttagatttggttctcgtctctgattctgaatcgttcttgtagtgatttgatttatcatataagcgtagaagaacaatttgtgtttagttgaatttgatttttgttatgtttaggtgagaatg

SEQ ID NO: 961 - DNA, 3000 bp, Unknown
  misc_feature (1)..( 3000): cDNA_ID_2128828_gDNA_ID_1620342_Annot_ID_154009 3000 nt of promoter + ATG
atggacgtaaccctcaaaagcatttaacgagactatattagcagtagaacaacatcatagtgaaagatgtgatcctaattgaaaacatatcgaatgaagagttataatgattaagaaaacgtttgacaaaaagtcaaaaagaaaagaaaagaagagttacaatgattttacgcaaattttcagttttttttttacaatggtaaataaaaaatttattcaacaacaaattatgataaagagacacaagactaagaagcatttattgagattgagttaaatccatggacatgtttaacaaataatcaaaagtaatagttatatttaggaaaaatatatataaatataagtataaacagaaagtatatataaccaaactggacatagttatgacagatgaggaacggcatcgaagacatcttagcgcctcgaatgtgtctcaggtttatataggtggagttgaatctgtgcttcacgtgtttagagactgtccagctcaattggggatttgggtcagatttgtgccgcgaaggaggcagcaggggttcttttcgaaatctctgtttgaatggctctatgataacttgtgtgataggagtagctgtgaggatataccgtggtccaccatttttgcggtgataatatggtgggggtggaagtggagatgcagtaatatatttggggagaacacgaaatgcagggaccgtgtgaaatttgttaaagagtgggttgtggaagtgtatagagcacatttgggtaacgctttggttggaagtacgcaacctagagttgaacggctgattggttgggtgcttccatgtgtgggttgggtgaaagtaaacacagatggggcgtctcgtggaaatccggggctggcttctgcaggcggagtactacgggattgtgaaggagcttggtgtggtggcttttctctaaatataggccgatgctcagctcaacatgcagagctatggggagtgtattacggattgtatttcgcatgggagaagaaggtgcctcgagtggagttggaggtggattcagaggcgatagtgggtttcctcaaaacagggattagtgactctcatccgctgtcattcctggtgcggttgtgccacaactttctacagaaagactggttggtccgaattgtttacgtgtatagagaagctaattgtcttgcggacggattagcaaactatacaattttgttatctttaggctttcattcttttgattttgttcccgatgcgatgtcatctttgttgaaggaggatactcttgggtctactcaactaaggcgagttcgtttgtaacttttctttagtttcttaataaatcacgggaggcaattgtctcccggtcacttaccaaaaaaagactggacataattttataaaaaaaatatcgaacaaaaaattaataataaatatatacaatttttaaaatattataaaataaaaatttatttaagaagagttaagataaagatacgcattcttaaaatacttaattgtaatttgtacacaaccatctataacgaagagttgtgataggaaaattagagcaaaagtaaaacttaaggagaaaaacaaaaccttaactgaaaatgtatagataaaaatttataaaaaagaaatacaattttctaaaatttaaattatttcatataattaaaagtcttaaataaatattttgcaaagagttacaacaatcaataagcactacgatagaagacatatttacaatttattaatttgtatattcacataattactcacccttctcttacaaggtagagtaaattatttttattcaaactcatcattggtgtaacctttcttgaaaagatgtatatctatcttaaactaaaattgaaggagttttcctgtttcttaagattactgagtatttaagtattttttattatttggataagttaaaatggttaaatgggtaatttataattcatagaatcttacatggtagagtatattgatccaaactgatcatttgtataacctttcttgaaaatcatagatctatcttaaaactaaactgtaagctttttttttacttttcaattccctaagattatgtctccactttaatattttaccatttctcttaaacagaaaaattgaatatacctatttataagtattcaaaatttatttttaggtagaatttagcgcaaaagtttattaaactttacgtttacaatctcattatttaatattcacgtgaatgaatattttgacatggtaaatataatataacactataaataatatatttacatatgatgaaaagaagaataatttgataaattagaaattcacataatacatgaaataatcacatattaattccaccctaactagctaaatgataaaaataaaatcatataaatcagttcataaaacaaaaaatgtctcgggaaaaaaaaaacactcttccaaaagagacatgtaatagtcaatttatttctattttcataatcatcgttaatcctcattgcatgtggtacaattattctaataagaaaagtgaatcgtcccaataaataatcctaaaatgccgtcttaaaaaaggcaatctataaaattatttataaatatctaagaatgagttgtctactttccattgattaaaaagagaaaatatcataaacaaaaaaaaaaagtcagagaagttaaaccaaaagcaacaaaaaagaaaaaaagaaagaataatcaagagagaggagaagaggacggtggaagatattttgcagttgaagaaaatatctttgatattttttgtgtttgaaatatctaaaaccaaaaagtttcatctcttcattccgccaaattgactggtgatgacgtggcaactttacccacgtgtaaaagcgtctacaactgtatcgtttcttttgatattttgtttctctctttctctctgatatttttcattttcttcttcttctctctctctctccacaaagataagccaacaatg

SEQ ID NO: 962 - DNA, 3000 bp, Unknown
  misc_feature (1)..( 3000): cDNA_ID_3059879_gDNA_ID_1620342_Annot_ID_154015 3000 nt of promoter + ATG
gtttgtcccaagtttggagtgttttccgaatttcatggataatcagaccgcctgcatttctaactaccatgtaaaccagttagaatttagccaaaacccaactaacacacttttcagacaaatgtgttttttttccaaagatggtcgaacttagatataaaaatttcactcttgaccaaaattttctctaccatattgagtaattcaattctctctctaaaaattagagaagtaaccctctaaaccaaatcattttaaaatgtatataaaaactcatttaaatcatgatcaattacaacattatatagaaattctctcttcttcgaatctctcaaagtaagatggttataatcatgtgtgtggtttcactaattaaacaaagacactttgattttcacaatgaaatcaacatatgccttcaaaaacatttcacatcccaaaacaaattttaatattcaaatacttttcaaaaattaaaattaaattatgctttcaggggtatatgaaattactttaatttccatatatcaaagttaaaatgtgcaaccatatttggattttataaaatttaaacaaaacattaaatttaaaatgatttttcttaaaatataaaaatattatgtatgaatagaatgaaatttcttcttaaaaaaacgtttcaagaagataaaatttatttaaggggatgaaccttattatttacagttcagaaaataataaagaaattgattgctaataataaaatattgaccaaaatttagaagtaaatattacacatagactttttgttaaccctaaaaaaacctttttcgtttttttcctttcttttatatatataggataggataaaaccattcataagttaataaatctgcacacatatactctcttttttattacagttcacgcattgattgcaaacaataaaaccaatattgaccaattaactagaagtaaatattattaataaaaatattttttaacatgatgcactcaaataaaaaatatttttagattttttctttcttttgtatataggataaagaaagaccattcataaattgataaatcttgccagtaccaaatttaggtaactagtgattctgatccacacgtatactctttttttttgtacatatatttaaatggggaatctaagctaatggaagaaaataaacaataaaaataaaaaagataaacagaaggagaaagtagaccaaagttacatgacaactaggaaacaaaaagttcgaaaagaaaccggatttgttctgctcggttaagttccggtttagttcagtatgaacaaataaaagtaaaacaaacgagggacgtgtgtatggaagaggcaaaggctgagaaacttttggttgggacaatttgcttaagtaatgactaatgaatgacccaaaagaaaaatcctattaactctttcttcttaagccaacttgctttcttcttcaacattacacattacgtgtaactgtaattaattaaaaatctttacacattgaattattagtttttgtttattcgttgatttaggcatttagcaattcaattcagtctttggaaactgttcttatgactgaccctttttaactttttgattcaatttccttaaaatattagtttttattttgggttatatggtaaattacacattgccgtctcgtcctaataatcctcttttctgttcccatttgtgttgttgtgctttgcttccttcctttttcctcattctctcttcttctccttcttccttctcctccaccacaaagcggtaggtttctctcttcaacaatcggtgagtctctttcgttttcattaagaatcttcataaagttttgatttttattgttcttagatcgatttatgttctgtatctgtttggttttggttttgattttgatttttgtgtcttttctgggttctattgggttttcaaagctcgatcgaaatagataagaatcggttggtgggttttttgaaaaatagttttttttttgaaattttgtgtcaaattctgtagaattgttgttgtggtgaatttattattcatcagaaggtaaaaaaattattttttgttattgggttttagatgtttgaatcggatctttacttctatgagcttgttttatgagaaagtttgattctttgaggtttttgaattgttttttattgtgatgatgctttatcttcaagctgtgggtttcttttgtctttgcttttaccttgctgtttcaatacatctttgcttggtattgaggatttgtgaaacttcatacgctgttgcatctatgggtagttgatatgtcattgatgaggcagtgcttattttgatatttctcttgtttttctgaattgccattgtggtggtagttgagtaaaatgtttttcactcttttccttgtttcaaaattggcatgcttgttacgtggtcctggattttgtttgtacctcattttcattgacgctttgtttcgaagttggcagttaggtgtcaatttgataatttagacttgaagttcttttgtgtttagaatggttgatcatatgaattttctatcgcatctgtcctcttattttttaagcttgttaataactcatgtgtcattagtttcctactgaatcatttgtgttttagttaggcgtcgcatctagaagtaagttgcatttagtagtagttgcagcggtcttgctttgagtgacttttgcaccttgtgctcttctaggtgaagcagattatatgactgtatatgcaatctcagggtgccatttattattacaattgtaggagctatgttttgattgagtgtgtttatatgtttcttattacagttgacatcgtgtagaagccttttccttgtctttgttactgaaagatctactgtctttgttgttttgcagtctccccattaggcacattgttgagggcagggtagtctcgtgagttctcttctcctgagtgtaactgtggttaaaagcttagccaagatg

SEQ ID NO: 963 - DNA, 3000 bp, Unknown
  misc_feature (1)..( 3000): cDNA_ID_3059866_gDNA_ID_1620342_Annot_ID_154021 3000 nt of promoter + ATG
ttgattcattatcaaatcaaacaagttcaccatagcttatagaggcttggttagaaatgcatggtaactttttgttttttaatgcaactttataggtgtatctggaaaggattttaaggagaccagagattgatgccttttcagaagaactaaggccacatcaggtatggactgtgaattaagatttagatgtagtttttggataacatctgagttggtaagtaggttcataacaagttattacactgttgatttcaacagaaagcatctttgcctgacaaatccactgttcttgaccgtgctatgattgagcataaccttcttagtgcaagcaaactctacacaaacataaggtatgagatgtcgaattagtatcttctttgtgtgtctagacttgtttgattttctcaactattttatatcctaggtttgatgaattgggaactctgttggcgattgatccaagaaaagcggagaagatagcagctaatatgattgggcaagaccgaatgaggggttccatagatcaggtaagcaataaaaaatactttgttggttgagctatgtaagagccctgaagagaattctcgttagtgttgattttctagaaggaggttcctagacgtgttttaatattttatgttactgttcaggaggaggctgtgattcattttgaggatgacgtggaggaactacaacaatgggatcaacaggttttctatctctccctcccactctttgtctctttagagcaactatatatgattgtttgttttattggcgtggaatatgactgaaaagtggaatctgtgcagatatcgggattatgccaagctctcaatgacattctggatgggatggccaagaaaggcatgtctgttcctgtctgattgactcccaagccgtgagatcgcctcatgatgattaatttgtattagccgagcaacggatcgagtctcatgccaaagtttttgccaaattgctgtgttttggggacagtcattttcaccttatttactttcttgcaaattcatgtctatgtctttaggttaattgattcagagaggaaaagattaggcattgaatgaggatttttaagaaagttgaaaagaggttcagggtacatttttacctcagaacaaattattttatgcatagatgaacctttcttgtgcaagagaatgatgaaactagtagttttttttttttttttggctcaacaacaacttctcatttaccaaacggtgattacacagagtctgaatacacacaatcttttatccaagccggcacctttagaatacattttaggatcataattcaataaagaaagagattccctagcaattctatctgccacactgtttccttcacgctttatatgcatcaccttcacctcctcaaattgttggaatatatgtctaatgtcctgaattcttggggccaaatttggataatcagtatcatcccctaacagagacactagatgttgggaatctgattcaaagatgactttcttatagttaaatcttgacattgaaagagctgcccatctcatagcttcaagttccacttccaacactgtctgaactctcgggattgcacgaagtcccagccacaacattttcccctcatgatttctcagatgaaactagtagttacatataacattttcccattcgttgtttaatttttattcttgaacgatcaaaacttatgcgaatttaagaaatgatcaatgataacagacgaaactgctagtaataataatgagaaactgttgcaacaaaatttcggaagattcgcaagaaccgactagtaaaatgtgttgcaacaccaaacaattgaagtgaaacttagctaagtagtgtaaagaagagactacatttcaaggttccatgtagtttctgcggtcaatttcggcgttttcagttcatccgcaagattcacagacgcacatacctgttgaaacaagaaaataaagcccatcaacgaccaaaacacatggaatttctaaagttcgtaaagcggtaaagcttcttcacgacatagttgttgctcaaaagaaagcaaatccaatgtctaaatatgattgccaatacacagaacaatctaaaattactgattatgatgcagcaaagaatacatgaactatcctaacccaaagatgatgccttattgtcaagaagctatgcatcccatgtaggtagcagtttcatctatcaaatcaattctatttctaccaggtttaagtcactgatatcaccgtttaactttaaagaactaagattgtcatcaaaatatagtaaacgatatgaactttcgactgaaaatgttctttcttaccttgaatccacttgctttgttgttccttgaccattccatacccaacaacttactagacgtctgataagttgccctcacattatcaccactataaaatcttcgagaaaccgcaaaatcccatgtatttttcgccaagtcataacacggctcgaacgtagctaaccctccatgagcataggtatacttaatcttacagttgtttgtcccaaccatgtggttagcagagagtttgtttgcagaatcaatcacaaggctcccatcgacaattgttctgttatcagctctgctatgaatgtaagtcaaattcaaaggcttctctgcaattcttactgtgttcatgaactgaaacctaacatcctgtaaaccaaaatcaccaacatagttaagcacatagattcttaaatgtctgcctgcaaatctctttaaacttgtggagaatctaaaaaccctaaactccagaatcctaaatcctacttcaattcaagcattagctgcgtaatttctaggtttgtttgctttgacttgaatcctaggtttaatcgtaagcaatcaatctcatttccatgggaattgaaaaatttctaagatttgtttgctttgactcaaatcaaaagagttgttctgacctttttagggacgttgtactcgacgatg

SEQ ID NO: 964 - DNA, 3000 bp, Unknown
  misc_feature (1)..( 3000): cDNA_ID_3059857_gDNA_ID_1620342_Annot_ID_154025 3000 nt of promoter + ATG
taaagaattccgcaaatccaaaataagcaacacaaaagaacatagagaggaaactaaaacaaaattctgctcaatgccacacacctcattccagaatccagatcaattccactcaacatctgtgctgcttttgaccattcctgctctgattcatacaaacccgcaagtttttctctgataacaagtgcctgcaaatacaccacaaacagtttcatctcttagaataaagagattgaaaaacaacacaacgtacattgtctcagttatcccaaaatacagcatccttagtaaacaaatatctcaaattagctttcagtgtagatttcacataccaaagcggtacaatagcaaagcgactctacatacctctcaacttatgttaagtaggtaaactaattagggtttaaaaagtacacgattgctgctaaacagtaaggtatcacgaagagaaaacaaacctgttcctcaaaggaaacaactctaggctgaatctgggtaagagtaaattgagcaatctccttctgcgtctccggttctaatctcccaagctcttgtgcgaaagactgcaaaagctgcctcgaaaccaccaacgggacatcatcggaaagaactggaaaaattgtgaggaagcaaaaatcaaaatcaaaccagaaattctgatataaaccgaattccataagaacaaaaagcagttgtcgaatctcttatgaagttgaaaccatgagaaagaagggagatgcgaaattactgtgatcgatgaatctctgagcttggagaagatcgttggaagagagaacagaggagaggatgagtttgtactgttcgattttctggcgttggtcaccgattgcagaagcgttcgtcaaagcttcatccatggcttctcttctgagattttctctcccgcttcgattgaaaccctaagaaaccttacaaggttttgatttctctctcgctttttttttttttttttttggagtttgctctctttttatattaaaaaaataaacggggactagattctgtgccggtgatcggagaggcgctttacaaaatttacttaatatggtcacaactcatatgagattagtacccaaaataaattaaaatatatatatatatatattaagcataaatactatatttttttttgttagttcataaattttataattaatttgtgatggtaagtttaccaaattgattgtagattaaaaaaaaaaatcaacaaataatatattgtttagaaatatttttatatgtgagcctaaattactacagtaaatcttttacacaaataaaaaaacacgtcgtgatttggaaaacacgatgatgaggtattttatgatgacaataccacgtttaatattatgataccagatcggaaaaagatgatatgttatgtgttttagagcttagggagcaatttaagatggaaacgtaaataattatttgttgagaaagaatcgactagaagcaatcgaaaaattgatcgaatggtcaagatatgaccgagaagtcatcggaaaagttgtgagcccaaatcttgagagcaatgacatgcaaaatgttttgaaagtgctctcatgaattaaaagtgaaaaaagaaccactctctcgttacatagagggtagtatataaagaaatttacctatctcagactaggaaaccaagtctcgcattggaatacgactttggtttaaacatgtgagctgactgacaaatcgattttatgtgctttacaacttagatataactgaacatattggtattggatgaggttggacgatagactcatagacacaatcgttgtctcgaaaaatcacgagtttctctcgcttaaaggattttttttgatgaagtttatggtgatcccgttcgagaacatcacaattgtttttgaatcaactttacagatccatattgtaactaatgattatagactacatagtttaccaaaattacatttactcaaaagaacagatgcggttgttgatggcaaaacttttttggaatggtagacatcccattgaaagaaaacaaattgccatggtatggaattcatgataatgatttaactcgttatagtctggacaaattgtcatggtagggtttcattgctctttctttgggtagttacctcaagatatctctttgttcttccttgtgatagttccaccttgatatgtacaaccccacattaatctgctcatttcaacattaattttctctattgtttttaaattgtgtgtataagattatttcactaactaggaaaacaatccatttctttgacacatgggctttacttaaacaaaagcccaataacttgtgtttagaagtcacatgatcaaatctcaagacctattataaattaacaaatttcatattgataaattttaaaagatttcctattacaatatttaaagttgctacaaattatagattcttttgatcttttctgatattgtttctcaaataaaatataggaataccaaattacaatatgaaagttgcttcaaattatagattcttttctgattttgtttctcaaataaaatataggactgaactaccaaaggcaataatattcaatgtgaccaacaaaaaaaaaataaaaaataaaaagaaatactcaaatctcataacctttttgactaaatatatcaatttcttctattttcaatgagcataaattacacgcgtcctcagaagctgaatccgatttgcaattcttcaatctcaaccgttagatcaacaaatccggcatcgaattcctccgcgtggtttggtccatttttttaatttgagtattaattcttttcctatttgacaacatgttttattaattattattattattccatttgcattaaaatataataaaaagatgtaagattctctccgcctccttctctctataagaaccgacacagagacgaagaagaataatcactcgaaaactcatcaaatcaaaaatcaaacacagagaagagaaa

SEQ ID NO: 965 - DNA, 40 bp, Unknown
  misc_feature (1)..( 40): cDNA_ID_4359773_gDNA_ID_1620342_Annot_ID_154028 3000 nt of promoter + ATG
ctatctgtagaagaagcagatacagaattcagaaacgatg

SEQ ID NO: 966 - DNA, 3000 bp, Unknown
  misc_feature (1)..( 3000): cDNA_ID_2128873_gDNA_ID_1620342_Annot_ID_154026 3000 nt of promoter + ATG
ttttccttacattgctgagatagtgaatgttgcttttcatatgtaagtttctcaccaaatgtttccttggtccaaaaaaagggattcaatggtgctgatctgcgtaacatatgcacggaagctggaatgtttgcaatccgagcagagcgggattatgtgatccatgaagatttcatgaaggtatgcatatatattatgcatgagaataggttaaatcatgttgtaatcttggttgtgatatggaaatgaaccaactttttgcaggcggtgagaaagctgagtgaggccaagaaactggagtccagttcgcactataacgctgattttggaaaagagtgagagagtacacactctttcttgtgctttagggatgaagaaaggacattgcaatgactgtctcgtattctttattagcaatgtgaaacttgtttttttaactctttcaaaagcaaagcttgttgtgaagtgtgtgcttagttactacgtttcagtaatttagtgcttcaaacaagcatttacctcttttctcgttggtactgtggcttaaatattgttgcttctggaccctgattaacatcaattagtccaaatcaaaagaattgcaaacatcaactgaaccaattatttcagtcaaatagtatgaaacaaacaaaaatttcttaaacatctctatagtacacgttaatatattttgttcattaaatcttacttggatcagttcaaataaaatcggacttttacactggatacttctgtatttaacaatataaatattcataagatttggttaagatttaaaactttgaatctcttatcatttttgtttgattttgttttaactgttttaaaccatcatatagtatataaagttaagaaaaaacttttttttctacatatattgtgattcgaaattttgaaaacggacatatattaattgataaacgaaaaatatatggatttaagctaaaatgtttaaatctgatgacaagaaaaagaaaaaaaaaagctaacatgtttaggggatgattcaaaatcatatcataaataagatcaacattaataaaataatttttgagtgggacgtgtttgacggtatcttacttaataacaattgtaaactataaaatataaatattttataaataaaaacaatttgcaaacttttatatatactaactttaggaaaaaaaattgtctcactcatgatgtacctttattataaaaacataaaattaattaagtaatgatattttcgatttttttctagcgcaataagaatagaattaccgtaaaaaaataaaaataagattaggattaaattagctaggacaactttttcaaaaagaaaattaacatgccgaaatcatgaacgtcgtaaatcatcaaacagctaggattcgttgtatcatacacttaaaatgattagagagttgatctattactctagagtttacttgcaatgatctcaaacataaaaatattaaaacgtttatttgattccctatgcaatgaaaagtgaagatctttatgattagcacggaattttccaagcttaacttttgacttttgtctccctaatcattcattaataaccacttcatgtctttataaaaagcaccccgtacgaagttcttcactcaaagctcctcataccatagtatattttgagctttctaatcacatagtaataattttgaaaatggcgatcctaactcccgtcattaaactcgttgtttttaggcaaagtctacgaccacattctgctattgcattcctcgttgagtttctttgcttcgtcttagaattactcgacaaggagaaagatctagccaaaatattcggtatcgtatgtgcttgcgacacattaatcttcactttgctcgatcttatccaaagtttgatcgaggaagaagtgaaaatacaaagatgcggccgagtgttttggctttacacaaacgatgggagcctctattggcacacattaaacgcatatcttttgatgttatgcattgtccacgtcatcggttccacgatctcttacgtttctcataaacattatctagtcttgctcccgcttttcgcagccggactcgaactcgtcccacaagaagcctatcgagttcttggaccggatcaagagtctggaaattctattgagcctcttaatggtccattaaatggtattgagcttgaacaaggaatggttgttcatgttgagcctcttcaagagccactagatggtattgagctagagcaagaactcgtcccacaagaaaccaatcgggttcttggaccggaccaagagtcacaaaactgtatcggggctcttaatgacccatcagatggaaaagaccaaaaccttcaagatgatattgtgctagatcaagagtcacaagattgtattattgcacctcatcaatgtccattagatggtattgacctacaacaagaaacggtagttcacgttgagcctcttcaagacccactagatggtattgagctagagcaagaagtggctattcatgttgggccaaatgatgacccataaactattagaagcctactatagaatgaaagctgaaacattatatagatggagacgtatgtttaatgtaatgtactttgtcttaaaaacttatgtacttatgatcgtacgactttggtagctacaatgtaagagaatctttgttacaaaaaaaaatctataaataaaatcgactcttcaatgtcccgtggagtcagtgaaggataaacgacacgtgtgaacacgaaggaagattaatagccgtccgatgaaaatggttaattttgtaattttgactctttcacgtgtgccctttcctcaccccgaaaaatatttttatttccttttgtttacactttttgatttcattttcaataataataatattcgagtagaagaagaaagatccagacaaaagcttaagcaagacctctctgtcttcgtctctctctctctctctctttgtctccgccatg

SEQ ID NO: 967 - DNA, 3000 bp, Unknown
  misc_feature (1)..( 3000): cDNA_ID_4359722_gDNA_ID_1620342_Annot_ID_154022 3000 nt of promoter + ATG
aattgaaattccaaactatttttaagtatgaaataaatttattttttaaaatataagaagcctaactcacattgtatctaaaacatattatttatttttaaaaaatctttttttttctaacaataatcttaattaaaaagactaataaatgttagtaaaaatgtattggacatacaactaattgaaaggatttcaaagtttctctagactaatatgaggttcacaagagcaaatagataaatttagaatatcaagtatagttttgctataagatttatgttaaagatacaactatcacacctagacaaaatttaaaagcatatcatttgaaattgcatatgagctaaaacttatagtaaatatataccgatcaatagaattaaagaaaaaatgctttaaatttatatattaacgaaggattcaagttgtttacgtaaaaaaagaagaaggattcaagttaaatggtaaagacacatatagatatctaactagttttatcactaatcattagatatgatttgatactaactaagatacgtgtgaactaactgatccataagaaaatacaatttttgctaaatttttaaaattagaggatttaatagatattatctttaaatttgtctcacccttcaatttttcaattttgcattgaaattcgaattaaaattttgtaaatatgcttgcttatttgtgtgagctattggtctaaggtcattaaattatagtataatgataaagattgtaaattaatctttcctgaatttttaaaatgaagatctataaatgctttgaaaaaaagttaaactttgttgaattatgaacaacatactactctaattagaaagcaaatacaaaaaataaattccctaaaaataatatttagagctcctcttaataattaagtattgaaatattctttcactattcataagaaactatgttttaagttcaaatagaaaatcacaaatttatgttatattttttgagaacaaaattcgttttggatgaaattgtagtaaagtgaaaatatataagtttgtgtgaagaaatcagtaataacagaaaatatcaatttattggctcaaaatagtaaaagcattccatatttgaagcacttttggaaattgagacacaatgtttccacaagtcatcactcttcttcaagtattctctttcgtgggcaattaacatgggtttatctgcaatatatttaataagcgtatcgtgacacatttttccttctttgacgagatccttgcaacaagggtcaggcatggttccattttcaaacacagcagcgattatatccaaagcacacttaggagtgattttaacaaaacaagtattccataataatgttgcttcagcttcttcgactgagaaagccggaacaaacgcacacaccaaagctaaaacaatgaacaatgtagtaatctgagtgttaaatttagacatatctacttatggttgaaatatacaagaaatattcttattttactaaagaaatcgtaagaaagaatgattagtatttgttatttaaaaaatggggtaatctaacttttatataggaaatcaaaatcacaacgtaacttctaaaaaaaccaaaaaagattaacgttatatttaatggcaattaaaattttgacaaataaatatactaccaaacttaaatttaatagtttctattaacgttgcaaaattaaacaaaaaaaaaccctaaatacatgtaacaatatccaattcaatagatagaagaaagcaatggttaacttttttatattttgatatctaacaccaaatagttaatgggtataaggttcaaattgacatattttatggtattcagccaaataaattttaatttcaaactattttaagtataaaataaatttatttttaaaaatataagaaacataactcacattgtatctaaaacgtattatttatttttaaaaactttttttctaataataattttaatcgaaagactaataaatgttagtaaaaatgtattcgagatttaacttattgaaaggatttcaaagtttctctagactaaatttaaaaatattaagtataaggttcacaagagcaaataaataaatttaaaatattaaatatagttttgctataaatctgttgagaatataactatcaaataacatattatttgaacttgcacatgagctcaaacttatagcaaatatataccgatcaatagaattaagatcaaatctttgatgaaaagatcgaacttttgatgattccatcaggactccaattcgcaaaagtgctacttcgcacacgtgccaactcgcacaagtgccacttcacacacgtgccaactcgcacatgcgaacgaagaacacgcaacggagaataataaacaccgtcagcttttatcgtcatttttcgccgctctcaccgaacctctgctttctctctctctctctctctctctctctctctctctctctctctctctctctatctctactgtgcgaaaatggcgatgaaggcttctatcaaaggcaagtacgatactgacaaaaccagtggaatcggttcacttgctttcaacgccggcgatattaagctacgcgccaccatgaccgatgctactctcgtcgccggtcctactttgaccggtctcgctctcgctgtagagaagcctggttccttcatcgtcgagtacaacgtccctaaaaaggtcagaacaactcttttgatttgagtcaaagcaaacaaatcttagaaatttttcaattcccatggaaatgagattgattgcttacgattaaacctaggattcaagtcaaagcaaacaaacctagaaattacgcagctaatgcttgaattgaagtaggatttaggattctggagtttagggtttttagattctccacaagtttaaagagatttgcaggcagacatttaagaatctatgtgcttaactatgttggtgattttggtttacaggatgttaggtttcagttc

SEQ ID NO: 968 - DNA, 3000 bp, Unknown
  misc_feature (1)..( 3000): cDNA_ID_2128857_gDNA_ID_1620342_Annot_ID_154018 3000 nt of promoter + ATG
gcaatcaatttctttattattttctgaactgtaaataataaggttcatccccttaaataaattttatcttcttgaaacgtttttttaagaagaaatttcattctattcatacataatatttttatattttaagaaaaatcattttaaatttaatgttttgtttaaattttataaaatccaaatatggttgcacattttaactttgatatatggaaattaaagtaatttcatatacccctgaaagcataatttaattttaatttttgaaaagtatttgaatattaaaatttgttttgggatgtgaaatgtttttgaaggcatatgttgatttcattgtgaaaatcaaagtgtctttgtttaattagtgaaaccacacacatgattataaccatcttactttgagagattcgaagaagagagaatttctatataatgttgtaattgatcatgatttaaatgagtttttatatacattttaaaatgatttggtttagagggttacttctctaatttttagagagagaattgaattactcaatatggtagagaaaattttggtcaagagtgaaatttttatatctaagttcgaccatctttggaaaaaaaacacatttgtctgaaaagtgtgttagttgggttttggctaaattctaactggtttacatggtagttagaaatgcaggcggtctgattatccatgaaattcggaaaacactccaaacttgggacaaactttatggtggtctttcggagagaagtctactataaaacaggtgcaattctaccgaccagatcagctgatagggtttatcaaaaaaaaaattaattttaaaactttataaaagctacttgtctacaattcttgataaaagatgaagcattggataagctgctaatcaaagctcaccagtaaaaaatgatcatagacaaaaaaaagtggatggaacatctgaagcacatgcactagaagtagcaaatgaatctttcggattatgcgcatgagcttattctttggatctagctattatatagctcattggatatcaatggccataacgaaatagtaaatcacattggtggtccaatagtagcaagttaaagttcaaaaagaaggaggacggaaaaattttcacaaacctgcatggaaaatttattgatcttctcctctttgttaacaatggaacccatgttacgactcatatgccatgattctttggatctggttgtggtagagcttatcattgtatatttcatctgtggtttcagaatatggttggtagttgaattagatgttaacgaaccacatgcattttaccttgacggaatttgataaatcactttctcataggggctaacatttttatatctgagtcaatcatatggcataagttggcttgcacaacaaggtgtattagttactccaagtaatatactatgaccaaaccacgccaacaaacctcgtcctccgccaaactagagccacaaatacatcgatgggaaccataccgccgtcgacggaggggagtacctactcactcatgaaacttctttaagaaatcttgacatgcgatgaaaatcaaagagaaccaaagaaactagacctaaaaaacttcttcaagcgagagaaaaaactcaaaatttgatctaatgattgtctccaccataatactgtttaagcctttaaattttaagctttaatattctttgaccgtttatcatcaattataactaataagtaataactaatgctcatacaatcgttgtaagtcaatcacattctctcttatcgcttccaagcttaacctttgacataattctatgaaacagaggtattagctctcaaattttgaggctcattttatgtagatttgttagtgttttttttttaatgaattttctaggctctataattaaccaaagttttcataattagtaaaatagaccccaaattaacaaaatatccaaaattagccaaaaaaaacataattagcaaaaagtcccaaaattaagaaaaaacagtaaataaaaattatgaatctcccataattaacaaaataattaataaaagtaaagtttacttttaaaaaaggcccaatttttttttcctattcagcctggattttataagaccggctacgatcgcttctattcaccttcattgtaaaccgataaaacaatcatatatatatatatatatatataattttggcacaacaatcatatattaaaccgatagttttttttttggtgtgtttgagatgggtatcaattgttatcttaaaaggaacctagaagtaaatttcgtgacctttacacaccacacatgttgacgtagatacgcccaaacgcatgtggtgttgtatcaagacacaaagtcacaaactgtctaaaaagtcaaaacccaatccaaaaccatcatcatgttttcggcttctttaaaatcccggtttagggttctttcgtagcaacatagagtagacggtcctgactcgtgctctgcctctttaatttccggtttagtactctttcgtagtaagtagaaactctatccatatagacccaaagaagggccactcttctattctcaaaggactcggtaaaaaaacaaatgcgaacgagacaacaaaaacaagtaagaacactctacgcgctccctccaatgcgcgtaaaccccacgtgagactgatatccaaagacaagtgagttaaacgctctgtttaagcgcgtgcgttcagacacaaagtggataatcatggggaaactgtctaaccctaaagaaaaaaaagagaaagatttctaattttttttaatagctaaccaaaagagatggagaatgctaaaatacgctagatatgaaatagtagcttaacctacgccgtattttagtcgttcctctcttttaaacctacgttcctcgtcaccgtaatcgctctcgctctctctcttcttcgtcgcttcatctttctctctctctttgtaacttcgaaaccgatcaaatcc

SEQ ID NO: 969 - DNA, 3000 bp, Unknown
  misc_feature (1)..( 3000): cDNA_ID_3059887_gDNA_ID_1620342_Annot_ID_154013 3000 nt of promoter + ATG
cgtccaattatttaacttatctaatagcatgatcatgcatgatttccattgattattaaatcatgaaataattgtgttggacttataatctctatgtttttattaaatgtggcacagatggacttattaggtttctacagctgttggaatggtgagactaattcccttttttttttatattattgatgaataattaacttaatgggtccgaagaaggcaaataccacgtgaaaacactgtctgaaatgtgcaatatattatttttcttaactaaaaagaatttgattccaataataatactcaaatcaatgatagaccaaaaaactttatatttagttcaatttatatattgtctttcctaaaaatcaatttataaaaagattaaattctcttacctttttgcctctaaattaaacataaaattacgactagaaattttatgtttgtatcttttaaatagttgtctatgtgtgctaaaatatttaaaatttttagagacaataacctcaaattctctagaatttaaattttcctaaaatacttcatatacagttttttttttcatttttttcatatacagttttaagatcaaattcatttttctatttatattatataaacaaaaaaaattaatttattttttcttccttggtttttaggttaccagaaacaaagatcaacggaggtgattgttataaaggacacaagtacagatccaaacctcatcatcgttagtttcagaggcactgatcctttcgatgccgatgattggtgtacagacctggatctctcttggtaattttagtttcttttgttataatttatttccacacacaaacagtctaggtttttgtttttatactctttaagttcatcctttagcccccctaataaaactagtattgatttccaaaataggtacgaggttaagaatgtgggaaagattcatggcgggttcatgaaagctttgggccttcaaaaagaaggatggcctaaagaagtaaaccttgacgaaacccaaaacgcaacaactctatatgcatactacactgttaggcgtcacttaaaagaaatcctcgaccaaaacccgacatctaaatttatattgaccggacatagcctaggtggggctttagcgatcctattcacggctgttttggtgatgcatgatgaggagcaaatgctagagagactagaaggagtttacacatttggacagccacgcgtaggcgacgaggagtttggaaatttcatgaaagattcactaaagaagtttgacgtgaagtatgaaagatatgtttattgcaacgacatggttcctaggttgcctttcgacgacaaaacactcatgtttaaacactttggggcatgcctttactatgacagtttctataaaggaaaggttggttgcatatatatgacaatcttgtttctttgctttaatcactcatccgtctaatgtcgcttacgcacttaccctactgatgatatctatctacattgttgttgtttaatttgtattatgttcaggtagaggaagaggaaccaaacaaaaactactttaatctcgtatgggttttaccaaagataatgaatgcactgtgggagttgatacgtagtttcgtcatgccttattggaaaggtggagagttcagagaaggatggttcttaaggtgttttagggttgttgcattgttgattcctggattacctgctcacttccctaatgagtacatcaatgttactcttttaggtgacttacctgactcgcatcttgattaaattttgacgaagtcataaattcttttgaaaagttgatgtgtttagcttttctagggtctcgtttcggtgatgtaggtgttattttcttattttggccttagatcatcctttctttctcgcaatgattctacgtctcactttatctttatctgcatcaagaaaagaaatgcataaatatttcaataaatacttagtgaaacgattctcttacctgcgagttatacacacaagcaaaccaatataacaatcaacaaataaatcatgaaataaatcaaaccaatgaacaatcatccattgacacaaccatctcgggggattgaataatggtaccaaaaatactgcctatacatacaacaaataaatcacacaatctcaattgcttagataatctcatggtcacatacccacctcgaaacaagaatgattttgaaaccaaaaacaacaatcccacaacgagcagtaacttcctactcaccaacaatatctcaactcaccatacatccaactacaacagcaaaccaacctttaacctaaattggaaaaaatctgaaaataacccaaacaattggtctcaaatattgagtcacgaatcgcaatctaaccgtccaattcaaatctccaccgttgaaactcaaccctcaagatgtcctgaagctaacctcaaagtttagtgatgatctgaccgcaggtgcactcgagataatttgtttaatacactctggtctaaatcacgtctgaaacagaggactttacgaaaacacagataacttttagaatattaactcaaatccaaatccgcaaagtggtaaatctagttataaggcttagctacaactcaataaaatttccgtaccatagaaggctatttgattgatcaaacctctgttctaccacgacatatctgatatgtctctctcttccttcaccaaaattatcaagtagtttcctttttggtgttttttacataatatttttgatatcaaaccaaattttttcttgtctttatacagaattttctgaaaaaaaatgttacataatctcttttacgcaattatcatcccatcatggagtagatataatatttgtaacaaaatatagtttacataaaaatcataaatagtttgacaaaaaaacaaagaacaaaaaaaaagaagaagagaaaaatcataaatcctgtcagaagtaccggagcgagcctgactggagaaatcgagaatg

SEQ ID NO: 970 - DNA, 3000 bp, Unknown
  misc_feature (1)..( 3000): cDNA_ID_1013653_gDNA_ID_1620342_Annot_ID_154006 3000 nt of promoter + ATG
gcacggtggtaattctcatgagtttcttaggagtccatggattaagcattataaacctttagtaaagacacaaatcccggtaacggatgagcccgaaaatcaagttgttagcagctctaatgggaagaagggaatatgcagctctggctcagcctctagtctcaagcagctaagctctcattcgcgtgaccacgaccaaatcagcgttggagaaggtattagtttatcaaaaatgtgtttctttcctctgtttagatatgttgtttctattctaaatttgtcttgtgatgttttaaagcagaggtatcggatcagaactttgttaacgaaggaataaaaggcgaaaacggaagctcgaagaagatgaagacggtgatgatgagtgaatcgtcgagtaccgatcaggtaacttcttcctccactattagtttgatcatattagtgaatgtggtgagttattgatccaaaatgtttccttggcataggttgttccactcaataaactcttgcaacatgacgtaaatttgaagtctgtttcttgagaggtcagatggtgaagctttatatgaggagagaattttgtaatgtatatatatttgcataacttataagtcaaatttactatccttagttacaagtttcttcatcatatatccctaactataaatatatttatatgctcatgtgagtggattcatttgtactgtaaaacccttagaaagacgtcaaattagtatttgatggtttagtgttgtcttgttaccactatagtataaaatttcaagttccttaattttcttttatgttgcccatacaataaaaatggtggtcgaataaaggtaaaagataataaaaaataattgagccggttattatacaaacggtgttgtttggataaagctaattggctaagggttgtgtatgtgttggaatcaaaccttgattaatttcgaagaagaatctaggaatgagaaaagaaagtgaagaggatcaaaaaaaaaaaaaaaaaaaaaaagagaagaagagaagaagaaggtgtctcagaagagtcgatcgcgagagtgagggagaagagtgctttgggccattaagttgaatcagcccactatgttagtgggttgactttgatgataaagttatatttttttcttattattatacaaagttgggtttgttatatttaacaccaaaaatagaaaacattttttaaccatatcggaaaaataaaatatataggttgtttatatattcaaatttttattttaatatagtaaactattaaagtaattttaccaaaaaagttaatatattcaaaacataagtaaaaatttggtttcgaatgtataaaattgaaatttgattttttaaaatatatagattattatttagaatctaagtatcagaaaaagaaaatttatttatttttcacacctcctatttatcggacattaactagtcaatttaataatcgttcatagattttgtgttacgacatatttaaaagatttatgaaaacaattttaagttctgaacattgcaaggctaaattaagtatggactcaatgtttcaaattgttattcatcagatttaaagaatgagtaaattttgaatacaaatatgactcttttattaatgtatcatcatgtttttttttttttttgagtataacatgtaaagtaagctaaaagtttaaaaaataaattaaaaagaaaaaaacaaatatttttaaaatatattaaagctctattttggtgtcggaggagttgcaccagcaattcttgaacattgttcctttagcattggaggaaaaagcggaatgaatggaattttgggcatacaattggcttcagcatccaaaaatgctttgcaacaagccggacctaaattaccgaattttccaatgaaaatagattgagaaatttctgtaatgcatctgggaatatccatcacggatgacaaacattttgttatgtcaagtaatcctggcataccaggaatcggttggaacggaaatggaaaaggaaacggaccaggaatctgtggcaattgagcatttacagaaacaatgatgcataaaaccgcaagaagtgaaagcacatttttgatagacataacgagaaattgaataaaaaaccttagtataaccaaatatatgcttaatgcatgttctgtttgtttttattgataaacaacaattaaatctttgcttatttataagaaatgaaatgtgaaattgtgatctgaattatcttagtttaacgtctcagaaatgttttaattaggtctttaattagtcgttttataaattcaaatagagctgaaactccataaaactacaacatttaggaaataaaagtataatcggtttcacataataaatcaatgaacgcaaacaccttttccactaaaaatacaacattacaaggcaaaaggcccatacggccaaaagcccaaaagcatgaaatcaaacacaaacctgcgagaacgaacaaacagaacaacaatcctcctgaaactaatcttttcttcttcgtttttttttactagtccttttaagtactgtcccaaagctttctaattgatgtcaaagcaaatcacaccaaataactagataagtaacatttgctttttaaatacaatacatacatagttattcaatcttcattgaaaaagttggttttataattaggggaactaacaaatattaggacaaaatcgcaatttgcagaagatgaaaaaaaaaattactgttgtttggtttctggtcaacataattagtctgctaaatctccccaaaatagaaacagatagaaaaacagtaatcatgaggtaagaataagcaaatagggaagcgtgccagtctctaacaaaaatctcaatctttccatacttatcgatcacgtcacctcctttgtctctattacctaactccatccttaaaaatccaatctttcacctttcttctccgagatttcactacactgcgcaataaaaaaatg

SEQ ID NO: 971 - DNA, 3000 bp, Unknown
  misc_feature (1)..( 3000): cDNA_ID_3059853_gDNA_ID_1620342_Annot_ID_154001 3000 nt of promoter + ATG
aaatatatttacccgatcattccataagtttttatcgaacccttaaattcaataatgtaactagtgacacataccaaaaaacggtcacacaagatcttataaatttaagagatattattagaataagtaaaatttatacgaaaagtgaaaatagatatttaaaaattaaatcatatgagaactaatacgcaattgcaccattaaaccattcttcttaattttgaaagtcattttcctcgatgtatacttaactaagtgttttattttctccctcttagtatgtgtatatatatagtacggtgttgtcatcttcatcgatcaacttcaataataaattttagtacatccttagctaaaccagtactataccaaaattcaagagtcaatttttttgcttttttaaatagaagaaaattttatatatttctttgtttacatgaataatttctaacaatcccattaactttgactagtaagaattaatttgaataataatagtatatatacatatatatataaatatatatttgtttgtttacgtgaataatttctaacaatcccattaactttgactagtaagaattaatttgaaaaacaataatatatatatattaaaagttatactaaaacttttaatatttgtaggaatgccctacagatataaaacatttatgccctttatttgttttttgcataatcaaaaaattaatagtatataaaagttatactaaaactttatagatttttttttttgaactttataagcattttgtaagcaaaaaaataggaaaaaaaaacaaaattatattttttaaatatacctctatttagatttttacctccaaaaccattcatcaaattcacgtaatcgagtttttcaaacataattgtcttaatggatagcaaagccaactcatttatttgattaataaaaacaaagtttttattttgtaatcaaagttcaagcaccttacattagaaagtctttgactttttttttgtaatcaaaattttagagtttaaggttttatttttcttaaatctaaaattttactaaactaaattcattaataagacattttattaatttaaaaagatgaaaaaaagatagtaaatgaaaagtttaacaaatataaatatatagaaaaatgcttataattgattttttttataacataaaagtcttaaaacttttttataaaaatatgctcctctactataatgtcctaagccgtggcttcacttgattgtgtagaatgtcgaacctggctacgaagcacctaataatgttagacattttgacgtggtaggagttgtgaaacgtctgactttttcttcaggcattggtattcctaaaaattatacatgtggccgcaaaactgcacttgttccgcccagagtatacaacacttgctaaagatgtaagtgagtttagtttaaattaattttatatcgtgtgaactaagatatcttaaaaataattatttcagtgaattccatccttttttttaagaaatttatcgtgggtcaaaatatatgagctctttttacaagggagtaatagatgtgatggtttgtaagactagaatagcgaaaggggagtttgttgcgttcgtgaagttgccttgctcaaaagtggaatctctatatgtctcattagacattttgctaatccaagcgaaacgaaaggtgcgtggtggtcgtcgtcttactgatcccgacacaaagttagctacgcatacgcgtttgttaatagattttgtagcttttgctcctcctaaatagtcttttgctcaaatgttacccacgttgaggaaaattgtagggtttaacagaaaattctaacggaacgttaactctgtttacgaaaatttcacggcatgtccgaattggcccagtcaataaaacttgaccattttatcaaagaataaaaaaaatatgatttaaataacatttcgaaagttcatgtttttttcgtcccaaatttaaaaattagcgattttttcaatatttttcccgtaaatcaaattatccgaaaagttttgattttgactttgctaaaagagaaaatctattttattttacaaattgatcgtgtaggaaactaattcaagttcaaagaatttggaaatctccaaattcgaagtgctgagagacattcaaagagcacatgaataatttatcctttttcaactttttcaaagctacaaattctgatctcactacaccaaccagattcggaaaaacatattatatcctaactattgagcatctacgttgcttatgtttagttcaaattttgacatcatcctagttgttcatttgatttaaatttttgatacctaatacagtaatactaatgccgattataatagagaaatatattactttggcatgttttaacgtgttgaaatgtgaaagtattttatatttttaccttttagacatgatcaaatgtttatttctcgaaagtggtaaacgacgaatattaaaaaaaattgtattaaaataaaatcgtaaaaaaatcagaaatttactaagtttaatctctgagtatatatgtgtgattatttgtggaaacgtattcagctattgtgttccgtctattcaatcattttactattccattcatagtcaaatcccagtgtttcaatcctaatcaaatttggatctcgaaccaaccttccaatacgttattagtacttacaagaaaggtgtagtagaaatttgccagtcggataagatcatgtcattcattcgacaaattcattgaccaagaccaagaccataagaaaaaaataattccaccaactcttgtttttttttgtcaaaacgtgaaccaccaactctttacttggtcaaaaggttatttggactttttaaaaactccaaagtagtataggataaacgaaaatttccaggttcaccaacctagacgtttgtctcctctcctgtctatatattcactcatgcaaggccaccagacctcattcttccaca

SEQ ID NO: 972 - DNA, 3000 bp, Unknown
  misc_feature (1)..( 3000): cDNA_ID_3059894_gDNA_ID_1620342_Annot_ID_154004 3000 nt of promoter + ATG
actaaccatttcaatctcttctctaacagaccgtaactcagaagtagccgagacttgcctcgctttagctacctcgagctgtgttttaacagcaacacttgcctcattagctacacctttctccatctcctcaacacgcatctgcgccagctctgaatcctgtttcgcttgttgctcttccttttccgctttctccaattctagtttcagctcctcgatgagtccctttgtgttctctaactcctccaacgcatcgtatttcgcttcttcagctaactcagcttctctcttgtactcaggcattgcttcttgtatcttctcaagctcttcatctaccatcttccgtctctgaaacacacattttcgtcaaaaccaagatctcaaataaacacaaatcatgtgaagaaacaaaagcttaactacaacctctatagtctgaatcttatgagctttccaatctgtgatcccaccaaacttagaaactgcttctctaaccgattcgaaaggtgaagctgtatcgataacaccaatcggagacccgaaacaaggcgattcgacagatctcggagaaccaaaacgaggtgattcgacagatctcggatacacaaatgctcgaggagaagcaggaactctaagacgaggagaagcaggcaaaatcctagcatcttcgataacatcggttcttgaatcttcagaaaacgaatcttgatgacttatcatcacccttggtgcaacataaaccttaggaggttcgttgataggacttgtctcacaatcttgaaatggattatgtaaatcttcatcgtcgaatgtcaagaagtcgatgtcattgaaagacgttggaccttcttcatcaccagcttcaccaatggcgttgagaaataaattaaggtcgtctgaatctttatcatcgcccaacattgtgatgattatgaactcagaaactggtcatgtgttgttcctgtttacatggtcaaaattcaaattcatcgcatttcttgtttcaaaaggatgattaatgaaaccaagaattggattagtcaatgtgagaatgagttttttcggacaacataccttaaatctgacaaaggagatacaaattgatgtctgattatgaggttgtaggagatagctacatcattagaatggaaatattttgaaggaaacaaacaagagaaacaatcagcttgcgatgtgacccgtcgagcattggaaaatagaaagattaacgaacggccaataataatgagcgtgaaacgtacgcgcctatatctctccttctccttcatttttttttgggttcattctttgaaaagtcggggtttgacatatttaattctttacaaacatgtatttatggggtaaaatggcatgtttataggtattacatgtcgaggtagacacagtcgagtggcaaagttcattgcaatcagagttatgagaaaaagttgtggatgtttgagactaggcctaagttttatatctattatctgcggatatcaatattcgggttttgatctgaaaaaatagatatctagccaatcgtttacagacaataatagaacacactgtatagagtacttcccctcttttctcgaaatttcaaaggcccgttactcgacaacttaaatctgacaatagtcctcgtttaccctacatgtattatttagctctgtctgcttagattacgcttttatttgtctatttttttggctaaagacttcggtcaatccttactcgacagttccgtcctttcttagatgagctaagaccgaaattagttctcttgaatttcaccggaaagacggaatctttccagctcactctctcaaaattgaggtcaaagttttacaaatgaaataaataaaagtctatatattgaaaattaaccttcacgttcacaaaaaaaaaaaaaaaaaaaaaaaaaaaaaaaattaacttccacttctttctttaacgcttttgagagaaaaataagtttagaaaggttcgcttcaaagctcccatttgagtaagggtaatgataagtcatcctctctaatggagtaatgggtcacaaacatccgttataaacaactttgatttacgaacaaattgaagagttattttatactttttgaattttaagggtttggagaggaaaagcattgaacttgttgtgcaagtagaaaaagaaaaacactaggcaaattgttgggattgaaatactcactttcctataactagtagtaattaagaccatacttcatgtctttattttgaacctttgtttcgaagttatctcaaacctatatataccttactcatcttactaagaaaatgaggcttgtgtgtttttcaaccgcattcgcattgaaaactttgcaatatcttatatcaaatcacattgcataacttaatccactgcattagttgattcttattcagtttaatgagattaatatagtgatttagatattcgaacacctatatccactcttttagattgtaattttaaagctatatatcaaaaaattatacgatttttatctgaaccttcgtcgaaacattaattattgactaatgacaataaagaaaacaatttaatccaaataggcaaatacattgatctctttgcagattcacatttttaaaaaacattagtcgaaacattaattaatgacaataaattattcaaaaaaaaataaaaaaaaatagagtaagaagagaagaagggtgttgaattggatcactacgaaacgaaccccaccgaaacaaataatgtccggcggcaagaattaatgatgatcttcgtctctgtctcctcttccttctctggatctttcttacagaatatacctttttgcttcttcctctaatccatttctcctcttctccgtttctgggttattcaaagtttcgatttttattaacaaaccatgattgatcgatccacatcataaagtttcctaatttatctcaaagatcgtaactttcgttgacttttccgatcgaaatatg

SEQ ID NO: 973 - DNA, 1746 bp, Unknown
  misc_feature (1)..( 1746): cDNA_ID_2781324_gDNA_ID_1620343_Annot_ID_154045 3000 nt of promoter + ATG
gatctattctctaactgaccaatcaactatcaccaacgtgtaaacaagctaacacataagtttatggagttagagaatatcttctaccacttaaaaagaaaaagaacgaaaaacatggaagagaaatatcgaataaggaggagacagacaaaggaggcttctaaagataatgaaggtatatgcaaaagaggtttggtttatatagagagaggcttggaaattaggtcaatggtgtttattagtcggtcgatggaaataggcagaaattggaaataatataaaaaggcaattttctaagaaaagaaggaaatctgtttggtcagcgggcagctacccggtgaattaaacaattcagcaacttgtctgaaacaggcagcctcgagactcccacatgatcttcccggttcaatttggtttacaagtctaattgtattttagatttcggtttggtttgatttttcttctttttctttctcaagggcccatttagcatgatttctcgcaagtctactattggattaaccgattaagcattaggccgaagcctaggatcaaaattcagggtataaagatccatatatcgcttgactaagttgataaacatccgaccacaaccccttttaagtccaatgaaatcaagttgttagttaattcattgtgaaactagagattcaagttttggttccttcaaagatattcgatataaaagagaggacttcaagttttgagaacgtaattacatgtttcacgtcgtggttttcaaaaaaatgattataagaaatgttattttcgtgttgattgtatgatttgaagaaacaaaacatcatgtaaatctaaatgtaaagagcttttttatcttgaaaaaagttgataaaaaagttgtgaaagttctattcaaatgatttttttttttgttaagactatgttcttcaactcgttatttgactatttaaaatagaaaatcaattgtgatttaataaaaaaaaaaacttaatagtaatttctccgaaacgacgacgtttagaggtgttggtattaaaaaacctttgattaaccgcttgcctgcaatctgctctcctatctcttccaatctcctctcctctctatctatccgcgtccccatttcttcttccctctaaaattccaatctttcttattgcttttttttattcaaagcttcaagattttcactagggttctttccctttctcttattcgataaattctgttcttttctttcgtattctcacggacgaacaaaccccaaggcaacgagctcatgattgaggtccgttcttctgctctttccctctcagtttcttcgcagctgttttctaatttgcaatctattttatggatttggggtacttttgttaagggaacaaaacctatcattttccaggtttcttatggttgcgctttagattttatagtttagtgtaatttaatctgatttggggaattgggtgttggataagagtgttttgcagctgagaggattgaaaaattgaatatttatgatatttaagctcgctaatgaggttctcttacttcggattttgctcagcttcgctcctgtcaagtaatttttgttgtgatctatatatgaaatttccttttaatgttttatggtcgctacttgtgatttcatcatctttggaggttacaatcatcttattcaatcctttcttcggcctcagattgtggcttttgagtaaatgattcactgctcagctagagacaatg

SEQ ID NO: 974 - DNA, 3000 bp, Unknown
  misc_feature (1)..( 3000): cDNA_ID_2992740_gDNA_ID_1620343_Annot_ID_154076 3000 nt of promoter + ATG
tcttttggccggcaaaattagacatttgtaagatgaaatgaactgatataatctgaggttagagaaacttttggtatatagtttttttttcaacttatttaactggagtttaggcttaacaagttcccacataaaagcggaattagaattctaataagatacgaaaatacacgagccatggcttgggtcggtagaaacttcaatgccagtgttatggaaattgcattgttccttggtggcaccaaggttctggtaatacaagttcattgcgaacgacgcgtgatctcttaccgtgtttggttcaaagcaaggtccaccggaattgagcgctccacagtcacggaatcctccttcgtcgctgcaaacccaatctatattcgcttgcagttgcttatctgtcgctttgtcacccgctatgcaccatactcctttgttttcagcagcctgcgagaggtttcttggtgtcgagttcacggatacggtagatacgaggaggacgaagatgagcgtcaatgatagagacatcagttttgtgaccattatattattgcttatagattgatatttgttcacagactaaacattttatgtgtttgtgtcaatttatacgctaaatcaaaaggtgataagaagaaaagaaggtttggtcataatttatgcaaaaatgtgtaacttctcacttgtttgtttttcctcgtcatatatatatatattattaaaatttatttcttttgttatattataagtaaaatttaaaaggtataaaggaaaattcaatatagtttaatgcatcatttaagaaaatcacattttctagcaacgtaactgaaattttcaactttcttgactctttttttgtcacatccacgtaactgcaatgtaatccaactttcagtccacttgtctctaatcgataagccacagcatgtgctcctttccaatgtaatactctcgtgctaaagattccataccttctttttcataggattaatcgaaattttagcctatttttttttttgttacgagtccagcaagaaaaacctttcctattagcatcaggtttaatgtatattatcacctcaaaaaacttgaaatgctctttcaagatacataaagtcattttatgagttggatcttgcgtttatgaagtctttagccatcaatacaagtattgatctgatcatgtactaaaaatgattaattcatcaacaacatttgagaaatatgaagatgttctataagttgagaatatactccaatatatagttacatataaacttatacagagattagagatatttgatcaatatatagcattttcaacttatttggagattcggcttaaaaatctaccacacatacattaatcataagatatgaaaatacacgcgtcatggcttgggtctttagtaacttcagagccagaaccgttgaaagtgcattggtctttggttctaccaaggttctggtaatataagttcattacgtacgacgcgtggtctcgtagagtatttggttcatagcaaactccaccgggattgatctgtgtacaatcacggaatcctccttcgtagctgcaacaccaatctatattcgcttgtagctgctcatctgttgcttttttattcgctacacaccaatatcctttgttttcagctgccggtgaaaggttttctagtgttgaggtcacggagacggtagaaacaaggatgaagaggaggagtgtcaatgatagagacattgtttttgtttttgtgaccataattgcttgtatatgatttgttgtttgattgatattgttcaagagtaaatattctggatatgtgcttgtgtttatatatatactaagtcaaatggtgacaaactaaaaaataaggcaaaaggttttgtaaaaatttctatcattaaaaattaattttattttgttatatatattataaataaaaatctgaaagatagattaatactccctctatttcattaattatatttgtagtttaaggttttttcatacatattaaaaaaacacaaaaatctcatttagtttctctattttctataaaaacatcattaactacacctaattcaaccaataaaaaactatcctgtaaaatataattggccaaaatttattaaatgcatttaatttttgcatagataatgaaaacaacacttattttgtaaaaagtaaaaaagtccttaaactacatataatcagaaacagaggaaatatctaataaagtttaataaaccatttatgaatctgacccttcttttattttattttataaatacgatcttatcttatcttgataaaataagaaacatgataagtgttgtttgacacatcagatctattatgatgatgactttccgaccgatttccgatgaattctattcactggaaatcttcgactgattcaacgaattcaaatttcaacaagaatcagtcgaaatatcataacagaataatgacaaatgcgtaatcatcagacaaaaagtcgcaaattgacatttaagttaacttcatacacatagttgaagatccaaagatttgaagtttgaatgcgataaaaagaattgagtcttaaaactcttaatttgacattctacgttttaaacatgaatgatatttagttatttaccctcggtcaagatttgctaactatttgtaaaaatttcaaacttaagaatcgaacatcattcaaaattatataatgtgttacgagagatgcgagtggagagacaacttcagggtctaaattgcaaattttaataagtatattgctttttgaaactaaactatcaattattacacttttgagacacagtttctttctgattctcacttgtgtcgcttttataaaaaagataaaacgcaaattgatttcttcttattctgcttcggtcttcgtttttctttacccttttgatttgatcttctcttctcggttgaaattagggatttctgtaaaattgtaatgtgtttctgagtaaatc

SEQ ID NO: 975 - DNA, 3000 bp, Unknown
  misc_feature (1)..( 3000): cDNA_ID_3059934_gDNA_ID_1620343_Annot_ID_154072 3000 nt of promoter + ATG
aggagtttggggaaaaaggaagagtttttttggttggttcgagtgattatgaggttatttctgtatttgatttatgagttaatggtcgttttaatgttgtagatggcatcgggtgagggaattttgacggatggacagtggaaaaagcttgaaatagcaactcataattctggaagtttgtcatcatcgcctaaatctcatactctctttgctgatctgaacattaagtctcccactggtggcaaaggaccagttgctgggattcctaataggcatgtgcgacgtactcactcagggaagcatattcgtgttaagaagggtattaaactttcttcaaccttttgtgcttgttatttggctaatagatccttttagggagtgatatgactctttattagttcctttcaaatttgctttagtgaaaagacttaagttttcagtagaagagttcaagtgtgtaggtgatatatggtttacttatgtggcaatgatatctgcagagggtgctggtggcaaaggaacttggggaaagcttcttgacactgatgatggtgactcctgtattgataagaatgatcccaattacgatagtggagaggtactttcatatttgcgccttttgttttgtgttggatacttttccttgtttctttagtgtatctaacatcccttgattttatcttttattagtagtttgcttttttcattcatatactcaatttaacaggacgcatatgatggacttgttgattcaccggtatcagacccgttgaatgattacaaaaagtcagtagtttccatcattgacgaatactttagcaccggggatgtgaaagtggcggcatctgacctcagggaacttggttcaagcgaatatcatccttacttcaccaagcgacttgtttctatggccatggacagacacgataaggagaaggaaatggcttcagtgctactctctgcattgtatgctgatgttattttacctgatcaaattagggatggatttataagacttctcagatctgttgatgaccttgcggtggacatccttgatgctgttaatgtccttgcattgtttattgcacgggccatcgttgacgaaattctccctccggtttttctggttagatctaagaagattcttccagaatcttgcaaagggtttcaggttattgtaactgcagaaaagagctatctctcagctcctcaccatgcagaactagtggagaagaaatggggaggtagtactcacactacagtagaagaaacgaagaaaaagatatctgaaatcttgaaggaatacgtggaaaacggagacacttacgaagcttgtagatgcatcagggaattaggtgtctcgtttttccatcatgaggttgtgaagagggctttggttctggcgatggattctccaaccgctgagtcacttgtactaaagctgttgaaggaaactgctgaagaaggactgatcagttcgagtcaaatggtgaagggattcttccgagtagcagagagtctcgatgaccttgctctagatatcccatctgccaaaaagctgtttgattcgatagttccaaaggctatttctggaggctggctcgatgattcatttaagataacctctgatcaagatggagaaaaatcgagtcaagacggaaagctaagacagtacaagaaggatacagtgaacataattcaggaatatttcttatcagatgacattcctgagctaatccgcagtcttcaagatttaggggcacctgaatataacccggtgtttctgaagaggctcataactcttgctctagacaggaaaaacagagaaaaggaaatggcttcggttcttctttctgctcttcacatggagctattctcaactgaagatttcataaacggtttcattatgctcctggaatcggcagaagacacagctttagatatcatggacgcatcaaacgaacttgctctgtttttagctagagctgtgattgacgacgtcttagctccacttaaccttgaagatatctcaaccaagctgcctccaaaatcaaccggaaccgaaacagtccgctcagccaggtctcttatctccgccagacacgcaggagagagactcctaagaagctggggaggtggaaccggctggatagtggaagatgcaaaggacaaaatctcgaaactcctagaagaatacgaaacaggaggagtaacatcagaagcttgtcaatgtatccgcgatctagggatgccttttttcaaccacgaagtagtgaagaaagctttggtgatggcaatggagaagcagaatgatcggttactgaatctgcttgaggagtgttttggtgaaggattgattacaactaaccaaatgacgaaagggtttggtcgtgttaacgacagcctcgatgacttgtcgcttgatataccgaacgcgaaagagaagtttgagctgtatgctagtcatgccatggacaatggttggatccttcccgagtttgggatttctgcaactcagtgattagtggttctcttatcagtttcttgtgtttgtgcttacgatactttcctcactatctacatatatgtatggattcagttagtagataaacatgagatgtttatatgttcatgtgtttctgtctggttgttgtgttttgtctttgtactgatatcttttagtgtgttctaatttctgatggatttttgttacattgaaaataagttattagcatggttaatttgtgttaacttattactcttgtgatattttatgaaaattatttataaatatagaaaatatggtaattaaattataaaaagataaataaaaatatatttgttcggtcggtgagataattatgactccggttccgggatagagcaaacaaaaggatagaccaatactcgttgccaaacagctttatcctcgtttttatatttgttttgattctttcttcttctgctcaactttactgtccggcgtactcagcaccatca

SEQ ID NO: 976 - DNA, 2133 bp, Unknown
  misc_feature (1)..( 2133): cDNA_ID_2045194_gDNA_ID_1620343_Annot_ID_154080 3000 nt of promoter + ATG
catgacttgcatatttcacttattcgctacatttgcgtaagatgacgctgcctcatttttttttcatattcgattgacataattaatattcttgtgtgtttatctcaattgccaggagcattataaggatcttagtgctaaatcattctttcctaacctgattgagtacatcacttcaggtccagttgtgtgtatggtatgggtataactatgctctaatttgatttttacttgttttcaagttgtaattagatgagttaattgcatgtgatgttttaaacctggtaaaggcttgggaaggtgttggtgttgttgcttcagccaggaagctaatagggaaaacagatccgcttcaagctgaacctggtactataagaggagatcttgctgtgcaaaccggaaggttggacttctatcatctttaaaattgttggaagtaagcacttaaaataattctcatggtttgatatttttaaattatgcaatttgcaggaacattgtgcatggtagtgacagccctgaaaacggcaagcgtgagattggtgagatttcttgttttttgttcaaatcattcacccatctttcattgttgagacattgactatgtccagtttaggggcaaatcaacgtggttcaaactgcttcaaattaacttgataacataactagattagatcatacttgattactgaaattgttaggttcaatatatctgttttaaaccattactatcacttcttcatttacttagtttgaccaatcactctcattccttagtatgctaaacttttagttttcatttgctgacattttggctcttgtggttgtggcataggtctgtggttcaaagagggcgagctatgcaagtgggattcggctctagctacatggctaagggagtgatccttgagaagacagagtcaattataatggtgtccttacttgttttcttgttaccgatgatgagctttggtgttttgttcctgattttgggcggcaatataatataactgccaatctatggcttgattcttctcatatctgtgatcacttgtcatgtaatcaaaactagttacagattcatctgcatttggttctacgttacagacacctccaaaatcattcatcttcactctacaccgagcaatgaaaattttctaatctcaagctaaaagaacatacaaaagagtggctttacaaaacgcagatgctgcgtgattaagattgctcagatcagtgtaccggaatatcattccggtttacttctaagaccggttggtatatggaatctcaatgtcctcaggaggaagttcccagtgatcgtcttgttcgtcttctctggatgcatttctgttgtgcttgcggatctctgaagttgatagtggttttggtttagggtttggtctcctgtaaaatcaaaatctattgactcaacttctccaagtgtttttcgaaagaaagaagaaaaagtgaaaaaaaaatctgaccttttccgatacttcttcgcagcttctttggtcttccgcgtcttcttctccagagagctctcgaagaagcgtcgtcttcgagattcctgcaacacacccgctctgaaacacgacctcttgaaatcgttaaccagctgctcctccgattcgccgtctttaggcaccacctcgacgttgtagtaactggacttgaagaatacgagattcgcgttcgccagcgaaggatacgccactcgattgatgacgtcatcgtgctcggccgttaaaatcttcgtcgtcatcgacaaatgctgtgacgttctcgcggatacggaagacggaagcgtgataggtttcagactcgacggagacggtggtttcgacgagagaagggaagagagaagctccgagagagagactatcgattctagcgccatttttttttccgtctgaataagtgaataatcgtttcattcttattataatatttttcaattgtaattagtgtgttaattagatggtcaagtctttagtgagtctactttctgactaaaacgacgacgttgaagcatataaaacgagaccagtgaactttgatctttgaaagctttctctcttcgtctctctggctctctttctttttctctcgttttatttggtaattatg

SEQ ID NO: 977 - DNA, 3000 bp, Unknown
  misc_feature (1)..( 3000): cDNA_ID_2045137_gDNA_ID_1620343_Annot_ID_154058 3000 nt of promoter + ATG
cgtagttaattgtctcaatctcatggtgttaattgtgttagtgtattgacattgaattttatggtttatagattgtagtgatttgatgatgatgacatttttcaaaatttagaccggcctgtacatgccaactacgggtaagatatttgaccagaaataatacaaatttaaacgaaaacatatgtagttgggttttacgtgaataaattttatttggccaaaagcataaaaaacaagaacatgattggttgtatgaattaataatttgagattcgtttctgactttaaatatgtataaaaatgctaagaaagcccaatttcgtgtgctggttggttgatatttcaacaaataatgctgaaaaacaagaaatatgtggtactgttacttcaaaatttgattcgaaataatcaatgaacaacttcaaatattttttgtggagttccaagttttcaagttaagatgggacaatttgctcaccaacttattcattctttagttctccactcctccatctgtcccattcacaagttgcgaatatttaggaagtcaactaaaatacgccgactaacatttctttttccaatagttttctgattaattaatatatttgatggtccttttctcaagtcgggcaaaattttgaatcgaataaacaaaggaactccgtgtgagactgtgagtaatctcatgtccttctctaatcctgatgagacagacaaaaaaaatcgaatattataaagttgagaaaacaattaaaaaattacttatcaaacaagtaaaataaaaaagaacctcgttaagaaaaacaaactccagaagacgaaaggttgacacgtgtgacgtaactaatccacggacaacacacgtgttcacatctccgatatttacacgagatgatctcactattcgccacgtatcacgtttaacaaaaaaacaaacgtcgtacgtgtaaacacgtcgtaacggcgactctaacggttagtaacggccactaacgtcccggtatatactccgtctaaattaatttctccgtcggttacgtctccgaccggtaattgtataggaaaattttaattcttctcttcacaaaaaatcaacacatcgtaaaaatttctaaaaaccctaaattaaatcctttaattgcgtcttcttcgtcattatcatggtattcgtatctatggcgtatattcgattatttccccaatctccgtcaatgccaaacgagcctagagtctttgtgtacacgacacgcatagcagcaatgcgattcttccgctctctgaatgtatcttctcggaggaagatccgtggaaggtaaacaataccgagattgtagatatcttccatacgccggcgacggagaatttggcggtgaaggcgtgacggagaacggcgattttggagatcgatcaccgcttgaagacggcgaagattcggtcttatgcgaagatctcggaggtgatagaacggcacggatcttggctccgcagatgcgatcgtactcttcaacgatctccgctagttcttcttctgatttgacggagattagagtctcgagatctccgtttggtaattgacatcgtaaatcaacggagtatccacagaattcatagagtttcttcatcagctctggagaaacaaaattaaaaaatcaatctcagattcggcgaaatcggaaatagaatcgatttcaatacgaaattgaagtggagacgaacctgagaaagagatagaacgatcaacggagaggactctggtgtgacctccgacgtaacggagcttgccgtcggtggagcgagggaggattctgccaccgtaactgcatagaaacttgagactgcttccactgttcttctcggtataatcaacggctaccattgttagttttttttgaatttttgaagatttgggagagaagagggaagctttttataattgagtgtttgtttttggtgtcttaaaccaagaagaaaggttgcagatggatgggttttatagggaaggagtgatgtcatggtgggatattacgcgtatgggcaaatagaaaattccttggatcttctatgggcattttggacaattctgttatttccaacaatggaatattcttttgtttaattgattccattttgaagaaatcttctttcttaaaagtcgctcatcattatagacgtttggtcatcaaagaaaactagtcataaaattttaatcaaatattgaatgctgaatctgatttgtaccttcctcttggcagtctcttccatgttaatgttattgttaattaccatcaattttactgattgctctgaacatgattttgtttttttattattttttttgctgcaagaacattattatgtttgaaattataaatatgtcaagtatgaccttatggccatgtaatgttaatgattcgattttataaatactgtgcattatgggtcaagtcaaatgtatactttttcactagttagaaaataacatacagtatatggtattattccagaaaatatgtattatgactaggattggtgtagtcacatgactcatgagatggtatgtctgaaaaatcccatcgcaactttaagattttccaaatttgattcgacactgttggcaaaatgtttaaagcaatagactcccccatcacaaaacctccaataatttaagttaaacaattgtttgggtccaatttgtagcccattaagtggttagtcatggcccatatctgattaccaacaaaataaaggaaattaattaaattcgcgcaataaaaagaacagaaaaatggtgggacaaattagggttactaatttgggaattttactgtccaaaacgaatcaaaaaaaaaatctaagctttttgttccttttgcggcttttcgtcgtcttccttgcactatcttccttctgtagcatcaattcgtttccaaggttacgtagtagaatttacgcgagagagcgagagatcaaaaaccataaccatcttaagttacaatg

SEQ ID NO: 978 - DNA, 3000 bp, Unknown
  misc_feature (1)..( 3000): cDNA_ID_3410221_gDNA_ID_1620343_Annot_ID_154061 3000 nt of promoter + ATG
tcggcctcaagattatttatccggtttcttgctcaaactcttcaccatctgattcctctgcattatctgcatcatcatcctctgcttcattatcatcctcttcttgttcgttgttgacgactggttttccaattaccggtaaagcaggactcatctttctgatctcgttgcactgcaccaaacccaagacaacaagaatttacttagaacttgtcttaaaacattcataacaacaacactgaaactgacaattagctctactgatctctctcacttttgagctcccacgtctatataatcacacaatctaatatatttaagaagaacatataattagaggtaacaccaacacatcacacgacaaggagacatgttgtctaaagttcacaatggctaaattccaaatctgcaaattttgtctttgcttctttcctttcacttgctagtgattcaggaaacggaactagttttcaaacattggaaaacatgtaacaataaactcaaatccttttccatactaaatctagaaaccaaaaatctctccaatttaaactcgaagatcacccttggatctttatacattattacgggtctaaagctataagatgatagtccaatgaacacaaatgcatatatccatagagtctacactggaaaaaccactacactagaatcacaactcgacattggtatccactaaaattctcacttttgtactaacttaaaactcaaacataggacccaaaagaatatgttccaaagcagaaagattcagaaactcatattcatcttatcaatatgaagtagagaagaaagtgatctgcctaaaaccaaaatcatcaccacggatcgaaaaagattgatcatttacaaagtagaaaccacttataatctcgaacacaatcaataaatttcactcataatcagctcaacttacatgaaactaaagatctaagattgaccttttatgctgcctgtagtgacagtcgaaaactgaaaatttcctattcagcagattccgaaggagaacgaatacataaataaaaaagaaggaagctaccttttcttcgaactcagcttcttccatggcgagaagaatctcctcgttctgcggctgaggccattgtaacggaagcaaatacgatgccggaatcgtcttcgtcgacgacggaaattgggtcatcaacgtcggaaactgtaacattcttcttctcttcctttttctctcttaacgaaaattgatggaaaagtaaataaagaccaaaaacacagtgcatttattattgggcttttatctgtttagcccattgttattgggtaaagataaatataattttgactatgagtagggactaaatgttaaatttgggcttgtaaaattacaaaagcataatttgaaacccattgggccactccctaccttccgcgcgtgacttaaatttgaaactaactaacaacgtcttaaaaattaaaactctaataacaaaaacgtaaataggcatctgatcttttgattggtgatggaatagtaacattccaaatattttgattacccataaaacatcgaatcttgcgaattcatagtactttttgtattattttttgaaagctatattaacattttcgtttatcatttatggtagtatttatgtatcttgttttaggttttcgaaataaacttgttcatgtcaaaagaaattgaagaaattcaaacgaataaaattaatcaactctaataattttcttatatttcaccagtctactatcataatgaacatacttaattgtaatgtttgttagtatgttttctaaaatccactatttaacttgcatgccattgctgtttatatacggtctctaacccccaaaggagccaattatagataaaatactgactatcaattttgcaaatttggtggtgtgaatagttgtaaaggctgtacattgcgtaaaaaaacttagggtaaaataaaaaagcatcacatagttattttaaaaaggccaaacacacctttaaaaaggataactctttacacctttatcccacaccccatttccttgtgagaaagaaactatgcatgcgggaatataacaatacggctttgcttctcaatacaacgacataaaaactctctttataagactctcacacacacatatgttgatatgtataatacacgtctctaaatttgtgtatctatctacattacaatatatatagtttgatatcaatctacaattgaaagcatatatatataagtatgtttcttgcttcagttcttcaccaaaaacttgtgttcttaatcttggtttatcacgatgaaattgttgtcgatgatgatgatgatggaagctattgtcctggctaactcaccttgaggtcctcgattccattgatgacgctaaatggggaataagcattcctggtccgatccatttcatgtcacttaaatcttattatttcgtataataatcaaattcaatgttgttcaagtttgtattcgatgttttaatcacttacgtatgtattttctcatggaatgtatcgtcgaactaattattcaaaacgacctttattttgaaaggaatgcttttttattaattggaaattacaaacgaaaacaaacaatttgtgtccccaactatattttttggaccaattaactaatcactaaaggtctcatgtggagacttaataaaccttaaatgtaattgtcattatgagtttgaatgacgttatgctgagttcaatgagaaaatatggttggtaattggtagttgtgtgtcataactcgtaattaaatcacgccacaaataattaactcgatgctaattaagaataaaacctcttttcaaaataaacaaaattaaaagctttccatgtcaaagttgcttcctttggcttcttcctacacacttgcttcacatgtctactacactgactgactgacacaacgataaagtacacttatcgtgtttcttggtctcatcataagttca

SEQ ID NO: 979 - DNA, 3000 bp, Unknown
  misc_feature (1)..( 3000): cDNA_ID_3059942_gDNA_ID_1620343_Annot_ID_154067 3000 nt of promoter + ATG
ctaataacgatcagtaagaacatgagaaatttgtatcccaacgaaatttcttcccattcaatgataaaacaaagaacatgaaacccataaacactgtgaatcataagaacacacacacagtgatattttccacgatttctaaacgagagaccttaaaacactccaaaaattcgattaagtaaacaaaacatcacaaagaagtatgtatacaactatacaaaacaaaatctaacctgtcatacctgtgatcgcaggaatcaaattccaaatcgtgaaacaaagtcgtcttctttactgcttggctcggatctcgagccaagacagaaaagataaggaatcggatctccagcaccggagaaaaacgaccggagagtatcaaagtagataacgatcaatttatcactacaagagagtcgcaaagattcaaaagtcaccgattcccagacaacgacgagagaggaaatggatgaggatcgccaataaaagtactactttacaacaatataataaagttttgtgcatttgtttatatacgatggtacacgtcatcaacgtaatacgtggagggcttagaatatttccttctttttttaatttagcctccaatttttttaaagattttaatccaaaacaatgggctgtattgggtaggttcggcccattgaattagatattttgggctggacaatatccaatggttgactacgttaataaaagttttatgcttcatggaatcatattattagatcatggccatcatgtttatagttttaaaacagatatggatattgtattttatatttttcaaattattatgactaaattatatcaatattcattttaaattgttattttagtgaacgtactatgtgtataaaaaaaacaaaaaaattataacactgataaatgagtagagaagaagttagcaagtagttttcaagcaaaaaccggtcacatgcccttttgtctctattttctgatccgacggttttctttatatctaccaccttaaatccaatctaacgactctatttctttatagaaaggtcaattctctacattttttcttgtttttttttcacaagacaatgtcatgaaacttgaattgatttcgtatagaagacaaaaaaaacttgtaaagttgagcatttgttcaaaacattaatttgttaagtttgcttatccaaatgatcaagtttcagtttgataagccaatgtagtcaataattaaaatggttgaattagatattatcatactctatatttagttacttattcaaatgcgttcaattatttttgtattctatgaatcatgtaaaaagtagtgaaaaatgtatatagattagcttttgagcgttgagaatattctgaaaaaggaacattaatgtcgatcggttctcgtgtttcatcacgtacgagaacgaaatcatttactaatcgaatgaatgtccaaaactgtctaaaatgtagtgagaaatgtcatttaattgttttctgcagtttatgtaccagaatacacaatttgcttaatgtataaaataatttgctactaacagtaatttaaaaaaaaaaaactagacttaaactcatgatccatatttttgcccgaagtgaaaattcatcaacatgaatggctctagcaaaaagaaaaatgtcggcgagacttgtaatcgaatagttgattaagtttttaaagacattgttctttttaaagtgtggaggaggaggaggatatagagtgatgatgcaaatacttcccatgtgcattgattgtcaacacattttgtaccagccaaaatttcaacatagggtctgattgttagatatgaatgaatacactactattctaaaaacgttatatgaatttaagaaaattatatgtgtagaatttattgaaagattggactcgagcacatggttcggtggtcccaaaatcaaacctctatgggccagtgtcggctcagttctcctattctattgcttttggtgggtctattcttttctcttttcctgcaagcaatatctctttgagacaccaaaagaaattcattttgtataaagataataataataacaaacactctaaaaccaacttatcaaacaattcaaagtgtatcaaatatcgtattcttacaattacaatccatatacgtttagttatcaaaatatggtttagtagatagcagaaacactaaagtatctcgaaatgtaatactttactatatgagctttaacaaaaaaaaaaaaaaaggaaaaaaaaaaaatcagttaaattgagctaactgctatgctattgataatattcaaccgttaaaacgtaaaagtaatgataaaggtacaaaaattaaaccgtaatattaaatattagtactaaagtacattactaacacagtgttgacttttggtgcaccgtacttagtgtttcaccaacattcagctttaagttcgttgagattttaattacgagttctgtgttttttttctttaagccacgtgactcattcctagcgttacctgaatgttgaatacagtattaagtgctatcggtttgataatcttaattattagaactgttgagccaattatatttgtaatgatggctgatattactccttccgtttttaaatcataaccagctccgtttagcttgatcagaattacatttctgaacaacactttttagttcagccaaacactttttatcaggtatcatgaaatttgaatcttaggaaacattttgcattatttcttcttctctaaaatgacttgggttgattccattctcacacaccaaaataatttcacaagaagaggaaaaaggttaagcaaggtgggtccaattaacgtcaagttgcatgcgcaataaatcacccgaagtgttcatatgctatatagtctatcgctttgctttgtctttctctcttcactcatatgtttcgtcccaattctcttttaataccttcaaatttatcaacaacaaaaagccaaagaaacacaatg

SEQ ID NO: 980 - DNA, 3000 bp, Unknown
  misc_feature (1)..( 3000): cDNA_ID_3059938_gDNA_ID_1620343_Annot_ID_154071 3000 nt of promoter + ATG
atagactatatagcatatgaacacttcgggtgatttattgcgcatgcaacttgacgttaattggacccaccttgcttaacctttttcctcttcttgtgaaattattttggtgtgtgagaatggaatcaacccaagtcattttagagaagaagaaataatgcaaaatgtttcctaagattcaaatttcatgatacctgataaaaagtgtttggctgaactaaaaagtgttgttcagaaatgtaattctgatcaagctaaacggagctggttatgatttaaaaacggaaggagtaatatcagccatcattacaaatataattggctcaacagttctaataattaagattatcaaaccgatagcacttaatactgtattcaacattcaggtaacgctaggaatgagtcacgtggcttaaagaaaaaaaacacagaactcgtaattaaaatctcaacgaacttaaagctgaatgttggtgaaacactaagtacggtgcaccaaaagtcaacactgtgttagtaatgtactttagtactaatatttaatattacggtttaatttttgtacctttatcattacttttacgttttaacggttgaatattatcaatagcatagcagttagctcaatttaactgattttttttttttcctttttttttttttttgttaaagctcatatagtaaagtattacatttcgagatactttagtgtttctgctatctactaaaccatattttgataactaaacgtatatggattgtaattgtaagaatacgatatttgatacactttgaattgtttgataagttggttttagagtgtttgttattattattatctttatacaaaatgaatttcttttggtgtctcaaagagatattgcttgcaggaaaagagaaaagaatagacccaccaaaagcaatagaataggagaactgagccgacactggcccatagaggtttgattttgggaccaccgaaccatgtgctcgagtccaatctttcaataaattctacacatataattttcttaaattcatataacgtttttagaatagtagtgtattcattcatatctaacaatcagaccctatgttgaaattttggctggtacaaaatgtgttgacaatcaatgcacatgggaagtatttgcatcatcactctatatcctcctcctcctccacactttaaaaagaacaatgtctttaaaaacttaatcaactattcgattacaagtctcgccgacatttttctttttgctagagccattcatgttgatgaattttcacttcgggcaaaaatatggatcatgagtttaagtctagttttttttttttaaattactgttagtagcaaattattttatacattaagcaaattgtgtattctggtacataaactgcagaaaacaattaaatgacatttctcactacattttagacagttttggacattcattcgattagtaaatgatttcgttctcgtacgtgatgaaacacgagaaccgatcgacattaatgttcctttttcagaatattctcaacgctcaaaagctaatctatatacatttttcactactttttacatgattcatagaatacaaaaataattgaacgcatttgaataagtaactaaatatagagtatgataatatctaattcaaccattttaattattgactacattggcttatcaaactgaaacttgatcatttggataagcaaacttaacaaattaatgttttgaacaaatgctcaactttacaagttttttttgtcttctatacgaaatcaattcaagtttcatgacattgtcttgtgaaaaaaaaacaagaaaaaatgtagagaattgacctttctataaagaaatagagtcgttagattggatttaaggtggtagatataaagaaaaccgtcggatcagaaaatagagacaaaagggcatgtgaccggtttttgcttgaaaactacttgctaacttcttctctactcatttatcagtgttataatttttttgttttttttatacacatagtacgttcactaaaataacaatttaaaatgaatattgatataatttagtcataataatttgaaaaatataaaatacaatatccatatctgttttaaaactataaacatgatggccatgatctaataatatgattccatgaagcataaaacttttattaacgtagtcaaccattggatattgtccagcccaaaatatctaattcaatgggccgaacctacccaatacagcccattgttttggattaaaatctttaaaaaaattggaggctaaattaaaaaaagaaggaaatattctaagccctccacgtattacgttgatgacgtgtaccatcgtatataaacaaatgcacaaaactttattatattgttgtaaagtagtacttttattggcgatcctcatccatttcctctctcgtcgttgtctgggaatcggtgacttttgaatctttgcgactctcttgtagtgataaattgatcgttatctactttgatactctccggtcgtttttctccggtgctggagatccgattccttatcttttctgtcttggctcgagatccgagccaagcagtaaagaagacgactttgtttcacgatttggaatttgattcctgcgatcacaggtatgacaggttagattttgttttgtatagttgtatacatacttctttgtgatgttttgtttacttaatcgaatttttggagtgttttaaggtctctcgtttagaaatcgtggaaaatatcactgtgtgtgtgttcttatgattcacagtgtttatgggtttcatgttctttgttttatcattgaatgggaagaaatttcgttgggatacaaatttctcatgttcttactgatcgttattaggagtttggggaaaaaggaagagtttttttggttggttcgagtgattatgaggttatttctgtatttgatttatgagttaatggtcgttttaatgttgtag

SEQ ID NO: 981 - DNA, 3000 bp, Unknown
  misc_feature (1)..( 3000): cDNA_ID_1442548_gDNA_ID_1620343_Annot_ID_154060 3000 nt of promoter + ATG
taccataagcatgatacccaaatccaccaccataacatagattcaaacctttaagttcaccgcagaagtcgttgacatggtcgtgacccacaaacacagatttcacatctcctctagctatcaatgttgtgaagaaacccgagtttgtagaagccgcggatgtaccttcttgtctcactccttttgtagcgttctttgagtcaaaactcaaaaactccggtaatggaatgtggaagtaagctagtcctggagctataccttcttgaggattaggctttgcgttgtactccctctgcaatatcatcaaaaccagggttaaaacaacaatgtcatgatcaaaaaacaagattgatcatgttcatcattgatgtaccttgagacgttttgaagtgcggtcgaaccaaaactgctgagaagttttgatccaatcataaccttccatgtaaggaacactagaataatctccactatcgagaaaataaagattaagaacagatttgttctgtagtttcgaatcagcagctccatggatttggagattgtaattaccaaaaccatcaatgtaatgagcagcttcaggaggattcacttgagacaaagtgttgggaagcttcacaatgtgattcataacttgttgtcttgtaaatgtagattcttggtcatggtttcccaaaatagcaacccatgggattttagacgcaatcgctggagcaaacgcagcgtttatggatttcaaagcgtcttttacatcaaacccaaatatgttatcacctgaaacgaaacaaaaccccaaaaagattcgaaatttcacaattagggtttatgtaaacatcctgaaagttaagatttttcaaatcacgagaagaaaagttagggttttgttcaatttgggggtcttaccggtgaagacgataagatcaggcttctcggcggcgatgactcgcgacatgaagatggtggtgttgaggtctgagcaatgagctctctggctaggaagaacattttgacactgcgtcttagcgccgttagcaaaatgcatatccgccacttgtagtatcttgaactcgccgttaacactgaacctgagtttccgacgttgagctgttgccggaatcggagataaacagagacatgcgagtcctagaaacacggagaaaagtaggaagtcgaataggcttcttcttcttcgattgtccgccattgaacttatgatgagaccaagaaacacgataagtgtactttatcgttgtgtcagtcagtcagtgtagtagacatgtgaagcaagtgtgtaggaagaagccaaaggaagcaactttgacatggaaagcttttaattttgtttattttgaaaagaggttttattcttaattagcatcgagttaattatttgtggcgtgatttaattacgagttatgacacacaactaccaattaccaaccatattttctcattgaactcagcataacgtcattcaaactcataatgacaattacatttaaggtttattaagtctccacatgagacctttagtgattagttaattggtccaaaaaatatagttggggacacaaattgtttgttttcgtttgtaatttccaattaataaaaaagcattcctttcaaaataaaggtcgttttgaataattagttcgacgatacattccatgagaaaatacatacgtaagtgattaaaacatcgaatacaaacttgaacaacattgaatttgattattatacgaaataataagatttaagtgacatgaaatggatcggaccaggaatgcttattccccatttagcgtcatcaatggaatcgaggacctcaaggtgagttagccaggacaatagcttccatcatcatcatcatcgacaacaatttcatcgtgataaaccaagattaagaacacaagtttttggtgaagaactgaagcaagaaacatacttatatatatatgctttcaattgtagattgatatcaaactatatatattgtaatgtagatagatacacaaatttagagacgtgtattatacatatcaacatatgtgtgtgtgagagtcttataaagagagtttttatgtcgttgtattgagaagcaaagccgtattgttatattcccgcatgcatagtttctttctcacaaggaaatggggtgtgggataaaggtgtaaagagttatcctttttaaaggtgtgtttggcctttttaaaataactatgtgatgcttttttattttaccctaagtttttttacgcaatgtacagcctttacaactattcacaccaccaaatttgcaaaattgatagtcagtattttatctataattggctcctttgggggttagagaccgtatataaacagcaatggcatgcaagttaaatagtggattttagaaaacatactaacaaacattacaattaagtatgttcattatgatagtagactggtgaaatataagaaaattattagagttgattaattttattcgtttgaatttcttcaatttcttttgacatgaacaagtttatttcgaaaacctaaaacaagatacataaatactaccataaatgataaacgaaaatgttaatatagctttcaaaaaataatacaaaaagtactatgaattcgcaagattcgatgttttatgggtaatcaaaatatttggaatgttactattccatcaccaatcaaaagatcagatgcctatttacgtttttgttattagagttttaatttttaagacgttgttagttagtttcaaatttaagtcacgcgcggaaggtagggagtggcccaatgggtttcaaattatgcttttgtaattttacaagcccaaatttaacatttagtccctactcatagtcaaaattatatttatctttacccaataacaatgggctaaacagataaaagcccaataataaatgcactgtgtttttggtctttatttacttttccatcaattttcgttaagagagaaaaaggaagagaagaagaatg

SEQ ID NO: 982 - DNA, 3000 bp, Unknown
  misc_feature (1)..( 3000): cDNA_ID_2045174_gDNA_ID_1620343_Annot_ID_154047 3000 nt of promoter + ATG
gtgctgaagttacaaaggaattatcccctatgtgggtggttggccccttgatcatcgccctttatataaaaatgttccaaggactatgttccctttacgccttctgcttcaaccaaaccatcaaaatgataagaaacctaccatcgtattatcttgtagcataccaatacattgccgatggaaagctcaaagacgacgttaaagctctagtgtttaaaccagtggtggccatcaagaacacagactacaaagagctcacacgcacgaagctgaaacagttccaagaatggatcattgagaaatacctggattttgttgaatctgtatggccttattactgcagaactatcagattcctgaagagggctaacctgatttgaagatcttcaacatggaaccctcaaattctgacttctcagggcttctctatgatttctctctgtgctttgtttacctttttttttttttttcttaattttaggaaggcttttcatgttgtttgttcttatctctatgtatactgataccttttttgaggttttacaatgagttcttttaatattaagggttatcccttttctccatacttaaaaattatctatacacatataaatcgacaacaacagaagaaataagtgcttaaaggtctcttataaacctctttagctccggaaatttgatggtaatgtttcttcagtaaagtactcctttctgacggtctctgctgagcaaaacttgaccttcacataaagcaaagtataaaaatccatctagtccagtcctctgaataaccacactatgtagtatatagcaattagaatcgatgcataaaaacatagcaatatggtatggaagttaccagagaagcgtattgcttcaccaacggtttagtgaattgccaaattggctgaaatatgaatggagcatctacaaaaaggacttcatccaatcggcttggatagtaatagtaaaatacgtcaaactgcagaaacaaaacaatggaaaagacaacaataagatcaaagaccattcacctgtaagaagatacaaaaaccattcacctgtaaggagaaagaaataccaggaaagtcaagaacttaagatctgcgttctgagatccgaatccacggagatcaaatatcccaagtatcttgtgttgtcctgctggtaacttacttaaagccttttcaagtaagaacacacaaagcttttcatcttctattggatcaagcagctgcaaaacgtcagacatttcacaaatcctcagctatagtaaatctgcattgctgaaatttaacaagaaaactggtgtctaacttgccccggggatgtgctttgcaggagctacaataaccactggccgacctttaacatctagaaaaccatgtacataggcttttccagtgtcagtagctgctttaatagaatcttcagaaagctcatctaccttgaactcatgacgccatttctaagcttttaagtaaaggataacatggaaaccaaaccttatcaatattaccaaaacaaaaaacaacatgtgatttgattctacaggttctacataaaagtgaagtctctggcaactttctagattcattatagtgaagaattgatagaagataaagaaaacacaaggaagaggatacaatagctttagttagctttccaatggcttcatcaacagaaaatctgcgatctttcaaaaaccagaggatcatatcctcatcatctcttccatatttgccaagtgggagactagtacaatctttcgcaagccgttcttttacttccaaaactagctgcaccacatgttcacaaacccaaactttcattacacaatcccctcagaactcagaagacacattccatagtctaaacatccaattcaatgggtattgtggaactcaagaacccaattctgagaccacataagcaaaagactaagtttttattttatttcttaaacagagcttccaatgccaacaatggaagaaagaaacagaggaaaacttgctgcagatatcatcagaaaaaagcataaaaggcatatgcgaagaagaaagccattgcgtaagaaattaaaaaaagtaacgtcatcgtaacattcatccaatttccatgattctcgctttttggctaaaagagaaaaaacaaaaccttgtgcgcatgttgggattcagacacgcaacttcggacagagaatctgcagttccgagatcgattaatgttcaaattcttcgagcttttgaaattgactgaagcagcaacgatggttgagctgaaacgaatcgacattgactacaaggagtaaaaatttactctttagagtttgattctcagaaattagattgatgagaggaattcggaagtttcaaaagctgggctttgttcaccacagagcaagaagaattcagaatttggaattttgcgatttatagatacagaagcgaaacagaggcatatgtttttgtttcccctttttatagactcttgcttcttatacacacgggtacgggtctttttatctgggtttagatccggttcagggtctcggatccacgttcggatccggtttggtatttctacattattaccaaaatttatttgcttagccagaagtttgtattttgtaaagacatcatcatagtactacatatataactacacactcgcagtaaatctttttttctctctgtataattgaagttaaaaataacaacaaaaatggcagtttatatggaggatcacataaaaatagttaaaaataatttagtcctagtaattataggtcttctctaattttatttggaactaaatttcagaaaacaaaatatcgtatcaaattttgatgtaaattataaaataatagaaattagtgagatagcattctaaatgaggattgcatattttggtattagatatgtcggattttatctgatatggtagttttcagtgtatatatatatctctaaagctttttcaagccaaataagaagaaaa

SEQ ID NO: 983 - DNA, 10 bp, Unknown
  misc_feature (1)..( 10): cDNA_ID_2105695_gDNA_ID_1620344_Annot_ID_154092 3000 nt of promoter + ATG
gatcactatg

SEQ ID NO: 984 - DNA, 3000 bp, Unknown
  misc_feature (1)..( 3000): cDNA_ID_3059994_gDNA_ID_1620344_Annot_ID_154098 3000 nt of promoter + ATG
aagaaagaaggaaagatgaaagggcaggtctcttggtgaaagaccccacgatcacgcatccatatggaaaatgcaaagagacacgtatacctaaacgtcatcgtttttgcacattaccccaaaaccccaaaaccgacctacaaaatcccttcttcttcctcttcactctttctcattttccaccattaaaaaacctctctactctctcctcaaaaactcaaaagagcaaaaaaaagagaagaagaatcaaaatcccacacaatggcaacacactcttccttcaccgcaacaacacctctctttctcatcgttcttctatccctatcctccgtctcagttctcggcgcatctcaccaccacgcaacggcgccggctccgtctgtagactgttcgactctcatactcaacatggctgactgtttatccttcgtttcgagcggaggcacggtggcgaaaccggaaggtacatgttgctctggtcttaagacggtgcttaaagctgactctcagtgtctatgtgaagcgtttaagagcagtgcttctcttggagttactttgaatatcactaaggcttctactcttcccgccgcatgcaagcttcacgctccttctatcgctacttgtggatgtaagatctattcatttcttaacttgtttgtttcttagatctcttccggttttgtagatcttaatttgttatgcttaatcttcgagagcggtttcttaaatccacattttttctaattttttcagtttaattaagaaaataatttgtagatttttcgaaactgttttaagattctattttttgttgttgttgatgttgattaaattacttataatgcttttttattttatttttgttcttacagtgtctgttgctccaagtactgctccaggtattttgtctttcttcttggttgatttttaattttactcttaagttttgtctcatgcaatgctttattgtgtttttaaattcccacttgaaaattttgaaaagataaaaattgtcgattgtttgactttgatcatctgggttctcacttaaagtgaaaatgatttatctaagattctacaatacaaaaaattataattaatacgaaccatgacaaaaatttgtgtgaattccttatttgtgattttctttgtaaaaatttgctcgagtgattggaaatctctgctctttttctccatgttagttatgtgatttctcgttgagatgttttacgcttttgagatttcttaatgtggaacctaattttatcaggtcttgctccaggagtagctgctgctggacctgagacagccggatttctagctccaaatccttcttcagggaacgatggatcttctttgattccgacctcgttcacaactgtactcagtgccgtactgttcgttttgttcttctctagtgcgtaaaaaaaaacctgaatcttttttcaccagctagatttggctgtatgaaattgattaatggtttttattagggttaatctatgtatgttttggagtgttctgtttttagaccatatcggtttctctattactagcgtttactcttttagtttatgttattactttgtctcacaacattggtccttttattcgatctatcgcttattccttcatctatgttttctctcacaccctcatagttatattcgccaaaagctcaggcagaaacattctcaaagtccactatacaaaaaagaaatactacaagtaacatttatatattctttttaagaaaattatggtgtaatattgcaatgactaacaacaaaattctttaatttcgttttaattttctcataaaaactgtgtaataaaatacaggaaatcatatgatatcattttagtagatgaaattttctcataatatcgtcattgtcagtaagtaagtcccaactttttgtcaagagtatcatatttatattttgttacagtgtagtttgactatagtaccaattacaacttgttctatgaaacgagtacaaaatttcttcatctgaaaaggaaatgcatgtgttaagaaaattagagacgtgaaagtgaaaggaaacaaaatgtttcgtggcatcgtgaaagatataaatatatatcgtattttttaaaaatcagattattacttcttgtaattagcttatcagattcaaaattcaaaatctcaatagtaataatcttttgaaagaaaataatgaaaaatcaactgtcaacaaaagttaatcaactgtccaagtgtcccgttgtggacaaatcacgtttacttcccaccaaggattttcaactttattatgatcgcgtggactttccagcgcacgttagatctcctccctcgccaaaccaaaataataattaaatagtacgaattactaaaaaccaaaaaattaaaattaataaaaaaatgaaaataatttaaaagtattgcgaacgataattactttcccctctctctctctctctctgtctgccaccaacagccgaggacgacgaccgtatcttccaccacaaactgcttccggctgagacgacggcgatctactccggctaattctgttacttgattctgctctgaattttaacaagcagaatttctcggatagcaggaagaacgggattaattagctcatcgcttggttctctacgtgagatttagttttggattctggagaaatttccgatcgccttcggtttacggcgattggagtgagtaggatacggagaaatctctattttctgtgtttttttcgcgatttaggaaagttaagcattataaagccaaatttcgtcgatttggcattgagattttgagctttgggtggttatagataggttttttgagttaaggttttacgggtaatcctagggtttagttattggggaagagagaggctccgttaatctggtttgttggaagagtctcctggatctgttgtctcgacggatgatttgggtctgtgagctagggctttttatgcttggctgattaggatg

SEQ ID NO: 985 - DNA, 3000 bp, Unknown
  misc_feature (1)..( 3000): cDNA_ID_2128919_gDNA_ID_1620344_Annot_ID_154100 3000 nt of promoter + ATG
tacacagtttttatgagaaaattaaaacgaaattaaagaattttgttgttagtcattgcaatattacaccataattttcttaaaaagaatatataaatgttacttgtagtatttcttttttgtatagtggactttgagaatgtttctgcctgagcttttggcgaatataactatgagggtgtgagagaaaacatagatgaaggaataagcgatagatcgaataaaaggaccaatgttgtgagacaaagtaataacataaactaaaagagtaaacgctagtaatagagaaaccgatatggtctaaaaacagaacactccaaaacatacatagattaaccctaataaaaaccattaatcaatttcatacagccaaatctagctggtgaaaaaagattcaggtttttttttacgcactagagaagaacaaaacgaacagtacggcactgagtacagttgtgaacgaggtcggaatcaaagaagatccatcgttccctgaagaaggatttggagctagaaatccggctgtctcaggtccagcagcagctactcctggagcaagacctgataaaattaggttccacattaagaaatctcaaaagcgtaaaacatctcaacgagaaatcacataactaacatggagaaaaagagcagagatttccaatcactcgagcaaatttttacaaagaaaatcacaaataaggaattcacacaaatttttgtcatggttcgtattaattataattttttgtattgtagaatcttagataaatcattttcactttaagtgagaacccagatgatcaaagtcaaacaatcgacaatttttatcttttcaaaattttcaagtgggaatttaaaaacacaataaagcattgcatgagacaaaacttaagagtaaaattaaaaatcaaccaagaagaaagacaaaatacctggagcagtacttggagcaacagacactgtaagaacaaaaataaaataaaaaagcattataagtaatttaatcaacatcaacaacaacaaaaaatagaatcttaaaacagtttcgaaaaatctacaaattattttcttaattaaactgaaaaaattagaaaaaatgtggatttaagaaaccgctctcgaagattaagcataacaaattaagatctacaaaaccggaagagatctaagaaacaaacaagttaagaaatgaatagatcttacatccacaagtagcgatagaaggagcgtgaagcttgcatgcggcgggaagagtagaagccttagtgatattcaaagtaactccaagagaagcactgctcttaaacgcttcacatagacactgagagtcagctttaagcaccgtcttaagaccagagcaacatgtaccttccggtttcgccaccgtgcctccgctcgaaacgaaggataaacagtcagccatgttgagtatgagagtcgaacagtctacagacggagccggcgccgttgcgtggtggtgagatgcgccgagaactgagacggaggatagggatagaagaacgatgagaaagagaggtgttgttgcggtgaaggaagagtgtgttgccattgtgtgggattttgattcttcttctcttttttttgctcttttgagtttttgaggagagagtagagaggttttttaatggtggaaaatgagaaagagtgaagaggaagaagaagggattttgtaggtcggttttggggttttggggtaatgtgcaaaaacgatgacgtttaggtatacgtgtctctttgcattttccatatggatgcgtgatcgtggggtctttcaccaagagacctgccctttcatctttccttctttctttttttctctcttccttttcaagtttttactcatttgttttttaattactccattttgaaaatttattaactttactaggaaaaatttattagctttcatacactaactaagaaaaaattaaatgcacctccgaattctttgttctttcgctttcctattatgcgaaatttgcgggatatttctaacaatcaggggtttccaaacaaaaatctaaactaattagtaattagagtaaaaaaattgagaaaaaaacaacgagaataattgatcgagaaaaataaactattgtttgttactatgttagtgtactctcttgaaaataacaaaccacatttaaggaaatgttttatcctcaaacccttattgatgtttggccttttcagtttctatgtggttgtgagtctgaggccgttcattttttaaaccaccgagttaagtcatggaacttgttgtttgcctctgaatggaatacttagcatgtcaaattatcaatattgatagcttaatgtacgcaagtgaatagataaatattacacgtaaaaaatagaggaagattaatatgagttctatatttagcctccacgattcatctacagagaaagaaaaaaagtaagttacttcgtcttttgttttaaaacgaatttggaaggtcgagagtagagacatatgttattatataacttactctttactctttagctccacacatggatttgtatttatactcgagatgattttccattgtatgataaaagcatcaaatcttatttccaaaaataaaaaagattccggttggtgatttggtcgacgtgtaaagagatcacagaatcgtagccattcggatcgtcaaaaaacactacctaccgacttcaagcaatactgacggtaactaatatttgggccgtaaaactcaagcccatacaatatgggctcattgttctctactcttttgaaaccgatggcctattgtggcctagttgaagagtaaatacataacaaacccacctcataacttttattatcttcccgaattgccccattagaaacaaactgtgtaaatcagtcctcatcctgaaagaaacaaataatttcaatctttgcttctatatcggtactcctaaaatctagcgaaaacttctcttttgtctctcaagtcagactcaattccc

SEQ ID NO: 986 - DNA, 3000 bp, Unknown
  misc_feature (1)..( 3000): cDNA_ID_2128923_gDNA_ID_1620344_Annot_ID_154101 3000 nt of promoter + ATG
aaattacatattttgaaattgtcatgaagacacctggctaattcacatagagggcttggtatataacagctggacatacgataggaacggccggatgtattgtgtttagggacagattcttcaactacgacaacacaggaagtccggacccaaccatcgccccgagttttgtccctctgatccaagctcaatgccctctgaatggtgaccccgcgactcgtgtagtgctggacacgggaagtggtgaccaatttgatacgtcgtaccttaacaacttgaagaacggtcgaggtctcctcgagtctgatcaggtcctatggactaatctcgagacccgacccatcgtggaaaggcttctaggactacggtttccgtttcttattttcggactggagttcgcgaggtccatgaccaagatgagtcaaatcgagatcaagacgggtttggatggggagattcgtagggtttgttctgcggttaactaattaatataagattaattaaccattacaatatgatataaagtaatgaataaaaatggagattatatagactctccagcttttaataataaaccagctagtttaacattttcttttaatgtgactaagaggtttaattacgacgatgtgagtgtgagggaatacgtgtttaaatcacacataagaaaaaagaaatcctatgtaattgtaatctcttaagaaaatttaaaataagctatatatgtgtaatactgaaattctcctactttagaatattttatggctgttaattatgaaaaaaaaaattggactataaacagaaacaattaattaatggatatatcaaaaaaaaaaaacgcaaacgtaaaatagaataacatttaggtcaataaaattaaccaattgagttaataatatatataacgtctaaatatgtacattagtttccaactcgaggcaatgaaagtttttttttttttaattcaataaaggatgtaatgaaaataaggatgattggttttcaagatgaagttaaatttcataaaatagtatatttggtatcacgagattttcgccaatttccggcagaaaactgggtgatgaatattagtctcatctcatattgtataatgtacatgtacgtgctcggtgatgggtgaaatttgtcctctccgtctctggtttttataactagaccgatattaattaaaattatgtgtcctgtataaagttatcgttcttaattatacttgaaatgtgaatattggttcctttctttatcttaatctataactcttaactgtaaagtgaaatttgaataagacttttacaaaaaacataaaatacaattagtgaagtcaatcaaagttggaacgattcagtttgaattcactgttcgaaatgaatctaatcattggtggaaaatgattaaagggataatagtaaggataattatatatcagtggttgactttgacaataaagaaaaagacaagtcaatgatattatgccttcgaagttgtctcttggtggtttcattaaacaagacatcctcattcctcagtcaaaattatatgctctttttttttttacccaccgactatctagtaaacattaaacaagacatcaagcttatctctttacagctttgataaattcgtaacagttttgacaaaaaaaaataaaaaatactagtttcatacggttttcattaattcgtaacagttttgtttttagttaatatttttcaaaatggtaatttctctgcagcacacttttaaagtcgaattcatttacaagttgtgatttagcggtcacacacgtttttccgtcatcagaaaattacacatacacatacatatgcatgccagctgcaagtatatcatataatgttatactgtattactttgtaactcgttaattactttaattaagggaactgaataactaactacagccatcactatacatattctctttgttttgtactttccccatgcagaaacctacttagtctattattgttcaatggttcaatttttttattttatttgtatggttcaaattttccatggcggtgaatactttaatgttttttatccttcaaagaataaatagtagtattatatattggctaatccaaaagagtagagaaacaaatataccattataatagacgatttgatcattttaaaaagtcaactatgcccgttacattttcatcatccctaacgttctgaccaaaactttgtaatctatattatcgccacgtaactcattgatctaatctatgaagcaatatttgaccctaataaaacatcactattgtggtaccaactggtatcggagattttactttttaagccaactgattaatattttgtcacgaataatttgcgtttatatttttcaaaatcacattttagtttttacaaaaaaaaaatcacattttagtgtttcttgaatagatttgatcacttttcttaatgtatcgttcatttttttccaattaatcaactgcaattttggccgatttagctacatgtcgaaaaacactaatcgatttttcttccagagttttaagatgctttacgtttataccattcaccttatattagttttcattttgttttcgaccaaaactattgatccaaattattatagctaggtacgatttgaacaaactttgattctcttaccaatcatctacaacttaaaaccaagatagcttcgctcaaaaagaaaaaaataatgacaacatgtataatacatatatgttcaatggaccgactcatctacactgttattcaaactaattattttataaatgattactaaatcagcttattaaattcccataatttctgcgtcgtgtgccgaagttgctcgttacaattgttattcccacaactttttttgcctatatatacaaaccctttaacatcaaactcaaaacacacaacaaacacaacttctacaagactcaaatagtttctatttaattactaaaaagaaaaatg

SEQ ID NO: 987 - DNA, 3000 bp, Unknown
  misc_feature (1)..( 3000): cDNA_ID_3439285_gDNA_ID_1620344_Annot_ID_154110 3000 nt of promoter + ATG
cacagagtagttcgacagatctttctcgatttgtggattctctaactcaacctaatcttatgctagtacgatcgataatcgagcaacgtgttaattaaaaaatgtagaacggacaactatatacaaaaccacaaggagagatctaagaaattcaaactccagaaacaccacgcaatgattctacgaacatgtttaggatgagaatcctaaaagagaagaagaagcggctgaagcacgacgatattaacagagcgacggaacaatggaacgaacctgtagacggaagcggcggatgctcagaagaagctaggcgaaatcgagtttgccaaagaaaaaccctagaatcggaaaactgagcgatggatttattggtgtttatatactctaaatgggccacacttaagaagctaacgtcaatttttaagcccatatttatattttatacttttgagagttagtatgaaatacaaatatgggcttttgagtatggtccttttaagagaaaaagcccatactttagataacatatgggctttttaagtccattgaaattcacattagcttctacctttttgtcggctagcttctacctatttcacaggtataaagactggttcgaaaggcgcgtctagccctcttgatgaatgaaagaaagggtttctgagccctagccctgtaagcccacacctgtgtagagtagatcgttcaacacctgcggcacaaaccaatttttgacacatcacaactcacaagtccttcattacccgttcttaatcaaaatctctaatgtatcgtttcaaaatgtgtattttctttcacaattgactagtttctaactaactacttccaaattcttccatgacgattccgttatcataaggtcatgattttgagaataataacttcacaaaaggcatacagtatttagttcaattagaagttagaacacatatagttcaattaaattattagtactgcaagtatagggagcaaggaaaggaacaaaaaaaagaaaaagtattgggaagtacactacagcgagttgtgtaaaaaagctcagagacgaaagccagtcacgaaccgattgattccagcaaaatcagaaactatcttcaaatcagagaaacagtctttgagatcactggtcatcatgtaatctacgatcatcttgctttgcttctctccattagtctgcatcatcataaacaaataggattaatctttcatggttgatgtgattattagtatatacgcaaacatcttccaaccaaataaacatataatgaaaattgaccaatcaagactttgatctttgagtggcaatcataatcttcttagaacgccaaattcttactgataaagtgaaagcaacaataagcaacaattgtttcttcggactcatacacaagaacgattatcttaaatctcttttcaatactaacatttccggttttagtatcagagacaaagagaaaaacatagtaaacccaaacgattgtatctttctactaaatattttggagaaacagagtgaaaataaggtaggtacctcgaaaacgaaaaagccaccaggttgaagcatccgagaagccccatgacagagatgaaaaagactatcagttccatcaataccaccatccaatgcaagtttcggttcgtgtctaccaacttcagcttgtaggcctggaatgtcatcacttggtatgtatggtggattactcacaagccccacaagttttccttcaagatctttcaaaggctcaaaccaagatccttctctcacttcaatcatcccctggataagtccaatttcatcacaatggcaagaagtaaccaaagctgaagaatctcatacatatatcaaaattcacaaccaccatgagaagaaatcaaactgaaaattcttcaatccacaatatactgcttttatctaccaaatcctctaatccattacaactttgatgttgaaaattcccaattccatgaatacaattggtataatttgtcatgattagctttagcaaaaaaatcaactaacctcaaggctgtatctctgcacattgtggccggcgacggcgatcgccaccggactgagatctgtagctataactctcccacggcttcccaagactttagcaatgccgatcgcaatagcaccacttcctgtcccaagatcagcccaaatatctttcttaaaccattcatctctcgttacaagctcctccaccatatcgacgatcagttccgtctccggtctcggaattagaaccccttcctcaacgcacaacactagatctctccaatgctcgcatccgacgacgtactgaaacggccgacgcttctcgatcctctgcctccataaatcgtaaagctcctccaacgacgctctcaatttcacattcttctcgccgttgtccgcgatttcgcttctatgaagaatcactaaaggatcgtctacgattgagtcttcgatcagccattttagctcacggtggagaatgacagagtcaagagtatcttcggaattcttcgaagattcctctacggaggacgccagatctttcgcccagtcgtgccatttccaaacctccgatagagaagttgcgtgcgacggcgtcctaaggtatagcggtgtcttgggagttatgctgagagacttagtcggccgagaggattttgactctgtaagcgacgtgtattgcggtggttttttcgccggagaagatgagcaaagaggtttagcggcagagagcaaagaggttaaccgtagacttgggaagattcttatcatttcaaggtttttgccgcacaaacagaccaaatcggtttataaatatattaccaactaaaccggataatccggttctgtttttagccgggttttgaaccgaggattgaaataagattaacaaggaatataaggggctaaagcataaataaagaaaagttcttcttatttttgtttgcggctccgatagatctttggagcaacgaacaaac

SEQ ID NO: 988 - DNA, 3000 bp, Unknown
  misc_feature (1)..( 3000): cDNA_ID_1023208_gDNA_ID_1620344_Annot_ID_154103 3000 nt of promoter + ATG
tgtcatttttttcccatgcaaatgcatgaatcaataaactttggcaatcctatataggctattatagttaatacatggtgtgtgcgttactaagtttgattttttctatattaagtgaatgtattagctgtattgatttagaccaagaaaaaaattcttttcacacctttaaagaactagcttatattagtctttgaattgatgtcttgttcgcaatatgttttaaaatttgagttggatcagaaaccggattattattagataactagattccaaaacaaatggtcataaggtaaatcaacgagtgtagattttgatgttaggatatcaattttttttaattttttttttggcgtggttcacgcgttttaccaatatattgattcaaagctaaaaactcagaaacattttgagttgaagatatcatccgtgtaaaacgtctatcgtttcaacgattccatttatttaatatcgttttcaatcgtactccaatcattttagaaaaaaaaatagaacgacataatccaattgagtcattgaccatcgaatatctccaccaccaccactaaaaacattcttttctgatatttgattatttacatttttcattatggaaaactaaagaagttgagttttttttttttttttctgctaaagaagttgagttgtgataacgaactaaataagttgatttgtgtattttcatactccctctgttttatattagttgtagtttaagatttttacacacaaattaagaaattataaaaatctcatttaatttacctcttttatataaaaacatcatttattataaccaatttaaccaataaaaaatagatgattaaatataattggttaaaaaatattaaatacatttattatttgcatagaaaattgaaaacgacatttaaattgaaaaaaaataaaaatccttaaactacatttatatagaaacagaagaagtatatttatcttaaagttgtacgtaatgtatagttattttgtgtattttcaaacgtgtgttataattaggatggattgatttgattgctgtacatggtttttccgaaattctaaaaatataccccgtgacaaaatttgatgacttttgtgtcagaagacaaacagttgaaataaagttggggttgtccatgtatttagtactatttacgatcaaaagactaaaaatagaaccttctcggtatttaactcaaacttctttcgtgtttaattattgtcgtataccatctatatccaaagtagcagtttcggaatttagaaggctaaactaaaactaaattattttttaagcggtaaaccctaaactagtcaggatggggactttaatattgactgatacatagtattacacgcagtattgagtattaaacttcattttttaaagtatattagtaatatgtttaaaatctcaagaaaaaatagcagtaaacacataaatatttagaattttatcctcatatatactatacttttagggtaagttctcgttataatgactgtgtgttgaaaacttaatattaatgattgcataagtgatttaagaattgatgttgaagacagtcctcgtgccttcgtacaaataaaacgcgtgaaaaaataacgagaagtactttagaaaaagaaggataataacgatacgtgatttttacgtaattaccagagaaaatggccgacaatccgtcttatccatttatagtatattttcctttttccagtggttttatgaggaattatatcatagatttaatttgattagttacaaaattgtaaagatatttaagaaatacaaaaattagaaattctttcaagcaaagaggtatcaaattttgatgctagataatttagtttaaaatttttcaaactttctagtcgtcccgttacaacatcaatttttttgcctacttgatcgactagttgcaatataaatatatagttaactacatccaactttattaacttctttttttatattctttgtcaacacattaatggtactatatgatatatccctgcttcttcttcttcattttttttttgtttccgtcaaactcaaatccatatctataggatccgcatataataagttttcgtgatgttgacaaacattcgcaaacaaacacaaattgaaggaaaaaaatcaatatttaatatggttgtccgactcgtcaaaatattattaaccctatgcgttgcgtgtatgatacttaacgcatattgactattaactaagcaatgcaatgattataattaaatcccatactcatttcagggcaaacccattaatcttgaacggacgattatgatattattaagtttatatacacacatatttgagtcattgatcaatgcaccacagcacctgatcttgattgtggttcaaataatactaatgtttcccaaaattatctataagctaaatagcataaaatttaattaggttaaaagagagagaacaaatcacaaatctacttataggtagttaggcacatacatggaccatatttcatatgcttaattacaatattaacaaaataaatcaacaaagaattaaatatcacgactaaatacaacgtagctccaattagttgatgagtagcccggcattgcttactcattaaactctgcgaatcttttactcttttccactataaatatatatacacacacaattctcaaactattaaacgcaacaaatcaaaagtaataatccaaattatatatacatatatgcaccatttggttaaaaactaagaagaaaccaaaatgagaagttttactaatttaaatccttgctacgttctcttaccgttcttccttgtcctagccacgaatgcaacacatacaaacaatttcctcccaaggccacggactgggtattacggtagtgcatgctggaatgtagaatcgatagttcggtccgtggttgagtctaactatcttgctaatccagccaatgctccaggcattttgcgtatg

SEQ ID NO: 989 - DNA, 3000 bp, Unknown
  misc_feature (1)..( 3000): cDNA_ID_2128900_gDNA_ID_1620344_Annot_ID_154096 3000 nt of promoter + ATG
atgtttgtcacatccaggtcatggactctgatgctgatggggttccaagtgagttctttgactatttcaaggtatctgcatggcttaccctctcacctttcacttttaaatgactattattgtttcatatatatgtggaatggccgttaattgtcaactcttcttaattaggtgctatgcattcaaggattccttacatgtagaaagcacgcggaacggattattctcttagttgaaatgttacaggttcataatttctagcttctttttactatacccgaataagttataacattgcagcaagcctaattatttgccttctgaattatatatattctggtgttgtttctattaggattcgggtttcccttgcttcaaaggtggtccacgaaccattcaaaacctaagaaaaagattccatctaagtttaactgaagaggtaagcgttttcttttatctttgtcgtatcaatttatataatccatttcacatgatccacgacaatatcctcattctttcttttttgtttattttttgggggcaatcacaaaaccagcaatgtgtctcgttggtcctctctctcatcagcagtagcttagatgcttggcggacacgacaatatgattactaccaacgggtcttaaatggaatattgtgatgttccaaagaaccaacctaataagggtaaaaaactcacaacatacattggtatgttgggttagctcataaaacaatacgttttttgaggaacccttttcatagtagcaatcagaatccttccaaaggtgggggaagatgcctgaagagatcgtgtgtgcacgcatgggagaagaaaccggtcacacgtggaggagaaaactacagtttgtgtacagagtatgatttttgcagaggtttgattgttatctttacttacttgctctacttgcaggagaaaagaaggcaaaagcctgaaattttcttcctcccaaaagctcaaaacaaagcccttttacagaggttaaaaagggtaatgttttgttttaaatttgtttctagtcaaaactcatgatgtgatattgttgtataaattgtgtatcatcttcttttcctttgtgttaaaattagagtctgagcacggaaaaaccaaacagaacatgcatacatgatatttcattaagatgtgtgttatatcactcttcacacatatactcaattttcataatgtcgtatcgaattgttcactgatgactcttatccaagtatcaaatggtaagtaggattcactagcttctccatttgaattgatgttcaaaagaaaaacaaaacaagggttatattggaataaaaataaagtgagacaagaaaaatggtcataactagcagtttattactagggatattttgaaggctattcattttcataaaaaatttgaaacgtcttgattcatgcactgatacacaaggatcgtactattatagaacgtaccgtataaaagtctaccgtttactctcgctgtttacaaaacaatagcaaatttgttacatgtaattggggagatctacaaaatagaaaaaggaaataaaaatcgtaaaagaattttcccattgcctttttacatttcataccaatgaaacaaacaagcatagtcaaattgttggagaaaaaactatttaccaaaaaaaaaaaggggagcgcaaaactgaggcgggtgaagtcatcgggccaatgagagggatgctctttcggttccttagcttccaatttatttttaaatacataaattgatttgcatatatctttctcaaaccttgacaacataactcgttttcaaaataaatgaattttaatcaaatttctaaaagaaatatactcattaccaattttcctttttattctaagatccatactcttattgttattctaatgaatcatcatatcggaaatcaataatttattttatagttatacaaatttttttttttttttttgatcatagtcataaaatctctctttcaaaaaataagattaaaactataaaattaatatcacaaatcttcaagttgttgtaaaccagtaacactatagaaaaaatagactgaactatcgaattatatactttacaaatcattaacttatggtaaaaacgtttataatttttttgttttatggtatatggtaatagcttttggaacccgcacaactagaagtaaaagaaaaaaaacacactaaaaaagttaacttttatacattttggtttttggccgattacatttatgatttatcattgaattgcaaaataatttatttctgtaataataaacgcgtaattagatctatataaaccctaaaccccatcactcacttactctacccctggcttctccttcaagctatactctcattctctctcctccgaccaaagttttctgttcctccgcttctccttcccctaccggtgcgacttctcctctcttttatcttctctctttgtttattttaacgccggaaatgtttctcacttgtacgttttggtttccgatgtaatctctcgtcttctctgtttcttgaaaatggggttttgatttctgggtttgatcttagctccatcaactttgatgcttccccttgatcaaaggattaaattctacagtggagattatctatctgcttaccaaattttgatcagttacaacaaaattacaaaatcagaattagccctagaatttgttttttgttgttacagtcccattcattgaaaagtgtcttcttctatgtgtaggtgcttcgttttgtgttgtacagcagatgtctgttgatatctgcaagaagaatccatcgtttctttggtgtgactgtggatatatgagcagaggaaggttgtggtgctttcagaccatcatgttttcttcttcttcttagctttttgtctctgctagatcttgttattgtgagttttttgctttactggtgagggaagttacttagtgtagtgaaagttttccccttgtcttccaatg

SEQ ID NO: 990 - DNA, 3000 bp, Unknown
  misc_feature (1)..( 3000): cDNA_ID_4256566_gDNA_ID_1620344_Annot_ID_154093 3000 nt of promoter + ATG
ctgttgattttgatcaattgttatgttatgtaggaacttgtaaagatgaaggagaatgcaaagttgaaacagttgcctccagtatataccgggaaatgggcaacagcttctgatgctgaaatagagcaagagttagaaaagggaacaccttttacttaccggtttcgtgtgccaaaggaaggctctttgaaaattaatgacctgattcgtggcgaggttagtattataggtttttttgtgtgcttaatcatcaatctatgtttagatactgttatttaaagctcgatagtaccttcttgtaattgaccatgtgtgatagtgtcttgaaggtctgttggaacttggatactcttggggattttgtggtaatgagaagtaatggccaacccgtttacaacttttgtgttacggtagatgatgctaccatggctatatcacatgttataaggtagtgtcttcttttggaatttgagtttcttctcttaacatgtttgaatgttatcttgatcaaatctattaactttcatttcagggctgaagaacacttgcctaatactttgaggcaggctctaatttacaaggtaagcactagcttatgtttgtttattccaattgctttcggaagttatgtgatccagaatataggaggaagaatttgatttattgctgtctgtatcaatcaatggcaggctcttaagttcccgatgcctcaatttgcacatgtttctttaattttagctccggatagaagtaaattatcaaagcgacatggggcaacttctgtaggccaggtgattatagctgttatttcctttactgctcgtagatcatagattactccattgctgattcttcatctaatttctgctttatgtccctttcgaaaaaacagtacagagagatgggatatctacctcagggaatggttaactatttggcactcttaggttggggagacgggactgaaaatgaattcttcacactcgaggatcttggtaggtcgtttttgttgactgtagttactttgttgccatccctagcttttctgatttcttcattgaatgtttgttcttgatttgcagttgaaaaattctcgattgaacgtgtcaacaaaagtggcgcgatttttgattcaacaaagttaaggtgattatagattttacttagctgtttgaattatccaatcttattctctcttgtttttcgtatctctgtttgttctctacctttttcttataagtagcttcaatgtggcatatttataaactcaaagatggatgaatggtcaacatctgagggcacttccaaatgagaaactaacaaaacttgttggtgagcgatggaagagcgctggtatcttaacagaatccgaggggagttttgtaaatgtatggtttctaatcatgactccgcactttcttctgatcctaacataaagctttggaattaggaacaacagattttttctgtatagacttacccagtttgagcttgttgttgaagtacaggaagctgtcgagcttctcaaggatgggattgagttggtgacagattcagacaaagtacttttgaacttgctttcatatcctctacacgctacattggctaggtaactatcaaaccgtttgttcctcctgcatcacctcttttctttcaataaatattttttacggttttctggagctctgcgcttgtgttgatttgagtttgctgcacctgatgcagccctgaagctaagcctgctgtggaagacaaacttcatgaagtagcagccagcctcatagctgcttatgacagcggagagattccaagcgctttagaagaaggacaaggtgcttggcagaaatgggtgaaagcctttggcaaatccttgaaacgcaaagttagtcatctctctaatgcagttaataccgaaacaaaatctactttacttgagtgaacaaaccttacaagagattcttctgatgctggttacagggtaaatcacttttcatgccactacgagtgttgttaacgggaaaactccatggtcctgagatgggcaccagtattgttctgatttacaaagctggaagtcctggtatagtggttcctcaagctgggtttgtgtccatggaggaacggtttaagattcttagggagatagactgggaagctttgaacaaagatgagagtgtgcctcttgaatctacagccacagtatcaacctgagaaaactcccctttttttttttttttttttttccttcaatatttggttagttggtgagagaaagacagcccagagattttgattcctcgtgcatttcttgtttcccgaaacaaatggcacaaagaaatttgtagattataatgtatcagcaaagcaaacttaggaacaaaccagagagcttgtaacattatcaggccagttttaatttgctttcaatgctctgttttcttaacattttcttctttgtctgttttttttttggtcattttttttcttatttgtttaactgtactttctctctaaggataaaatcttataatggtaaaagctctcttttgttctttctatgaaacataggctttgccaaattagagtcataatccgaaatctttacctgaccgggataaagttcagttaaaccggatcagactaagaaaacagagtaccaaacagagatttttgtgatttttgagagagtttgtgtggtggggactgaagtgaatctaaccacataaacacttggaagagagaatctgaaaaactcaaactttaaaagcttgaagctttgagtaataagaaaaggtttggacttttgccaataggactgaagggaaatctcaccttatccacactccaaccacaatcccttattacatcttagtccacgtcatcatcatcatcctcattcatctctaatactaaaatctaatctcttccttgctcactcaccaatcaaactcaaaaaactcttgaatttttcaagaacaaaagaaaaagacatctttaatg

SEQ ID NO: 991 - DNA, 3000 bp, Unknown
  misc_feature (1)..( 3000): cDNA_ID_2045289_gDNA_ID_1620345_Annot_ID_154123 3000 nt of promoter + ATG
caaatcaatacatatcctcatcctcacccccaaagtttttcagatctacaattaatggaggaagagattgctgatggtggaattctatctccgtttcacaaccatcctttatacccaacagacgattcgtcgactccgtgcgttgggtgtggtgaagagacagctggaaaacacgcttgccatatttgccatgagatcaacgtccataagggttgccttgaaatcatcaacccttccagtcccgcacatcctctatccttaaccgacagatttgacgattatatcaaatgtaccatatgtcactgggtatttcacagatatatgtattattgttccttttctggtctccctgtttgtaaacaatgtgtgaggaagccctttattcttgacccggaaaaggcacacgagcatccactcctcatctttcttaaagggtctttctcttttccttgtgatgcgtgtggagtgaacgatgctaattcatgtctttgtctatgtatcccatgtcgtttcaccatccacatggactgtgtctacttaccgcgagtcatatgtgttaaccgtcatgatcaccgcatctcgcatgttcctcgtctaggctcaggaaattggagttgcggggtgtgtcgtaaggaggtcaacggcatgtatggggcttattcatgcttgacctgcactttcgttgttcattcaagatgtgcaataaggagtaatgtttgggatgggatagaattggaaggggtgcctgaagaagacccggcaaatcttttgccattctatgtggtagaagaggggctgatcaaacattttactcacgaacacaatctaagactcgtcaatgaggatgatatccttcatgatataagcaagcaatgctatgggtgcgtccttccaatcttttttaattcatgctacatatgcacgctttgtgatttcgtactacatgaaacatgtgctaacctctccaagaagaaaaggcatccgtctgagagtcggagattgactctgtatgatgagtattacgtaaattcacttatgaggaagggtcctttcatatgtttcgtatgtaatcaacgctgcagcggcttcgcatacgtggaagacagtgagcgtcgtgacggcttgaagattgatgtacgatgtgtttcaatttacgatgggtatgtccataaaagtcaaccacattcaatgcttgtagttcccgataattggagcacatgctcgatttgcggaaaaggtggtgagcatatgtggagtttgactgggcaggatgatttatttatgtgctacaagtgtgctactatccctgaactggcaatgcacaaatacgatgttcatcctttgtccttacaattcggtgagatggccaagggtgattattggtgtgacatatgcgagaagattctagatccacaaaagtggttctatacgtgtgacttgtgttgtaccactcttcatattgattgcgtacttggaatggagccatatatgagggttggatccaccttccatttgaaacgatttgtattggaagttctttccaactatagtgcttctcggccacattgttacacttgttcgtctcgtatcaatgatcttatcgtctacaagagcaaggatgtttacttttgttctttaatgtgtattaaaaagagtccaaaactcgattctggcttgtattggtctaatatgtatgacttcactgagcctgatttgcatttgtctaacttttttcatgatgattcttgaaatttaattttattgagtttttttttgtgttttctaaaaatttgtactaccattagagaattttatcaaataaactttaaattagggctttaattacatttatataaatagtactccctattttcttttttatttgattgtttaggaaaaacacacatattaaggtaaacatattaatatgtaattaattttcttctgaatttctttttttttttcttttttaaatataatattaaattatagtaaaaaaaaaaatagctttttacaattggtataaacgattttttaaaaagaaatttatattttacatagatttcttagttgaaaataatgatccaagtgaatcaagcacggcctgcgagccaaacttgaaatgctgcatcattattcctttttctttttcctatttttttccttattcttttttttatgttttattccaactcccctccagtcacaccctccatacactttaaaacagaattgttagccaacttcaagccaaaaactataaccagctttgggctatctttactttacggtttattatctaaattcaccttaaccaacaggtatgtaattgttccaaaaatttcttgttgatgatatcttcccgctacaacaaaaagaattaaaacacatgtatacgtcactatccaaattcaaaccatgtcttttattttcgccgacatccaaatcatgtttaattctcaatagtaaagttcatagttgaaacttcaactggaagcaaaaaaaaacaaactttccaaaacaattaagaaacaaaatgctattagttgaaaaataatctttgtcacattgttaactaactagcttttaagtgtcaaccaccatatggtccttaattagatcttatatctaacctaaatcataataatattttttcttcattacagtagttagatccgtttctgatagaaagaaaacaagagttagatctcttcctacaaaatcggcgttaatatatttgaatctgatccatactatccttttacttcgttcaacagttcaacaagtatcataaatacactaaaataattacacaacttctttactttatcagtcttcacgtgactctgaaaactttccagtccccgacagctacttctctattgtttcttacatccttttgtcacgtacctcctgctctcttcacctctctcttgatatgtaataataatcagacagacatttacatgcttctttaacacattcgtcttacaagctatg

SEQ ID NO: 992 - DNA, 3000 bp, Unknown
  misc_feature (1)..( 3000): cDNA_ID_2045216_gDNA_ID_1620345_Annot_ID_154146 3000 nt of promoter + ATG
cccgaataaatcgttgttaagtgtttttaaaaaacactaaatgattgttcttttgtgttgtaggacttttgaggttagaacatgacgtgagttcttgcgagtatgaagacatacacataatgtggaatttgttacacaagaatgaagatcttacacgcgtaccaatccaacaacaacaacaacagaggaagaaaccttgttggaatcttcttggttcgtatctttgccaaagattctgatccgttttatgatataaaccaaaccattgttgtatttgagagagccttgacgggtcccttgcagtgtggtgtggttttattgacaaatttcgcaaataatgaatccgaggttgcagagttttaaattagctgttatatattccattgcatacctctatgtacttatcatcacatgagtgttgtatatatattacaaaatgctttacatagtttgatactacctatgttcatctacttggtttcattgatcttgccttttcacataagaaaacagaacaaatcttaacttaaaactcccaagttgctaaaaaatggattttgtaatagaaggaaaaactttcttgagaatccaatgataaatttatcaaattttaaaatcaaagcctttttccaaggaaaaggaataatatagtggtatctttatttaataggtctctttagaaagaaaaaagacatccctattccataaaaaagattagacttccaagttccaaattagtggccattattaaaagaaattaaattagcaaccaatgagaaagatgaaacgtcagaatcaattggttagatactgatgtccaaacaagtgtgtgtgtgtttgcttcatatatgtgtgtcggctgcttctaggcttattaaaaggccggtctttaaaagagtattcaacaagtattgtgtgatgatgtgattgctttttctcttttttggttagacatttcacctaacgactctttgatttcattatatgtaactaacgcatgttgatatctatatactctttgcctcttttttttttcccaatgtcaaacttacatattcttttcgtgtgaatcttttatctttatacttgtctcaatcttttttgtcaatcacatcatcacacaataatttgagttttttttttgttaatgaaaatttcacatgccttcatcttctttccaccaagttcttcatttgtcatgacatctaagttcttgtcatttgtcatgccttcatattcaacagctccaaaggtggggatcgcgtcgttgaacactttaatcgcatgtatctcgctggaatgcaaaacggcatcatactgatcggttatggagttataccgatcggttctctatttggtctcatacttatcggttgttgtaagtaaaccgatcagtatcaatctccgtttccagcttcttctcattctcgaatgtgatggtattgacatgctacttagactttgagtaagaaacgatatcagagactcgcttcaaacttcacatatctcttcatcttctgttggatttaataattcacatatgacttatcatatgaagaaaagaaactttgattatgtctctcgtttcgattattttcctactaaaaataattctcattttacaaaagtttctttcactcaaaccaacataaataggtatactcctattttccccaccaatacatgtaacaactctcaacgtgatattgaacatgttaagcatgccttagaccatccttattacatgtctcatactataaatcttaggtataatataatcaaaataacatgtgaatagtttagaagtgtttcttagctaagagataaaagaaggtttaagagcttcaaaccattacaaaaattcttagctataatgtttttcaataaaacaattcatcataatagttaagagacaaaattaagagtctaccattaaagttgctcttagactcgtccaacagtttgaatcctatatttcatcgtccaaattcttttaacgcaaagtgcaaaatcttgaaccctacacctcttaatatcgtgtttccacaccaagattctattgatcgtcaacatttagacatgaattccttgttatcaaagcacaatctgtgttttccaaggtggtcgatctttgatgaaagtgtccaaaccagccaatctttttgaataatctatttattatattgattctgaagaagatgagaaaaatgataaggatcaatatgatgttcgtacgcatagtctaccatatgaaaaatacggtccatatacatgttctaaatgtaaaggtgtgtttaatacttctcaaagttttgctgcacatatgttatctcattacaatcatgagacgaccaaagaaagagaacatagacttactgcaagaaacaagaaaagatatcgtaattacatggaaaatctcaaaagatcacaacagaaggtgggatccatattagtgacataagtgacaatgaaacttttcaaaatcttgtatcataaaagaagagtttgtttatgatttatttatttcatatctcttattcaacttattttatttaaataaataatgcaaacttgtcttctatttatagtatttcataatatttgttattaccaggaatggatatgcatatttgcacagaaaattgtaatctttatttgctctttatattttaaggtttggttttgagttttttttataaaataatttcttaaatttcaataaataatacgcatacacaattacgcatgttaagccatattaattaataaaggaaagagacgacagttataccctcacaaaacttaaacgtaattatctccccaccttccccactctattctcaagttcgccggagatttatactaacactgcaaaattcactcacatttctactaaaatcaaaaccctagtctcgccgggaatctctcaaatccgtaaaaatcttctctattcaatctctccttgctcacattcaataacgaggcaatgttgatttctca

SEQ ID NO: 993 - DNA, 3000 bp, Unknown
  misc_feature (1)..( 3000): cDNA_ID_3060042_gDNA_ID_1620345_Annot_ID_154136 3000 nt of promoter + ATG
tcatcatcttcctcgtttacgaattaggtcttcctgtgataccaaatttaacatttcccggtgaaaatttcgaagctcaaaactctaatcaaaacatcgcgccaacacaattcagcttcatttttcaaaaaatcaaaacctgtaaagaattcggaaaaaccgccaaaatccaaactttattccaaaaaatcacaaaaatgtctcttcgcttcttctctttttctcacccttctcacttccattctcatccacctaatctcgatctcaatccctctctcttgaatccaatcaaccatggccgacgaaaaagagaactgcgtgagaatgacaagagcagcaacaaaaagaaaagcttccatggaagcggcaatagacaaagaacgaatcaacaagaagagagtcgtactcggagagcttccaaacttgtccaacatcaagaaatctcgaaaagccactacaaaacagaagaagaaatcagtttcgattccgacaatcgaaaccttaaattcagacattgacacaagatctgatgatccacaaatgtgtggtccttatgttacatcaatcttcgagtatcttcgtcaattagaggtaaagaaacaaaacccatctctagatttctagatttcacaatctgagttagtttctcgattaacacaattcaggtaaagtcaagacctttggttgattatatagagaagattcagaaagatgtaacttcgaatatgagaggagttttggttgattggttagtagaagttgctgaagaatacaaacttctctcagacactctttacctcgctgtttcttacattgatagattcttgtctctcaagactgttaataaacaaaggcttcagcttttgggagttacttcaatgcttattgcttcgtaagctttttcttgttttgtttgtttgaatctctctttttttgtgtgggtttgtttatttggattttggttttgaaaaatttgtagaaagtatgaagagattactcctccaaatgtggatgacttttgttatatcacagacaatacttacacgaaacaagagattgttaagatggaagctgatatacttcttgcgttgcaatttgaattaggaaaccctacaagcaacacgtttctaaggtttgattctgattcttttggtgctcattgagtaatgtttttgtgtagtttattgtctcattgcgttttgctttgtgcagacggtttacaagggttgcacaagaagatttcgaagtaagctctttttgaattgtggtatttgcaatttatagagagtatcaaatttgctaagaatttctcttatttgtttcagatgtcacatttacagatggagtttctttgtagctatctttcggagttgagcatgttagactatcaatctgtgaagtttcttccgtctactgtggctgcttcagcggtgtttctcgctaggttcatcatccgtccaaaacaacatccctgggtaaagcattttgcaaagcggttcttgttctaattctctgtgttcactactttatataagaagctaaagctctggtgttgaatgtaacagaatgtgatgttggaagaatacacaagatacaaagcgggtgatttgaaagaatgtgtggctatgatacatgacttgtatctgagtagaaaatgtggagctttagaagctataagagagaaatacaagcagcataaggtaaccctaaatactattaaatgataatttgaagaacaatgttcttgagattcacatgtttctttttctatttggttcaatacagttcaagtgtgtagcgacaatgcctgtatcaccagagctgcctcttacggtttttgaagatgtcaacatttagagacaacttttggtaatcggcatagatagtataaaaccaggtagcggtttcgttggtttctttccttggtgttttggcttgtacatgtcttaggactactagtgtgataaaggatcttaatatatgtttaaagattttggttacttaatgattttttttgtttgggttataattcaagcgttcaacaccaatgttgaaccatgcatttccataaatctatctaatgggttgatgcctaagccaaccgatgcaactatacgtaaaagattgagatcttgtgcactacatattccattctttgacatccaaagctttccacttatcttcagttttcttcgttttgataaaaacaacgctccatctttgttttacattatcgtcatccagacatccacactagaactcgccatcagtcaaagaaaaacttctcaaaccaatattttgcagctgttcactattaggttccactaggttgtatatagaaaaagaagattggtttgagaagtcgcttcttgtcaaaccaatattttgcacctgttcactattaggcatagatagtaaccggcatctgcctatgcactcatgaaatccgtgaatcatatcagcttactggtttaggcgttaaaaatcggtgttaatcggctaaatcggccggtttagtgtttattatttttctttcaaatatgacatctttataagtaaaaaacatttaagtaaaaatataataaaaatacttgattactaaaactaaaaatttaagccaaagatttctatcgataaatataataaaagaatagatattaatttaataggtgataaatgcgaagtttccacgcgactcaaatacatcaaaactttgactattgaaatatttttgactatttattgtgcatgggaaagattttgactatttaatgtgcaatctctttttttgtttcttttcttttttttggtgcaattaaatctcacttatttaccttaatcatgatttcctctataaataaatcacctttccttcctttgtttttgttttcttttcttttcgtattaaattttcttgaacaaaaaaaaaaaggtttatatcttttttacataaagagatttagtgattagatttttcagcttcttcttctttctttaacc

SEQ ID NO: 994 - DNA, 3000 bp, Unknown
  misc_feature (1)..( 3000): cDNA_ID_3052024_gDNA_ID_1620345_Annot_ID_154137 3000 nt of promoter + ATG
ctccaagtggttcttatcaccactatgaattaaaagacttgcaaaggtttaaccagaatcaacagagattgtcatatcagaacgattatgttaatcaatcttataggtatgatactattggtggtggtaatgggatgcttaacaatagtttcttgaatggagttccttgtgcttcaagaaacaatgtttcagattactacactaatatttttgggtatggagttaacaattcttggaggagtaatgaaggttgtacctataatcaagatcaggcggcctcgtcgatggagaatgggaggggctcgtacttttccattgctacagaccgagtatggagcaaggaattggagaagactatctttgtgggtactaaagagacgattgatatgattttcgatggtctcattgtcggtatttgtgagttgatggttgatccttttggtaatgatgttgttaagctgcttatcggaaaatgcagctctgaacagatcattctgattgttgatgttgtcactcggcacatttctaagtttgttaacatatgctttaatccgatcgggtacacacttctaatcattattctttaactttgagatatgattgtgcattgtttccttggatcttgattttctataattctttcttttggagatatcagaactttggcaatacaagttctgttaactagtattcatgagcgtgctaacaatcaaatcccgcgcattatggatgctataagctcggtagcacttcaattgacaaggaacaccaatgccaaatatgtgattctagcatgtttccgcatgtttacttcgtcgcagtgtagggtaagcatctcattcacatattaatctacttcagttctcaaaacctatatagaatatttgtttcttgtcatggagttgtttgctagttttgtttaagcttcaagtcactttcttataccatatagttgatgaaagaatctactatagaacacctcaagtagattaatcaatttgatgtttgagtttgcttgttatcggttaattttgcaatgtttgttttcttaagttcctagaatctgtatgttttaattgagcagatctgacctcaattattttctatcacgtggtataagtaaaatgtgccattattgaccatggatcacaagtttaatcttctttcacaagtattcttgagaaatgacaatctttcttctgtttttacagcgtcttcttgaagttgtctctcaacattgttaccagatagcgattgatcaaaacggatgctgcttgcttcagcaatgttttgacaaggaacgtgttccgaatcatgagataaggcaacgtttgatttcggaagttatcgaacatgcgttgaaactctgcttgaactgtcatgggtaaacatgatatgaatgatatctacacaactctactttctcatatatgatccactttattttttactcacaagtatgttctccttcagaaactatgtggttcaatatgtcgtggagctcgataatcaacatgaaacagatttgctcgtgaataagctacttaggaactatgcgcatctagcccgcaacaaatatggaagtcatgttgtgcagaagttgttgaaactaaggggtatcgactctaagctgattgttgttgacttgcttagagggattgatacacttcttcttgacccgtttggtaactatgtcattcaaaccgcatggtttgtgtctaaggtaatgtcttacagttttttttcattacggtgatctgattagagattttgcgagattatgagaatcttgtttggtgtgtgcaggaagatgtgcgccagatgttgaggtattatatagagcgtaacattcgattgatgaggtgcaacaaatttgggaacaaaattctggagaaactcaatatctagagagagctgaatggtagaaagaagaatttgtttttgatgttgtttagttggtttgttatgattgattcattgtgttgtcattggtaatgatgatggttcttatgtgttttcttgtaactttcgttgaatcttaggaaattgttagacaaaactagacaatgttctcaccaaaacagaatgtctttctcttgtaaggtttgtgtgttgtgttgtgtttttagctttttttctctatgtaaatgattgaattgttcaaagtttattttattttttattttttattttttatttttttttgtcaaggaattcaaagtttattcattttttttttttttataatgtttttctgctctgttttttttcattgcttacttaggtaattttctatattttgatgatatttcttttcgaatgatttgagctttttattctaatttcgttcagaaagaattctacgaaagctaaaaaagataaatacaaataataattactggttgtgatcaaatacaaaattgagactagtcggttgagttggtttagcagatacaaccaacgatagtagatgtgatatattccgaaaagtatttggtttaaatttttgtgaacttcaactaatcaaacttgttttaatgctcgtctagtttaataattcgcaaaaagatttagaattctagaaattaggcataactaactcacgacaatggcttccacaatctgcatatcataatccacctttttccgtttttttccataattactttgtttgatgtgtttaatccgcaccgtttctcaatttgccggtctcccactcacatacctacctttatcagacatggtaagaagagttatgattcgttgacttcacaagacttgttcaaacagacacgtggcactacattattcgttattctaaccaaaaaaaatattgaatcatgaaaccaccgtgagagacaaattccattcactctctctctctctctcttcctttcttctcatttttcaaggacgacggagccacggtggagttgactccgcttaaaccccctccgtcgccaccggcgttcttcaatttcaaaccccaatccaccaccc

SEQ ID NO: 995 - DNA, 3000 bp, Unknown
  misc_feature (1)..( 3000): cDNA_ID_3060034_gDNA_ID_1620345_Annot_ID_154140 3000 nt of promoter + ATG
tccattggagggaagaaatggaaaccaattaaaatatctcagactgagccgaagctctcacacatctgttttgcagacgatctgattttatttggagaggcttctgttgaaaaaattcgggtgatcaggggcgtgctggaaaggttttgtgttgcgtcgggccaaaaggttagcttggagaagtccaaaatctttttttctaagaatgtctcaagggagatggggaagttgattagtgatgagagtggcataaaagctacacaagacttgggaaaatatttggggatgccaattcttcataagaggattaataaggatacttttggagaggtgcttgagagagtctcgtcaaaattggcgggttggaaagggcgtacattgagtttggtgggcagattaacgctaactaaagcagtgttgaattcagtcccggttcatactatgagcaccattaaactgcctcagtctacgcttgagaatttgataaaatctctcgctcttttctttggggcagcacagcggagaagagaaggcagcatttagttgcttgggacagagtgtgcttaccaagatgtgaggggggcctaggcattcgttcagcagctaacatgaatagggctttgatcgttaaaattggatggagagtattacatgatcgttccagcctttgggctcaagtagttcgaagcaagtatcgagttggagaagttcatgatggatcttgggctctcgctaaaagcaactggtcctcgacttggaggagtgtaggcctggggctgcgtgatgcattttgcaaggtgttaaatgggtaatcggggatgggagacagattcgattctggacaaatatgtggttatctaatactccacttattgatgaaattacagctccaattccaccgaatttggttaattgtacagcccgacatctttggcagaatggagagggctgggacatgttgagagtagcgccgtttgtcacagagaataagtggttggaactcttggcagtggtagtagatggcctcacgggagttttagacatgctagcttggggagagtcctcagatgggctctttacggttacatctgcttatcatatgttgactggaaatgaggctccgggtcaagatatgagtagtttctatgggagtgtgtggaaagttctagtgcccgaacgggtaagagtctttctctggctagttgtaaaccaagtcattatgacggattctgagcgaaaacgaagacacttgtgtgagtctgatatttgtcaagtttgtaagggaggcgttgaaacaagtttacatgtgctcagggattgtctggctatgacaggtatttggctccgcattgtacctaggcgcatgcaaccggggttcttcactatgtctttacttgagtggattcacacgaatctgcgacagagtggtaataaagaaggtagtgattggtcgactttgttcgccttggcgtgttggtggggatggaaatggagatgtgggaacgtttttggtgataacaggagatgtcgagatagagtgcgtttcttaaaggatgtagctgccgaagtttctttagcgaattcaaaaaaaagggaacttaggccggtggtggatcgagtgggcaggttaatacaatggacggctccaactgtaggatggcacaaactcaatacggacgatgcctcacgggggaacccgggcttaacttcagccggaggggtattgcgggatagtgagggcgtttggtgcgggggatttgcggtcaatattggtagatgctcggcccctttagcggagttgtgggggtgtactatggcttatataccgcttggggaaaacggattacgcggttggagttggaagtggattcggaggtggtggtaggttttctcaaacaagggataggtgagactcataccttgtctttcctggtacggttgtgccatggcttcttatcaaaagactggatagtgcgtatttctcacgtttatcgggaggctaatagtcttgcagacggtttagctaaccatgtgttctctttgcccttgtgctttcatatttttgattcggttctttttgttgttgatacgctgtttatcgaggataataacgggcctgggcgcctgaggcatgtacgtttgtagtttttttttctttagttttttttaatacaattccggggatttatccccgggaaatcaccaaaaaaaaaagatattctagaagattttatactcctaattttactccgagctaaactcggatctttgtatttatatagatacacaagagcaaaatttttagtattagcacgaaactccattcgagctaacacacctccgccgtttttgtctcttcttccgatctcatctcatctcatctcatcgatcacctactctcaaggttaataacctaagacttgatccttagaaaaaaacaccaaagtccatgttttgattgttcggtcaatatatagtcatggttaattgattaagatgtaactgatctatatgcttcggttcatctgttattgttatatttgattatcgatcatcgttattacgagttgcttgtcaatcgttactacttattagttctgtgtcataattaagctttattagggtttttatttagaataatcgttcacaaactgacatagttcatattgttttactaaaggcacgttttatagatttattgattcatgtattgtttggtttggtataaatcgttggtttaacctagtttgagattctgatgcttaacggtttttttttccgatattcatcatcaagattgtttataattatacataaatgccttcaccatgattggagcatgttacaatacattcactgcataatattgaagattcacagttatagttttactcatgattactctttcattataaatatacaatataaatctctaattaattaatatctctctctctttttctgtttagatttttcagctcctccttgattttcaaaacc

SEQ ID NO: 996 - DNA, 3000 bp, Unknown
  misc_feature (1)..( 3000): cDNA_ID_2045228_gDNA_ID_1620345_Annot_ID_154142 3000 nt of promoter + ATG
aaaaaaattggttcaatttaaattggttcggttcaattataatggtaacaaaacaaaaaaaaaaagagttttcgactttcgatttgtgaaggaggataataaaggaaaatcacttagctgcgtcttctccctttcggcatgctgacgtcataccaattagatttgagccacgtatgataagattcagtatgggtcccaaatgtcgagtgccgttgtatacgacgaacactattaaattgtcggtagctcctagttgcctccacgtgtagatttcctgatggctttcatgaaatcaaattgggtttttattcattttttgtggaagaaaatacggaagaccaaacagtatcatttttttttctgacggcaaatatctcgtgccaattgttattttcttaaaagtatagtaggacaaaagtgtaagggcaattatatatacttaggacgataaatagtgttttattttggccacaatgtgacaatggaagaatgatgttatatgattcaaggaggcaatatgacctaaaacgtggcctaagtttggtttcatttgtgaattatgtggttaacctcatactagttttacctaccctaatttatttttggcattaatttaaataaacaaaaataaaccaaattatttttttagtcaaaatgttacaagaaagtaacaaaaagtaaaagaagatggtgaagcaagttttcgcagtaaaacgcgatggaactttgagacttcctgataaatatatgcttagatgatcaaaattcatacatgtttatgtccatatctatgcgatacttttgctgcattgtagacaccaaaaaaacaaaaaaaatctactagtactgatggttggttcaattgaataaaaagaatgcgattgcgtgtgacccagaacactcatacttgtcattgttcagctgtcagctttcgtctggtttgccatatatgtcaaatagattgtccatatatatgcgcacgagctattcatcagtggctgcaaccagaagattacaagttgaagttaagaagtgtcttcaaacatcccaaacaatagagaaagtaataagatagatatttggtttacctgtagatgaactggcacatacttgaatgtaacaaaatcacagaccggccaatacataagtccatttttcaatgttggcagaagatctctcttcaatctcgccacaatttcctcagaattttcgccttaaaaaggaccaacaacgtgccagaaccaatctcataatgagcaccataaatttacaggcagagaaaccgtaaaaagctaaatccgttcaatccatagaggtttgattatgttatgtaccttgtaaagcagcattgtaggaatagaagactgtgttgctaacaggtccgaaaagaacctgccccatcattattttcttaaaggttgtcaacacgtcgcgctttggcaatatcttcgaaagataactgaaccacagatgctgagacggcccgagaaatatcaacccaaagctcgccattctcgctgttcttatcaagtcaaaagaaccagttggctccattgtgatcatctgttgaagaatttagagagtcaacacaaataaaacaaaacaaaaggttctctagtttcgctctaacatattactgggggaagagcaccacaacatgatcataaaaagactcaaaagagaaatccactaatgacaagaagaaaaacagagtttacaagaaccccaacacacacacctaaagcttttttcaccttagcaataagtattcacaagagataataacaagaagattagactattcggattggagtgtgagttttctgagtaatcaaaccaatactaaattcatccattattcagtacagaaagacttcaaattcacaagagtacaatatacagattcagtaaacactgtaagtacagtctcacacatcaaagaacaacagttgagaacacagactaaaccaaaaatatgagaataacaattcattaaaaaacaccaacttttagtgctatctccacctattctttactaaagtattataacttcttccactagtaagattatgatctagtttcaaatcaaatttggaattgtcttggtataataacaaatgaagattagtcttttcttcctaaatcaagagataaaattcaaaactttaacaaaattctctaattagtaatgaaatgagaaagaaccctaaattccaaaaactacaaagattcaaaaaaaaacctgagaagtgagatctgcagccatatagatgacagaagtagtgatactcttagtcataaaaggatgtgattcgagctttctcaaataccatcgtagaaacgcaggttgtttcgaagaagaagacgaagccttcgtcgttagatttcgcgacacggagaaaacacgagggattacgaaattcccagttttgcgtagctcgtgaatcgatcggccggagaatccgagaatcggtttccgaccggtgaacactgttttcaagagagcattgttgatcccgtgaagagagcgacgatcggagaagaaacgtttgctcaatccaacgatattcatcttcttttttcgccgatgcttcgttaatggcggcagcttacactgtacttttgatgtatctctctctctgtaccagaacttttagtctcaatacacgcaaacaacaaacagtgcttaaccaaaaccaataaacgacataaagtttgatatatctctccacgcaataaagcaaacgacagcgtttttcgtattccattaaacgtcatgcagtttttaaaagaacaccaataaacaacatgaggttactcatccataacaaacggtatcgttttttttcgatcaaaattaaaaacgacatacagtgctaaaacaaagctaataaacgacatgaggttagtttaggactaatcttataacatctgtttcctattaattcatctacgccgagagctctctttctctctttgccttccccagctatttcaatg

SEQ ID NO: 997 - DNA, 3000 bp, Unknown
  misc_feature (1)..( 3000): cDNA_ID_2045232_gDNA_ID_1620345_Annot_ID_154141 3000 nt of promoter + ATG
atacattcactgcataatattgaagattcacagttatagttttactcatgattactctttcattataaatatacaatataaatctctaattaattaatatctctctctctttttctgtttagatttttcagctcctccttgattttcaaaaccatggacaagaattttcgtgtcaacactaacgacgaacgtaacatctggttgtccacggcggtgaatgagaatctgacaatggcgtcgtcgtcatctcagccacaaccaatatcgtctccgtttcatcaaccagagaatcaggtcaacagagttaatcctggaagtcattattatgatttggaaaccctagaatcttcttttggtgggctttctttcaacgattcaagtgttggtcagaatggtgattcgattcacctccctcgtcgaaccaatcaggtattcactggcagtagttctggtggtgctggtgatgacaatggctacttgttacctccgatgggttctcatcaccaccgtgaattagaggagttgcaaaggcataattatctgaatcaactgagaatgtcgtatcagaacgattatgctcatcaatcttattggtataatactgatggtgatggtaatgggatgcttaataatggtttcttgaatgatgttccttcttcttcaagagaccgtgtctcagattactacactaatcgttttgggtatgaaggttacaactattggaggggtaatgaaggttttgactataatcaatgtcaggcctctttctctgcctttgctaaagacaaagaaatgagtgagaggttggggatgagcatctttcagggtactaaagagacagttgatgcgatttacaacggtctcattggcgatatttgtgagttgatggtggatccttatggtagtgatgttgttcagttgcttatgagaagatgcagctctgaacaaatcgttcagctcgttgatattgtcactcagcaaatgttccagtttgttaacatatgcattgattctctcgggtactacacacttctgattcttgtttaactttgacgtatgattatgcatttgttttcttgattgcttttaatttgtatttgtcttttttttggagatttcagaaccaatgctatacaagttcttttgacatgtattaatgagcgtgctaaagatcaaatcccgcgcatcgtggatgttgtaagaacggtagcacttcaattgtcaaagagcaaccatgccatctttgtgattctcgcatgcttccgtctatttcctttgcactgtagggtaagtatctcattcacagtaatactctgctttagttcttaaactactatgttaaagatctatatagaatctttgtttctggtcatggagttgttttctaattttgtttattgagctttaagtcacttatttttataccatatagttgatgaatttgagtttgcttgtggtacaagtaaaatgtgccattatagatcctgaatcattagttaaatcttctttactagtatttatgaaatgacaatctttcttctgtatctgcagttacttcttgaacttatcgttcaaaattgccaccagatagccattgatcaacacgggtgctgcctgcttcagctatgttttaacaaggaccgggttccaaatctagagataaggcaacgtttgattatggaagcaatcgctaatgcattgagactctgcttaaactgctacgggtaaacatgatatgaatgatatctttattatatactttctcatatatgattccttatattgttttactcacaagtatgttctccttcagaaactatgtggttcagtatatcgtggagctcaataatcgttatttaatagacgcgctcgtgagacagctaatagggaactatgcacaccttgcccgcaacaaatatggaagtcatgctgtgcagaagttgttgaaactaaggtggatcgactctagggttattgtaattgacttgcttagagagattgatacacttcttcttgacccgtttggaaactatgtcattcaaaccgcatggtttgtgtctaaggtaaggccgaacatttttttcattgtactgatcaggttagagactttggcgagattacgagaatcttgtttggtgtgtttgcaggacgatgtgcgccggatgttgaggtatcatatagagcgtaacattccaatgatgaggtgcaacaaatttgggaacaaagttctggagaaactcaatatctagagagagctgaatggtagaatgaagaatgtgtaacctaagaatgtgttttgattgattcattgtgttgtttttctttgttttttttttcttttttaggtgcgggttcttgatgtttttttttttagtttttgttaaatcttaggttagtcttaacacatcaagactatgctatcacaaaacagaatgtctttgtattgttgagatttactaggccaggcctgtttttctatcattgcttatttatgttaatttctatgttttgatgaatttgaattctctagtaatacatagacaacacttatagaaaatagtagaaaaatgtctctgttacacatatactatcgatttacaatgataaaatagtataaactattgtactaccaagttatttttttcttgtaaagaaatgtactacaaagttaaaaaccacatagttttttgaattgtttaagcgaaaaggaccatttgcatttcactttcttatgcggctgctagatgtcatcacattactaggccactatagttcacatttttaatacacaaaaacccacttggatctgtatatccacctggatcacatacaaaaccctattttccctttttgtctttaaccttctttaatcaccaagaacagccaaaagaccaagcaaatctcagatctttcatggaccacttctcttacaggaatacaaacaagatggtcaggacccacgttgttgtcggttccagaccctgttgtttctcttgtgcc

SEQ ID NO: 998 - DNA, 3000 bp, Unknown
  misc_feature (1)..( 3000): cDNA_ID_3060052_gDNA_ID_1620345_Annot_ID_154128 3000 nt of promoter + ATG
actagaataatatcgtggcctaatggtgtgtgcatctgaggaaaacaatacgttactggatcgaatcctcgtggacttactatcgttattttattttagattttcaaaacgacgtcgttttgtctgaaacagaacatactaaacggaaaattaacgctgtgttttttttgttaacggaaacttaacgacatgtctaaaatggcgaagtcaacgaaactttactattttattaaagtcaaacaaaactttaggatgttagtggcatttttgaagttcatgtttttttcatcccaaatttgaaagttcatgctttttttgacatttttcccatttacaatttgtaaagtagtcaatttaaactgtttgattatacctagattgaacaatatttttagtgtacatatgtaaatatacgctgtgtatattggtacactaaaaagtataattaaatagtaaagtgattattttctagaaaaaaataaagacgctctttcaaccattattatgggaacattaattaattatataggaatatcaatgtggaaccccaataagaccaattctacctagcacaaatgcaacaaggaaagtacttccaactgaagtcgttgttacaagccaagctagaggggttcaacaccactactaataacaagaagaccaacaaggacaatttgttcaaaagcatcaattaaccaaaacttccaaaggcacatatctcttctttaaaaccagtttaagattgtagatagaacttctagtgcaaagagttgtggaggtacaaacagaaaactatgcaaacataggaaagaagtttggaaagatccacattacgatcaatggagtttaaaacgataagctagaagggaagataatgcgcttaactcagtaaagataatagacttgttataagcttaaattgcatcgagttctaagagtctaacatagattcttctcggaaaaccggagaaaaaaacaagaaaatattttaaatttataattggtcttttccaagagtgaagaaagagttgataccaaattttgatcaaaggccattttggaattttgattgaacatgtttttttttttgtttttttttttgtttttttgtcaaggagtatggtatttctttaagataattgaattgctaaggaatataaaaaaagaaagaagaagaagcatgtctgattttgttttaattattttaggggtataatgcaaattttgagaatagagaaaattgattattttttctaaaatatttgtaagtaaactcattatcttcacgagggatcttaaatatttgtaagtaaacggttttgtccggcaattatttgtaagttctaaaaattatgatcacttaaaaacgaaaaggtcccactatgtgtcttctccacgcaaaagaaagtttcattttcttcattttattttttatttgtaatgcagtttcttattctaatgtaaattataaattaaatatttccatgtcccttattatactcaaatgtatataaaattttagtggccccataagaatctcttataacatgaatgataaacgatgacataaactaataaaaacattatcgtaattacctaatggttaatggtcaattttaattttatttccatacttcagatttgacatacaattctaaagttttataagattaataatctgtataatgtttcatatgattaataatgtttataggtttatacagtaaaaatgttttgacacacggattagctagcaactatgatgggtaaaccacatggtccattacattgtaaaacatatatatttgaaattgtcccttttctattcgacacttgtattacttgtaggaaattaaattttagtttaagaaatacatataaattaaattttagtttaagaaatacatataaattaataccttaagatattaaatatacatcaacattttcattagtattttcgcaaggaatcataataatagagacgaccatgtgaactaaaactcgagtaaactattcttccttttttatttttattttgtaaatccttaatctattcttcttaaaatataaaaatccacattatctgtcaatttttttttttttttggtgcaaccaattttctctcaacatttatcaaaagaatcttcttgtttggaaatcaaagaaaatcttgttttaacaattctatcatcaaacaatccgatccttcacgtgcttctatttacgtcccctatttgcttgggactagaagatatgtatttctaatttatcttcaccccaacccaatctaaccacatccacttggcacttctgagctgtcccttcccaccttgtcttaaccaataatagtggactcttcacaatttttacattttcatttttacctcactacttctctcttatttctttaaacccctcaattctttcgattggctccatcagccccatttaaaaataaaaattattaacttctaaacttttttgaatattggacaaaaacaataaataaagattattgactaactaaaaacatgattttaaatcattgtaggttgcatcttttttctcttacaaacaaatagttttggaaccatatacagtttttgagttaaaaaatagttaaaaaacgataaacatatgaatgtgaaaaataaatcaaaatgttgagtgtgtagatgaacatctagataaagaactaaaaaaattggacggctttaacaaatgtaattgactcttacaaattttattattttaattttcaccccactatttctcacttatttctttaattccctcatctcttataattgaccccactagcccattaaaaaccaaaaataactattttaaaatctttttgaaaagtggacaaaaattaattaataattaattaggaacactaattgagttttcccctttatatacaccaccatcaaatctctatctcgatcaaaacaattgtctacattcatcttcttcttcttcaaacaaaaaatg

SEQ ID NO: 999 - DNA, 3000 bp, Unknown
  misc_feature (1)..( 3000): cDNA_ID_3060056_gDNA_ID_1620345_Annot_ID_154126 3000 nt of promoter + ATG
agtaattcctagagatttcaggaacagatcttataatgtctatcaatcttcttggcgttggaccttcagtctcttgtaaagctctaatgcttcttgcaaatctcctctttcgtttaaatggcgacgacacaaacgttccgaaactctggcactgatgatggttaaggactaaactgttcaagttggtggagatgaaactcaaagaatgtgccatcctgaaaacaatatccaacaaaccaagaagtttatttcgtgcaacaatttctactctcttttcattgccatttataataaaccatattcatcattggttgctgcaaaaaactgtaactcaaatcttacactacttaagaaaaaattaataatgcaacgcaattatattaaactccaatggagatataaattggcttcgaaattgaggtaattgcgatcaactcttgaaattagggttacatttaggaaataaaggtgaagtatctatactatgaaaatcaatacagccatgggaaaaggaaataccaacacgagggagatcgaagaagattgcttggaacgaattaatgggagccaacaagggattgaagccgtttttcaaagtctggatttttgtttaacaaagggaagaagatgagaaaaatcgaagaggaagccactgaattgggccttcaactgggtcgaatagtttagattagttagttaattactatccaaattttcactatttcagagaagattcgaattttggatcagaaatattggattattttgggaaattttaagtattatatttgttgtgttgtatattgttgggccaatgggcctactttagatatcaacgattcaaaagttaaatacacgaagatctaacactttcattcaattggaggtttctacacttcccgtaaaaaacataaagatatttttccatatttttcagttaagctgtggtccggatttttttctttttttgagtttaatgctaatatccgataattctaaatctggaaaaacccacaaaaactcgccattaacttacgttttgatgaaccggttaaactggatggatgtggattttaaaaaagatatttgattttagaataaaatattgtattttaaactttatatagttatttttacaaattaatttactttttaaactcatttgatgttttagattttggtaaaaacttgacaatgtcgtcttaaaagaatgaatgtaatggtgagagagacaaccgatattagttgttcaaattcgcaatgtttttttagtttattttagacattggtgattttctactatatttgttacggttttaaactttaaagttggatttaaaaattttagtcacttttttttattgtttaatttcatattttgttaaacatgatatgattgtttttgttttttttttatatatttataaaacctatatcatctctattaatattaaatctattacataaatttaaacacccaaaaatcatcttgttttttgttttccatttctaaactctttcttttattccaacaagcataaaaacctaaaaatataaaaaaaatcaccaaaaatcatcttgtttttacttaaaaggttcaaatttcggtattaaaaaaattaataaactgatgaaaatataaactctatatgttaaaatacttgcattgaacttattgaagaaaaatgtttcaactgtttaattaacccaattaggatgttgaaaactaaacaaaaaaaataacaaagattttatggtgttgaatctatttaacatactattttttgttttttggttcgcacatgtcatgtgtcaccattttattctgtttgtttttttttggtcaaaaacaataattattgaaaaattgatacttctcaagtcttcaaatacttgttttccatctttctttctttttaatatcattttcgtcattttagtgccaataacctgaatataattcttcagagtagaaatacttataaacactcgagaccatataaaatgttttccaaaaccatatagaaatcatagtgaaaacaaataaaaataaaatgttaaataaaatcaaaagataaaattatttattaatcatctccgatttggcaactgcaagaaccacacaaacctcttgaaaccatgaaacttttcaaattggaatatcatttcaaattttgtttgtacaattactaaaccacgcatgcaagtttatcatacattcatactagtatttgaaggtcatattttctgcagcaaaatttaagttgaatgaattagtatccaaacatacaattctgtgaatctgagttttaaatcaatttttaatacataggaaagtaataaatcaaataattgttttagtaatatgctaaataactgtactttcattatgtgaaatacatcaactctcaccaaaaaaaaaaggaattacatcgattattatactattttcatttttataatagaataaaatttaatatttaatgaccgattgtaaaattattctacgcttcgagacatgtggttacagctatcacccattaatatacaatatcaacttgtttaatctcggttgattataattaatatactcttaaaatttcgttgacattaggggacagcacgagagcatagttgttatcagatccaataaaacttaacatacagctagaaatactgagctagaattaaatatgatgaccaactgtaaaatatattcttcaatagatacttttaaaattatactagtgtttagggacatggttacagctttcacccatttatatacttgttcaaaattaatagactcttaaattttcgttgacttaaattttcgttggcctaaattttcgttggcctaaattttaaaagctgaaggaaattgagtattaatgaatcaccacatgactttgcctttatctttatatatataagcacaatggttgtggcaaatcaatacatatcctcacccccaaagttttttgatatctaccattaatg

SEQ ID NO: 1000 - DNA, 3000 bp, Unknown
  misc_feature (1)..( 3000): cDNA_ID_2129056_gDNA_ID_1620346_Annot_ID_154157 3000 nt of promoter + ATG
aaacaatcaaatctgagaaatcctcagctaccgctgctatggaaacactgaggataagaaccaaattttctaattaaattcaatcgaaatagattccatcaaagccgaacgaaataagctcacctgtgagacagattcttccactagcaactccagaaaactccacagataaaattgtttaccagaaaacaaaaaactcagcagatagaagagattgtatcaattcatcgaagctagatcgaaaaaaaaaactgtgtaggactttctagagatgttcggcagaagacgatgaaggcttcctatttttttttttttgacaaacattttaaattttaattaaactattgtttttgtttcgggagaatcaaaagacaagtgaccatgatatcaacacgtggcaactaaatcaaaaggtttaacaggcttgggtttttaatatcagaattcgtggacgagagagcagtgtgagatcctatcagttccagttttattattggtacacgtcattagtaccttctcgaaactgggcacgcctcatcttcttattggcttacatcgtaatgatgacatcagcctttatttacgtataacaaattaccatgcggttaaaaaaaacaatagttatatgggccgaagaaagcccaaagaatctttagttgtttttccgatcgatctgcgagtcgagtagtttttttatttgccggcgccgggagagatcctttgatctttttccgatggaggagcaattcggcgggagcgatgagagatggaaaggatcattggagaatataacggagatggcatcgaatctcgattcgcttcagaaacttctcctcaagaaagcagtcttcgttgaagaagacactttctctagagcttctctcgtctccgagcaagcccgaacaatcaaggttaatcctttttcctgtgataaaatttgaaattatagagcttaattgtctgaattttgagcttcttttctttgactttgatgattgcttctgtgatttgtggattcgatctagttgatcacgatcgcactttttagtttgctttagtactactatagctcagtgtaatagtgtgattctggaattgcatttgacggtgaatttgggaacttgtagttgatcataaattttgaatcttcgattttgtgatctgttaatggtacaaatgatcaccaaatccttgaagactggacttgaggtttcactatgaaaactcccaagtgcaattatgtgtattaagtagaaattcttcatgttgtaagtaaaaaaggactgtgttacatgtttgagataagggatagtttcagattgtctcttaactctgttcaatggtttgttttaggttcttgagcaaagagtacaaacactagaaagagaactagatgctgccattacagctgctgctcatgctcggtctgagaaacgccaagctgagtcctctcaaaaggctgctgaatcacgtgcccaagatgtcacaaaagagcttgaaaacaccacaagtatgcacttgataatcacttcttgagttgatgcctggtggcaccattctctcccgcacgtttatctgcgttccagtttcatattcactctcactcactgacttatacaactcttggtttcagaggttttcaagctgcatatggaagagcttcgaggaatgcaagaacagatatccaaacgcgataacgagatcaaactcttagaagctataatccaaacgctcggcggcaaagagcggttgggaaaaagcgacgtgaatggatgatgatgatgcgttttttcacttgtaaaggtttgtactcctgagtttgtggagatgtatcacttcgaagataaatgtatttttgtctgtctatttggtacgttttagaatcttgcctgttctttcaagaaatgaatgttacatgggcctgaccctataaatgggcctaatgtgaatcgatcgatactaaaaatgggttttataggtgtgtgtgtgtggttttcacacgtttgccgccgatagtgctgcgatgccatccagattcagtaacgcggcatctccaggactccagccgtgtggagcaagaaactacgtaaatttgacagctgaagatgcaatttcacaaaaagagaataaaagaaacaaaagaggattatgaccaatttagaaaaaacttttttcaaaaaagtgatgcttcatggtttttagcgtgtggggtgtctctctatattatctaattttttggtagaaactagtgtacaatatctaattttgataaaataccaatgaaggaagttttgactatttctgattgctttatttttgtttgctttgttatagtatatacaagcatataatttttatttttaaggctcgattaagtaaggtaagaaaaatgaggattgtgtctaaaactaggtgggggtgaaccaaagaaatacgtaaagtaataaattaatgcaaaggccattgttgtttacttcacgctgcgaaagtggttaaaaagaatctatggctactaattattctcttacaaattttctttatacatttggataaaagcaagaacataaacactttctgattatgacaaagaatctgaatttcattttgctgttactagtcaactctagtcaattgtcatgcatatcatagcacagtaaaccatctctatcgactatcatattaataaagagtcactaatcaaatttccaatattcaaaaaaatatatcgtaatcatgcaacatttaagtttcgataatcattcaatacgagtatatccaaacccttgatatatgaaatatgtattcctacgaaatggccaagtttattattccacttttaactaatttcaagcttatcacttcatttttctttttgctaaatcctgcacatgattcaatgttcttgaccccatttgacgtacaaatacaatataacgtgcatctatttatacgtgtatatatatgcaatcaaacctcaaacacaaccacataacaaaaaaa

SEQ ID NO: 1001 - DNA, 3000 bp, Unknown
  misc_feature (1)..( 3000): cDNA_ID_1471148_gDNA_ID_1620346_Annot_ID_154162 3000 nt of promoter + ATG
agcttacgataaacttgctctaaaaagaatgtccactttatattaatgattagtttagtcgaatgatttagtgaatacagtatcattttatattaaaggagagctttaaaattgtgagaggttaattatgtttcgtatcacgattaacaaaaagttaattatgttttttggccgacgttccaaattcacaaggaccagtacatttcttgtatctatcatctcaaccttttcggtttatgtcactggataagatacatgtacaatatataaccaactgatataattagtgtcacgattattagacagtgttttaagtcacaatatttactaaactactaaaaagaattgtttaacgcggaattaatgaatttgatacccataaagaaattatctaatcaaatcaaatcaaatagtaagagaaaaaaaaaatactccaaaaaggagtaaaagagaaggcaaagggggagtctcacgtgcggatgggaacttgcgtagtcggcacggaaagcgacaaaacattggtgaaagccacgcgcttctcgtactagttctttatatcacccacgatcatcctttagcatcgtgacacgtcatgtcttcttaacacaaacgtgtactactattgatgtttgtcccaattatttgtagcgacattttatgagacatctctcgctaggccgtctcaattatatacccgacctatattaatcttacacactcattaattgcaattgtttgttttttgtatgaatatttattgcaattgttatacattgtcaaaataagatatttagttaacaaaggagttggctagatttcataaaattgggaagtaattagaaacgaatgcattgcatggttggctaggtactttgattttgacacggaactcagcctacttgctaattaaatcataaaatatgatgtgtgttcgatgatttctaagtacatcgataatgtgttacacataactacataagcaagagaatttgaatatttttgaagggaccattcacatataacgattatagtaattatgcatgccccatatatggggaattagtcaacaaagttcaccgactaaaatatttagaatgttaaaatgctaattcccctccaactcctaactttttgactctgggggaggggttttgtgtgccgacccactttggctcgtcttgtttatcgtacttctctatgttattttctaggtaatacggaaaaaaatttggatacaatggaaaacaagattagtagaaaacttttttttctttttttaaaaaagaaaaattttacttgttgacaagaaaagataagtttttttattatgacttgcaccagtttttgtgaaggcaaatgatatacttgttcgtacggaaatagcatgctcaatagtgaaaatgacaaagcaataattaagcataatagtttcgaccccgaatttttgttttatgaacaatttcaaacgaaaaaggtccaatttttttgacttttatatcactcgacgtataggaaaagatgataatgatagtcctagctcgtaaataataattatctgtacatattgaagcggacgtattccaaacttacgatactgtcatactgtgtaatatttattttcctagacttagaaagtgagatatcttccacactacacatatagccaattaattttcaaattaatactcaaatatatacaatcttaattcttaaacaaaaccaaacaatcctatttcgcgtattatataatcctagctacatctaagtaatataaacttagttaaatctaaataaccaaatgatgaagatactactttcatatgtaatctttgcaaacgatagatacaaacaattatacaagtggatatttgaattgggattatgattatcttttattaattaatccaatcttatgacgaacttatagcttatattgccgtggaccgaccgaccagtttttcagattattgatttggtcacaagaccaacccctacgtatacatgtattgtccccattatacgaccagacttgtcataaaccacacttaacagttaacaccacctaagattaaaaagtccactttctctgaatcttccccatatttatgtaatttcgtaaaagattttgtttaaaaaggtgttaatgagttatatatcttaaaactgatttgcgattttggaagtatattgattttcagttaggctagagtttgtatttttataattttttcaaatgttcaaatttattgatttattataaacttagaaaccggatgcaaatgatctcctccgatttccggtttgtctgttttttcgtatcaatttttctggtacaattcggttctaatgcgttgcataataaaatccccagtcagacgtcagctaaccgagcaacataatgggcccttttaatatctcagcccattagtttcaatcaaaaacccaataaagtagtttcttaacagtcttttaagaagaagaatataaccgataaatcgaattttcctggaaaaagttactcgaatttcgaacatcctgtgtgttgtgagctgatcgaagagtatagaggatcgatgaatgtttccagaaaccgtttatatagatagagtggagtgatgtagtatgtgacgaaaagcttcgaaatgtgttcgtcattgcttagaaagatcgacacaaaattattttttatctataaaaaaaggtagccaagtaaaattcgattacgactctggtttttttttgtataaaacgaagatgtgaagagtgaagaccgagagagatttatagcagaggaaagtgaaatcatgaaagggattctagggtttgaatacgggatagttcaggcgccattaggaccagatatctccggaccagagcttgtagccgccgtcgctaatgcaggagggattggtcttctcagatgtcctgattgggtaaattgcaactttttcgttttctttgatttttgtttatagatatattgaattatgtgaatcaatg

SEQ ID NO: 1002 - DNA, 3000 bp, Unknown
  misc_feature (1)..( 3000): cDNA_ID_2129087_gDNA_ID_1620346_Annot_ID_154166 3000 nt of promoter + ATG
cctcctcctcccccatctccgtctccgtctccgtctcctcaaggagcgaaactcatccctctgattctctcaatctccgtcggcctaatcctccgattcgctgttcctgtaccagaaggagtcacaccacaaggctggcaattactctcaatcttcctctcaacaatcgctggtctcgtccttagtcctctcccagtcggagcttgggctttcattggtctcaccgcttcaatcgtcaccaaaacgctttctttctccgccgctttctcagctttcacaagcgaggttatctggttgatcgttatctctttcttcttcgctcgtggattcgtcaaaacaggtcttggtgatagaatcgctacttactttgtcaaatggcttgggaagagtactttaggtctatcttatggtctcacgcttagtgaggctttaattgctcctgcgatgcctagtactactgctagagctggtggcattttcttgcccatcatcaagtctctatcgctctcggctggaagtaaaccgaatgattcttcttcgaggaaactaggctcttacttgattcaatctcaattccaggttacttctttgttttatgtcctttgattcatgatttggctccaattattagttagtagtgtgatcctgagaaacaaagtttgaactttgcatcaatttgtgtcttaatctgagggctgctttgatgtttctacctcaaatgcagaatctttcatttttcttataggttgctttctagtttagatgaaagattctttcttgttgtttgtatttgacttgagagacttttgaagttttcgaattttgttctgcttctctaattttgttctgatctttgacagtgcgccggaaactctagtgcgcttttcttgactgctgcagctcaaaatttgctgtgtctcaagttagcagaggagcttggagtagtgatctcaaacccgtgggtttcttggtttaaggctgctagtctacctgcaatcatatcacttctttgtactccacttatcctctataagctttatcctccagaaacaaaggacacacctgaggctccaggtattgctgcaacgaaactcaagcaaatgggccctgtcactaaaaacgaatggatcatggtcggtacaatgcttcttgctgtcactctttggatctgcgggtaagtcttagatcactttcatgttttgtatcataccgttgattaaaaaaatctgagtattccatgggtttaatattatatgcagagagactctgggaataccaagtgttgtagctgccatgatcggtctctccatacttcttgtgctaggtgtccttaattgggacgattgcctaagcgaaaaatcggcatgggacacattagcttggtttgctgtcttggtgggaatggcaggacagcttacaaacctcggtgttgtaacgtggatgtctgattgtgtagctaaagttctacaatctctctccttgagttggcctgctgcgtttggacttcttcaagcagcctacttcttcattcactaccttttcgcaagccaaaccggtcatgttggagctctcttctcagctttccttgctatgcatatagcagcaggtgttccaggaattctagctgcacttgctttagcatacaacaccaatctttttggtgctttgactcattacagtagcggtcaagccgctgtctactatggaggtattcccattgattgatgaacatgatagagctctctctttatagctaagtctctttaacttttgcgtttgcttgtgtttctttttgcagcgggttatgttgatctgcctgatgtattcaagattggattcgtgatggcgacgattaatgcgataatctggggagtagttgggactttctggtggaaatttttgggtctctactaagagctcctcagaagaaagttgttcttgaagaagctttgcaaagtccggtacaattcttttgttgatcattcggttttgaggcttcatttttttctacttgcaattagagaatcagacaattctttgtcaaatagatatacagaagatctatctcgatttgttctctttatgaaatatcgtgtttctttttcggagaaagagtaagatacatgatgaaaatctgttttgggggcgtttttgttaaaacgaaaatgtctgggtaataaaaaacagagaaaatagtcataaaaaaggagtgaatcttcaaattacctattacagaaggactgattttcaaatttcgagagcaacgaacatgaagctaaacgcaaaataagttagcgccacaagcatcactctcattaattgtgctttgatgatatgatgtttttatggtacaatccccaccgttttgttgttttgttattcaacaatgtctatagaatatgttataaaaacttgaaaaataacttcacaagggaaatcctacaaaaaaattataaaataaatcagcttatttgacaaatttgaaataaacttaaggataaatatcggattaacgactaggattcttgtcactttttcttaagatatatattttgatatatggtatttcatgttcaccatcattatcttgattatgatcattatcaacatttatgatctcagaaactaaacaagtcttcaaacaatcatgaaaatcaagagagagtatttatagtaaacaaacgatcatgagtttttacttgattcagtaaataattctgaattttcgaaaagataacacatactgtaatttggtaatttcgttttatggtcatacaaaatacaaacaagttaatccaaatgtgaaaattttgaatacttcttaattttaaagttttagctaaattatcttttaattagtaaaatatgaataatggggaaaataagaataacgtttttatttaacttttttttataaagacaacaaacagagagtttcgctcctccggtgagaaagtaacactttgatatcggagaacacacactctctctcccgggatg

SEQ ID NO: 1003 - DNA, 3000 bp, Unknown
  misc_feature (1)..( 3000): cDNA_ID_2129094_gDNA_ID_1620346_Annot_ID_154168 3000 nt of promoter + ATG
gatcactactccaagctcctctgctaacttgagacacagcaaattttgagctgcagcagtcaagaaaagcgcactagagtttccggcgcactgtcaaagatcagaacaaaattagagaagcagaacaaaattcgaaaacttcaaaagtctctcaagtcaaatacaaacaacaagaaagaatctttcatctaaactagaaagcaacctataagaaaaatgaaagattctgcatttgaggtagaaacatcaaagcagccctcagattaagacacaaattgatgcaaagttcaaactttgtttctcaggatcacactactaactaataattggagccaaatcatgaatcaaaggacataaaacaaagaagtaacctggaattgagattgaatcaagtaagagcctagtttcctcgaagaagaatcattcggtttacttccagccgagagcgatagagacttgatgatgggcaagaaaatgccaccagctctagcagtagtactaggcatcgcaggagcaattaaagcctcactaagcgtgagaccataagatagacctaaagtactcttcccaagccatttgacaaagtaagtagcgattctatcaccaagacctgttttgacgaatccacgagcgaagaagaaagagataacgatcaaccagataacctcgcttgtgaaagctgagaaagcggcggagaaagaaagcgttttggtgacgattgaagcggtgagaccaatgaaagcccaagctccgactgggagaggactaaggacgagaccagcgattgttgagaggaagattgagagtaattgccagccttgtggtgtgactccttctggtacaggaacagcgaatcggaggattaggccgacggagattgagagaatcagagggatgagtttcgctccttgaggagacggagacggagacggagatgggggaggaggaggaggagcgttgtcttgcggtgcggcggcgattcgtgtggagaatcgaggaattggtttgagaagagggaaggagagaggttgaacggagagagatcggagggagattgttgaaggcggagatctcgaagaggtacgacggagaagagagagacgtgagggatggtgatgatgatgatgggagagtaaggtggaagtggcggtggtggagagagagtgaagagcgaaactctccatcgccggagattatatatatagagagagtgtctgtgacggcgaagtgtttaattttcgtcagtcgctcgctgtgtttttgtcgccggagagatctcgatcaatgatgatgagtggatgtgtgaagctgaaagtgaaattacactgagaatctaaaaagtcttcggttctaaccaaacaaaccgaaaccatggtaaacttgaaccgaaccactttttctaatttggttcatttttctagccctggtttaccaaaatccgaattcttttggaggcaatcaaaactcaaaagtcaaaaacactatcatcataaattcaaaatcatcgggtgggtattattttttaaatcatcggtttatcttaaatttttgaaatgatatgttttttttttttttttttggaaacttgagaacatctcattactaaagtgtgaagctttgtctgatgtaaaaccaaatgagagattcatgtcatgaaaattgaagagtagaacaatgctccgagtcaagaatgtagtgtcaattcgacggatcatggaagtactgatcttctttgtcttaaacactatatgaatctacccttaaactaaaataaaaaatacacatcctattcgtacgtcccattgttagatgtcaccaccaattttcgtgttaagaataccaacgacgcatatataaactattacatcatctaacaaaacttatagtataaaaccaacaaaaatgaaaaaataaacttaaagtatgttgtatatgtaaattacaatatattatcttgaacgacgaatacataatgttgcatgggtcatccgaccaaagaagcgaggatggaaaaacataaaaatgtgcggttggtatgtcacgggaatgggctgccactcaaatagtttcctatatcacaattatcacttatgatcccaaggattgttatttggaatctcggatggtcattttttttttgacattttcttcataccatacttagcatattagaggatacgatgggatccgattccgatttgtaaagtggaccatatttgtttatcgagttattagcatagtcatgagatcacacatcaatgtaaaaacaataaagaatgttaaatatgtcgtatgtgattgaagttgtactattgacttagatctgtttacctgaatttatagtctaaatagttttgcagtattttcaatcttttgataaaaaacaaaaatcaattgaaactatttttttcatacaaactatatagttgagcaactttgttacgtcaaggcagagacacatcttattatcagtttttttcaacatctgaaaatttaccactaaacttcaatctctatactagtagtttctgtactaatgacaaagatttaaacgacgattattttgaccagtgtttgaagcatatgattattattctcttttgtctccaaaaacataattagagaaggagacttttctttggtgtaagtgtaactaaaaagaagatgaaaatgaattgaaagtctataaaagttggctttgaagagaagagagccaagcaagtgtcttatctcctccacaccgaatcacagagatccttaaattcttcatttttcccaatttgcgccgccattaaaaaagcttagctaatcgctatcgtcatccgcaactaacaagacccatcctctctcttcgctacacttttccccgcatcttcttcttccaatctctcctattaatcggtactgtgttttcttctgtgatcgtgagattagaaaatctacccaaatttttgattttgcgataagggtttttcttaatttcgtctacggatatagaaa

SEQ ID NO: 1004 - DNA, 3000 bp, Unknown
  misc_feature (1)..( 3000): cDNA_ID_3060096_gDNA_ID_1620346_Annot_ID_154173 3000 nt of promoter + ATG
ttgaaataatatctaatgtcataacttctcaaaattgatagtatgactttaatctactttttgtaacccgtaggtggttagtgcttttgaaagtaatcactttcacatttcagtatttatagagaactcatttagatgtaacagtaactcaaggtttctataattggtatagaactaatcacattggaaacatttatgaattgggggaaagaaagaggaataatatgaaagaaagtaagagaaaagatatgcaagattgagaagagaagttagggaaatggacccatataagagaagcctcaaagaggaaaagaaagcaaagataccaaaagaaagttaaatgcaatgtacatagagatgattcaacattttatcaaaaaacagacaggcaaagaagaaggaacgaggctttgtcatagttaatgacactcactctccaacttgtccctccccaaatcttatatatatattttatttttttctctacttaaccaactcatatcttcactaaaaaacatactacaatgtcagtaaactaataatgtttaatgtaaaatctaaaaaagacagattgaattatatgataagaatgggcaaaatttatatcactaaatttcaaaaaaattatgataattgaagaagcagagagttttaagcccattacatcacaggctgttagatatatgagagactttggttttgaaaatctctctgagaaaatagacaattcagagaaagctccaattctcgaagcatcccatgtggggataatatctccctctctcttctctctctctttgccactctctctttcatctttataatcaaaactaatcaatctctcttctcttggaaactctttgtttcactttgatcttctcatcctctatatatcttcccttggtcctttcttgcttccaactacagagagtgttaacttgtgtatgatgtgggaatctgagagcgacggtggggttggagttggaggtggaggaggaagagagtatggtgatggagttttgagttctaacaagcatggcggcgtcaagactgatgggtttgagcttagaggccaatcttggtaatatcctcacactttctctacagtctctgcaaaaagaacatgtttccttgttaaggaagttaatactcatatcaaaaacctttgcctatgattaggtttgttgctacggatatccccagcgatcttctggttaagatcggcgacatgaactttcaccttcacaaggtaacttcatattcttgagtcaatatttttaagctggaactagagaaagtttatggatttaaaagtgtttctttcctttcagtatccgttgctgtcacgtagcgggaagatgaacagattgatctatgagtcacgagatcctgacccgacgatccttattcttgatgatctacctggaggaccagaagcgtttgagcttgcatccaaattctgctatggagttcccgtggatctcacggcaactaacatatcaggattacgttgtgcagctgagtatcttgagatgacagaggatcttgaggaagggaatctaatcttcaagacagaagcttttctcagctatgtggttctgtcttcatggagagactccatcttggtcctgaagagctgtgaaaagctctcaccttgggctgagaatcttcagattgtgagaaggtgtagtgaatctatcgcttggaaagcttgtagtaatccaaaaggtattagatgggcttacacagggaaagctccatctccatcaacaacaaatttcgcgggttctagtccgagatggaacgaatcaaaagattcaagtttctattgtagtccgagtaggaacactaatagccagcctgttcctccagattggtggttcgaagatgtctccatcttaagaatcgatcatttcgttcgtgtaatcactgcaatcaaggtactactacacataggttatttttctctcaagcattttcacaaacacttggtgtacatatctcaatcctctatccattgaaacaggtgaaaggtatgagatttgaactactcggagctgtaataatgcattacgccggaaaatggcttccgggtttgatcaaagaaggaggagttgcaatagctccagcaatgtcctccgccattggaggaggattaggtttaggaggagacgaaatgagtataagctgcggaagcaacagcagcggaggaagctccggaccagattggaaaggcggtcttcatatggttctctccgccggaaaaacaaacggacatcaagattccgtcgcttgtctcgccggactaggaatcagtccaaaagaccaacgaatgatcgtcgaatctttaatcagcataatccctccacagaaagattccgtcacttgtagcttcctcctccgtcttcttagagcagcaaacatgctcaaagtagctccggcgttgatcacggagctcgagaaacgcgtagggatgcaattcgaacaagcgacgcttcaagatcttttgattcctggttataacaataaaggagagacaatgtacgatgttgatcttgttcagagattgttggaacattttcttgtgcaagaacagacggaaggatcgagtccgagtcgaatgtcgccgtcgccgtcgcagtctatgtacgccgatatcccgagagggaataacaacaatggtggtggtggtggtggtaataatcagaatgcgaaaatgagagtggcgaggcttgtggatagttatctcaccgaagttgctagagatcggaatttgccgttgacaaagtttcaggttttggctgaggcgttaccggaatctgctaggacttgtgacgatggactatacagagccattgattcatatctcaaggtatatatatattgaaggtctttttggtaaattcgtagaatagttttcaacatttttttggcttaattttgttgtgataggcgcatccgacattatcggagcatgagaggaaacggctatgccgagtg

SEQ ID NO: 1005 - DNA, 3000 bp, Unknown
  misc_feature (1)..( 3000): cDNA_ID_2129131_gDNA_ID_1620346_Annot_ID_154179 3000 nt of promoter + ATG
ttgcggttaatatatgttatggcagacaccatcctctgaattggttagcttttggtctaaatggtgcagagattgtcttcaacccttcagcaactgttggtgaactcagtgaaccaatgtggcctattgaggtttaacttctgattctccactttactcaatttgaagctttctttctttagtaacactgtctaacaatgcaatatgttccttaaaacttgcaggcacgaaatgccgcaatagcaaacagttactttgttggatccattaaccgagttggaaccgaagtattccccaatccttttacgtcaggtgatggaaaaccgcaacacaatgatttcgggcatttctatgggtcaagccatttttctgcaccagatgcttcttgcacaccgtctttgtcccgttacaaagatggtttattgatctcggacatggatctcaatctctgccggcaatacaaggacaagtggggatttagaatgactgcaagatacgaagtctatgccgatcttttggcaaagtacataaagccagacttcaagcctcaagtcgtctctgacccattgctccacaagaattctacataagaagaaaatttcactctgtgaatcttcaaagaagaaaagtccaataatcaatgttcaatcatttgtgtaaatgtaacggtaactgaaaatctgtttgtagctgaatatatgttgatgccaaaaggcagctcctttgcttttataatcgaaccggtttataattgaaccggaatccaattccaaaaataaccgtaatcagatactatgaactgtggggttttctactcctcgtcatcttctattcgttatccgttttgaagcgtactcggatgggattgagtttcgcagatgctttaaattctagaaaataatgcaatctcttaccttaactcggtacccaactccaatttccccgccaagactcaatctttacccgctaagacaaatcgcagcttctgttctctctgctccgaccgccggtattaaccgtcgcgatatggcgtctcgccatcagtcaacttcctttaagccccttgccgttggtcggaatttgaccggagatgatgatgatggttactgtactcttatagactttgcaggtaacaaactgctctgtctgaacgaacttagcactgtctcgataattcaagttaatgtgttgtctgtcatccattgtcaatctatgtccgaaaatccgtaactttagtggaaataccctgaatttagcatctaaaatgtgcttaattgagtaagacaaatcttggaaactctcttagacgaacaatggttgggttttgacttttgacggttcctctgtataagcagtttgattgaagtcttaaatttattattattttaagttgttctatgaaattttctgataggtagtggaggaggagaagggaaaaatgtaggagaggatcttgtggtgttgctttaccacttacaacatgcttgcaaaagaatcgcttctcttgtcgcctctcctttcaattcttcactcggaaagctctctgttaactcctctagtgggtcagaccgagatgcgcctaagccgctcgatattgtctcggtctgtatcttattactctcttttttatcatgattcatatcaagattcaatcttacaattcatgtttccgttttgcagaacgatatcgtcttgtcctctcttagaaactcagggaaagtagcagtaatggcttctgaagaaaacgatagtccaacttggatcaaagatgatggtccttacgttgtggttgtagatcctctagatggatcacggaacatcgatgcttcgattcccacgggaactatatttggaatttacaatcgtctcgttgagcttgatcatttacctgttgaagagaaagctgagctcaattctttgcagagaggcagcaggcttgtagcttccggttatgtgctatactcttcagccactatcttctgtgttacacttggatcgggaacacacgccttcacgctagaccattccacaggagaatttgttcttacccatcaaaacatcaagatcccaactcggggtaaaaagcgtctaatgacacatatgacttgatccattgcgacattcctattcatggctctgaacaacctgcattaatcgttgttttttgtatgatcaacaataggacaaatctactcagtgaacgatgcgaggtactttgattggccagaaggtttaaggaagtacattgacacagtgagacaaggcaaaggtcaaaacccgaaaaaatactctgcgcgttatatttgttctctagtagctgatcttcacaggactctcttatacggtggagtggctatgaatccaagagaccatcttcgtttagtctatgaaggtaaccctttggcttttctcgtggagcaagctggtggcaaatcctctgatggaaaaagagggatactttcgatacaacccgtgaagcttcaccaaagattgcctctgtttcttgggagcttagaggatgttgctgagctagagagctatggagatgtgcagcagactgtgaaccctggctatgaagtttaaacaactcctctgtttcatattatctgtaaaaacaataaatgaatcgatgttagatttggttgcttgtaacattatgtattaggaaagttagatccgtgtatatatctgtttatcaagattcaagatcgactggtataatcacaattcacaagtttattatgtttctttatcagaagcaatctttcttcgatttctaacacagtcccactcccataaattggttgttagatttcggttaagtttagtaagaatttttaaaatcggtacggtatggtttgccgttaaataataaatatataatgcggatatttggcgcaagttagcaacttagcgttaaagaccaccaaagacttctctcaagtcctctgcgccggaaaccgccgtgacgagattggagagggagagagaggagagata

SEQ ID NO: 1006 - DNA, 3000 bp, Unknown
  misc_feature (1)..( 3000): cDNA_ID_2129123_gDNA_ID_1620346_Annot_ID_154177 3000 nt of promoter + ATG
tcaagcccagacttgtagctatcaaaatttccttcgcatttttgaaagatacatggtcaagaagacagagcaatatagatacaacgaaccttcttcatcacaattacagaaaaaatgattatgtagatatcatgtttagagcctaaacggctaaacagttccatcattaatgtcttaaacaagcttttatgaacagacaatggaaccttcactgcgcaactggagcgtataaaagccagataacgtgcacgaatcacctcttggatagcttctgtatcttctagattctgcagaatactcattacaggtaagtgagaatacctagctactatgactacacaaaaaaaactctacatagccgtttaggtctttaccttagaccccagcaagaaattcttgacaaaaagcttacttgttttccttacctttcaaagcatcaaggatgaatgaagcaagcaatgtgtgttgtcactttccctcttcgtttgtcagtccagaacacaacaagttatctagtgaatgaacagaagcagcaattacgacatggaaaccacctatgttttgcaatttgctgctctatggccttttgagttggaggaacataattcttttggaacaaaatgaaacctgagcaggataagtaactcactttactttagataaggcatttggctagtaaggttttatagtctaataaacccgagaaagataatcttaatgcctttactcagaactcagaagcagaagactatataccagaaagcgacgaaagcatccgaattttgagcaaaataacatcaacagattccaactacagggattccaaggaatcaaaatgctagtatttccactacagttaaacatcaacaggaaacataaaagctaaggcctacaacaacgaaacacccgcaacctaaacaaagagaggaaaaagccttacttcactaagtagccttgatcttatcatctccaacaacagaaagtatgggcaaactattcaagaattcatcaagtccctcaaagaacccaatcccttccatattatctacctccctgttacttccgatcccattgcctgcatttcccccacctgccacaccaggctcttccacttcattactaaactccacattcaaatccaacctccccaggttcttagcgcctgttcccattcgttttctagtaatataactccctggtttagacataaccccagttgaagacccaacagccgcagcatttgaagcaattgaaaccgcgtgattgctagcactactgatactttctacattttggacttcttcaactccatgtttcttgttacttctcacatatgtttctttccctttcccaacattcgtcttcttattcacttgtaccacatcttgccaatcaccatcatcaccagcgtcatctccatccgaaatcgcaacataaatgtcatcatcgtcatagtaaatcctaggaggacccggttcctttctcttctttggttcaccatccaacttttgcagaggacaggcaaagagaggtgaaataggtgaccaacttggagcttgaaattcaccggaaaaccccaatggaaacaaagcccatgagcaaaagtaaacgtcttcgtcgtctttcttatccaccggaggttttggtatcgtcacagcttgaaacgctcttctacattcttgacatttcaaagtacattcttcgtaagccttagggtactcaaagagtacaaagcagtaagggcaagcggtccagaagctcgtcgccataggatccgccgaggtcccagcctggctctgagaccgcggtggcggatatacggcggtgctactgctaggttcccactggaaattttgatgcgattgggtttgaggatggaatccagattgaccgagttgactaagttgcaattctcggtcgtagaatgatttcttgaacggatcagagagaacgaaccaagcatcggagacgattttaagagctcgatcggcgaatgggagacgattaacggaaggattgaggagaagagcgagtctacggtactgagtcgcgacgtgttcagggttttgagctaaacgaccgagtcggagaacggcgtaccagtctggcaagttggaatcacctaaacgagtctctccggcgagaagaatgtcgcagattgcgaggatgtagtctgcagcttctgctcgggtcgggtcagcttcgcatgcgcggatcgcaaatgtctttgctccttgaagatcactagacgctagaagcttctccgatgttacaagccactgatccgcctccactctgttaccaccaccaccgccaactccgccgcgtccgcctaccatatcccctatttctttttgttccctttcgtttttcctctctccccgttgaatttatttattattttatcggtaaagagtaaatacagatctaaaaattaaaaggacgaaaacatgatggatcgtcaatgggccggaacaacaacatgatggatcgtcaatggcattttggtccttttcattttatataatatgtgcaatgtgatggatcgtcaatgggccggaacacttttttctaaatttttcacttacaaaaaatattaataaaataagatgtaatattattctcttaggacagtttctctaaacaattggaaaagtttcttgtaatctctcaaatgagagactcactcatctttactgagagatttttttaattaaaaaaaacattatttactattttatttttatttttgtagatgagagatttgaacgaaaaaccaccaatacagatgctttttaggatgttgtaaagcccaataattcttttaagaattaaaatataatctggtgggctttaggtctggacagcctaactaaaataaaatattacattccgattcccagaaaataattcgtaatcaattgaccaaaccgatcgatcactgttgtcataaaagtcatcgccatcttggtttcgtgatcgaaaaagactcgtgaaaaa

SEQ ID NO: 1007 - DNA, 3000 bp, Unknown
  misc_feature (1)..( 3000): cDNA_ID_2129101_gDNA_ID_1620346_Annot_ID_154170 3000 nt of promoter + ATG
atggctctgtatagtccatcgtcacaagtcctagcagattccggtaacgcctcagccaaaacctgaaactttgtcaacggcaaattccgatctctagcaacttcggtgagataactatccacaagcctcgccactctcattttcgcattctgattattaccaccaccaccaccaccattgttgttattccctctcgggatatcggcgtacatagactgcgacggcgacggcgacattcgactcggactcgatccttccgtctgttcttgcacaagaaaatgttccaacaatctctgaacaagatcaacatcgtacattgtctctcctttattgttataaccaggaatcaaaagatcttgaagcgtcgcttgttcgaattgcatccctacgcgtttctcgagctccgtgatcaacgccggagctactttgagcatgtttgctgctctaagaagacggaggaggaagctacaagtgacggaatctttctgtggagggattatgctgattaaagattcgacgatcattcgttggtcttttggactgattcctagtccggcgagacaagcgacggaatcttgatgtccgtttgtttttccggcggagagaaccatatgaagaccgcctttccaatctggtccggagcttcctccgctgctgttgcttccgcagcttatactcatttcgtctcctcctaaacctaatcctcctccaatggcggaggacattgctggagctattgcaactcctccttctttgatcaaacccggaagccattttccggcgtaatgcattattacagctccgagtagttcaaatctcatacctttcacctgtttcaatggatagaggattgagatatgtacaccaagtgtttgtgaaaatgcttgagagaaaaataacctatgtgtagtagtaccttgattgcagtgattacacgaacgaaatgatcgattcttaagatggagacatcttcgaaccaccaatctggaggaacaggctggctattagtgttcctactcggactacaatagaaacttgaatcttttgattcgttccatctcggactagaacccgcgaaatttgttgttgatggagatggagctttccctgtgtaagcccatctaataccttttggattactacaagctttccaagcgatagattcactacaccttctcacaatctgaagattctcagcccaaggtgagagcttttcacagctcttcaggaccaagatggagtctctccatgaagacagaaccacatagctgagaaaagcttctgtcttgaagattagattcccttcctcaagatcctctgtcatctcaagatactcagctgcacaacgtaatcctgatatgttagttgccgtgagatccacgggaactccatagcagaatttggatgcaagctcaaacgcttctggtcctccaggtagatcatcaagaataaggatcgtcgggtcaggatctcgtgactcatagatcaatctgttcatcttcccgctacgtgacagcaacggatactgaaaggaaagaaacacttttaaatccataaactttctctagttccagcttaaaaatattgactcaagaatatgaagttaccttgtgaaggtgaaagttcatgtcgccgatcttaaccagaagatcgctggggatatccgtagcaacaaacctaatcataggcaaaggtttttgatatgagtattaacttccttaacaaggaaacatgttctttttgcagagactgtagagaaagtgtgaggatattaccaagattggcctctaagctcaaacccatcagtcttgacgccgccatgcttgttagaactcaaaactccatcaccatactctcttcctcctccacctccaactccaaccccaccgtcgctctcagattcccacatcatacacaagttaacactctctgtagttggaagcaagaaaggaccaagggaagatatatagaggatgagaagatcaaagtgaaacaaagagtttccaagagaagagagattgattagttttgattataaagatgaaagagagagtggcaaagagagagagaagagagagggagatattatccccacatgggatgcttcgagaattggagctttctctgaattgtctattttctcagagagattttcaaaaccaaagtctctcatatatctaacagcctgtgatgtaatgggcttaaaactctctgcttcttcaattatcataatttttttgaaatttagtgatataaattttgcccattcttatcatataattcaatctgtcttttttagattttacattaaacattattagtttactgacattgtagtatgttttttagtgaagatatgagttggttaagtagagaaaaaaataaaatatatatataagatttggggagggacaagttggagagtgagtgtcattaactatgacaaagcctcgttccttcttctttgcctgtctgttttttgataaaatgttgaatcatctctatgtacattgcatttaactttcttttggtatctttgctttcttttcctctttgaggcttctcttatatgggtccatttccctaacttctcttctcaatcttgcatatcttttctcttactttctttcatattattcctctttctttcccccaattcataaatgtttccaatgtgattagttctataccaattatagaaaccttgagttactgttacatctaaatgagttctctataaatactgaaatgtgaaagtgattactttcaaaagcactaaccacctacgggttacaaaaagtagattaaagtcatactatcaattttgagaagttatgacattagatattatttcaagagataaacatatgatgttgtagaaattgtattcacaatagttttcaatggttgttggttgatgacaaagataatagaaggaaaagttagaggaaatttaaaagagagcattaaaaacaaaggttgttcatacatacataaatg

SEQ ID NO: 1008 - DNA, 3000 bp, Unknown
  misc_feature (1)..( 3000): cDNA_ID_2129091_gDNA_ID_1620346_Annot_ID_154167 3000 nt of promoter + ATG
ttgaaatcctcaggctttgaatctcttgatgcaagagacaatatggttgttgccctgtcacgagctgatactcccgttgttgtaccatgttttgcatcctacgaaggcgaaagaatagaacaaacaaaattaaataaaaaccacaaggcccaagatcaaaatctttattagagaaaaagacataccacagtcactgtaaatgcagtagagagcttttcttcgttttccttctgattcaccattagaggaaggtgcaacctctcgagatcatcttctttcatgctcacacaaactatcccagttccatgtctcacaataaaagccatagcttcaggtgttgctaactgagcagccatcaccaaatccccttcattttccctatcttcatcatccacaaccaccacaagctgcaacattaccgccaaatcaatcaagggaaaaaagaaactaaaaaaggttgactttcacaaagcaaaagaaaaacgaacctttccttggcgtatatcttcaatggcctcagggatagaagagaaaccaggagttggtaaatccaactcaaagtcatcatcttcagcaacaaaaccattggctggtgcaggagcagaatcagcagcaagtgttccaagtgaaaccgaatcagcctctaatggctcttcggtccgatcatcaatgagagacccatttgagagaggagtgtttccgttggtgaatgagagcagatcatcttctctagagatcactgcagccttaacttttccagtattggttttaatggaaaaggttgacaatggatggttagatggtaaagtaacacgatgtagtccatggagtaatgtagtagagctttggcttagtctgcacagaatcatcaaatcattaaacgagagaagaagcaaagcattcgatatgtgaaaactatgaatctcaatgtcatgatcgattttaaatcacaaaatctaaggtcactgaagcgcaattacaaatccttagatcaggatctaagctgagattagaattgaatatcttctcgtgtcgatgcaaaatcatatttccccaacatcaattaaccaatgagcaaaaacgaattggtaacaataagagatttggaagaaaaaacctcaccttgagcgggaaagagagatggtggaaggagatgatgaggataaattgatggaagacattttctatatccgtagacgaaattaagaaaaacccttatcgcaaaatcaaaaatttgggtagattttctaatctcacgatcacagaagaaaacacagtaccgattaataggagagattggaagaagaagatgcggggaaaagtgtagcgaagagagaggatgggtcttgttagttgcggatgacgatagcgattagctaagcttttttaatggcggcgcaaattgggaaaaatgaagaatttaaggatctctgtgattcggtgtggaggagataagacacttgcttggctctcttctcttcaaagccaacttttatagactttcaattcattttcatcttctttttagttacacttacaccaaagaaaagtctccttctctaattatgtttttggagacaaaagagaataataatcatatgcttcaaacactggtcaaaataatcgtcgtttaaatctttgtcattagtacagaaactactagtatagagattgaagtttagtggtaaattttcagatgttgaaaaaaactgataataagatgtgtctctgccttgacgtaacaaagttgctcaactatatagtttgtatgaaaaaaatagtttcaattgatttttgttttttatcaaaagattgaaaatactgcaaaactatttagactataaattcaggtaaacagatctaagtcaatagtacaacttcaatcacatacgacatatttaacattctttattgtttttacattgatgtgtgatctcatgactatgctaataactcgataaacaaatatggtccactttacaaatcggaatcggatcccatcgtatcctctaatatgctaagtatggtatgaagaaaatgtcaaaaaaaaaatgaccatccgagattccaaataacaatccttgggatcataagtgataattgtgatataggaaactatttgagtggcagcccattcccgtgacataccaaccgcacatttttatgtttttccatcctcgcttctttggtcggatgacccatgcaacattatgtattcgtcgttcaagataatatattgtaatttacatatacaacatactttaagtttattttttcatttttgttggttttatactataagttttgttagatgatgtaatagtttatatatgcgtcgttggtattcttaacacgaaaattggtggtgacatctaacaatgggacgtacgaataggatgtgtattttttattttagtttaagggtagattcatatagtgtttaagacaaagaagatcagtacttccatgatccgtcgaattgacactacattcttgactcggagcattgttctactcttcaattttcatgacatgaatctctcatttggttttacatcagacaaagcttcacactttagtaatgagatgttctcaagtttccaaaaaaaaaaaaaaaaaacatatcatttcaaaaatttaagataaaccgatgatttaaaaaataatacccacccgatgattttgaatttatgatgatagtgtttttgacttttgagttttgattgcctccaaaagaattcggattttggtaaaccagggctagaaaaatgaaccaaattagaaaaagtggttcggttcaagtttaccatggtttcggtttgtttggttagaaccgaagactttttagattctcagtgtaatttcactttcagcttcacacatccactcatcatcattgatcgagatctctccggcgacaaaaacacagcgagcgactgacgaaaattaaacacttcgccgtcacagacactctctctatatatataatctccggcgatg

SEQ ID NO: 1009 - DNA, 3000 bp, Unknown
  misc_feature (1)..( 3000): cDNA_ID_2129068_gDNA_ID_1620346_Annot_ID_154159 3000 nt of promoter + ATG
ttgattagaggttgagaaacagaaatagggacttgagagattacggaaggtgatgttaaggacgagaagtgagtaggtgtcgctgatatccggtggacctgaccttccgaagtgcgacatggttttcccgccggcggagaaattgggagcgcgagagagagacgaagtgaaattaggttaaagcttttctgaaacaatggaatctactagatacggggacattttttttaaagcttgacgttgttgttaattacatttgtaccccttgacgaagacacaaaaaaaagaagataatcgaaccggatgataccgagtttggttcgtatcggttcagcagcgattgggacggttgagacgcaattttattatagtctgaaacatttttaccaaaacaattctgcaatttacaaacaccggtacatctctaacacctttaaaacatattttagcacattcaaacaaattcatatccaaaatcattaaaaaaaacaaacagaaaaactccaagtaggatactcttttgaaattggtttagtgataaccaatcggagctgctgcttctcgcaactcttttccttgattgcgaatgtcctgcaaataactcacaatattaacaattcaaaaacaccacacaacataacaaatccacagatttttaaaattcattgatttatattaaaaactatgaacttgtatgtatccacacaccaaatgtcgttgattctactacttatatcatttgttattttaatatcaccgaaatggacccgaagaaatgtatgaaactcgggagttttggaaaaaaaataaaagggttgttgttttagactcacagaagcaaaatggttgacatctcgatgatgagcttcatcagcacgaatcaccgttacaacatctttcaacgtagcatctttaggcaatctccaataatcaatagcaatcgcgggcgcggcaacattctcgatcttcccattgtcgatatctttaagaaactcggtgtaagaatgtatagcttcttcctctaaatatccaacgaccctatgagctaaccgcggggaaatcacgtaacaaacgaaaaaagagttgaagaatattccttgaacaagcatcactagaagacgctcgtaccatttgggtttgactaactccatcatcgtcattagatgcatcctctcgttctctgcttcttcgagtaatgctttgatccaaccgccgctatgttcgaattttcggattgattttaggtgaagaagcattcctccaaccattcctggtactgcagctactgtctctagcatcatcgctctgcatccatatcgtctctgctgaccaaacatatatttaacattaaggaacaaaaaatgtaaaacattagcatgtgaagtgaaacagtgaatccatacgtatgtatatatgtgaatcatggtaggataatatgtgcatacaaaattacaaaccaaaccaaaccgaatcagctaaataaaccaatgaacatattaaacgaatcaacgtttcattttaaaatttgaaattacagtcatgcctgaaaaaatatatcggtgggaatacggaggagcttgacaatccggtaagcgactttgtcggcgatattcttcggaacgtggtgcttcttcaaatctatcgacagatttgcttgataagtctcccatggctgttcaaaatatacttaagtcatatatctactacatataaaagagtgcttaatttgtctacgaactttgggatgtgtataagtttaccataaaacagttccaaggccaatccgatccatctttccgagtaattttcatctttgctgtctctattccccaataacttggaaccgctactgaccccccgccgttttgacccttctttaccgtcaaattttcatctttcttctccatcgccgatgcagaactcatacccatccacctcaagttaaaatttcctattcaaattttagaaatatacaaatcctaattatcatgtacaattgttataaggttgtatgaggatcatctacagatatgcacaccttgcacatgcttagagccgatcttgaaatcgccaaaaccgccgcaccagtcatgaattcgcatcggtgccgttatctcatacggacttttcataacagaggtggaggaaacagaactcacgaacatgttacagtttcctctgccgcagacaagcagaactcgtaaagctgctttcgtaatgagttgactcatcttacgacactctctcgtatacttatagattcacttctcagataagaggcttgttctctgactgaaagaaaatgattcaactctgttttttctcgaaagaaagtgtaagtaggggaaacaagaaggaaataaaaaatgacgttatcagctgatacgcggcgaatactgctgaatacacgtggctcatatccaactgttgctttacttttaagataactatttttaaaaaaacgaatgcacattttttaagtttgtccgaatcttgaagtggcgttcagcagacagagcgcacgtgaatctggtcttgactgaactgtccggtccaatatcttttggtttggtttaattcggattaatagattgtctccttaagaaaagttcctaaaaggaacattaattataattacattcatgaatcaatttagcaaaagtacacacattgaataaaaatttcatccacgtgtccacgtgtaaggtttgtattggataaaaatgttttggttcactaaatttataaaacaacctccaccatatcggcgctttccttccgatttcgtcctcccccagaaaatagagaggaaaaaaggaaaaaaagtaatcatcgattcgctttcacaacctggaaagctcgaaaagaggaaaaaaattctaaagagcttatcaagctcacttcatacacctagatcgatttagggttcgtttgatttttttttttctgtgattgcgacagctagagatctatctctggtggattttgggtttatgttcc

SEQ ID NO: 1010 - DNA, 3000 bp, Unknown
  misc_feature (1)..( 3000): cDNA_ID_1444123_gDNA_ID_1620346_Annot_ID_154161 3000 nt of promoter + ATG
gtgatcaaccattgcgaagaatcgggaatcggtcgagcaatttggcagttattgtcagcgatgaatgaaattccggtgagttctagaaagtaccaagtggttcgatcgttggcggagagactaatcaacgataatcaaggagaaaactcagtcgccttgttggatttgaaccgtagggttttaaacgcgtcgtttcgtacaactctaagccggttagagacggcggttgagcgtaaccctaaccggagagatatagatgaaccggttcgtcgtggattaaaccgggttgtcagagctgtggttagagccgtgggagatgggtttatcggttggggtggagaagagacggcggatcagacggcggaaacgtcggagaaactggcggcggaattgctttggttggcggagaagatggcggtttatggattcgtggatgaagccgttgagaaatgggcttcggcttctaacttagcttggcttgctctttcgtgtgagccacgtcttcaatgctctttgatccaaatctctggtaaatatttatttttaccgcatgattttttaatttttcgtaaatatggtaaatactatatagaataatctctttcccaatctggaaaaaagaaagaaaataggattatactctttttctgttcaggatattctttttttattttgtatgataaaaatattttgactttccaaaacaaatttcatttttactgtgaagccttactattcaaagaagccaaggacattaaaaagggaagcgaagaagaagaaggagaggaagcaaaattgagagagataaagaagaagatgcttatttcgtggattccgttgctgtgccgagccagcaacggagctgataaaccggtgttaagaagtgcggaacgagcgtatctagagaaagtgttggagaagatgatatctgaactaaaagaagaggagcaagaacgagttctctcactctggcttcaccattacacacattgcgcttcctctgactggcctgacctcaacggctcttatgttcgttggtgccattcttctcgccagcttttgctcttaggctagtcgtctcatatatctccttgataaacacaagtagaaagttgctacaatatttgcaatagcattgatcttttgtatgtcttaatcatatgtactaagttttgccctttagaaatcacttttatcaataggaaattacttttgtccacccactgatctcatttatgttaatttcctccagaaatttcttgcatgttttgaaggtgttattataccttagggatcaagcacaaaaatgagttgtgggttcaatgttggacatggcttgataaagggccaatattgataaaatcaggtcctaacgctttgtctgttatcagatccaaatccagtccattcataccaaatttcccttgtgctagctttgggatagaaatcaaactacataatcacttacaaaaaatgaaaattgcataaaaatttagattttcatatagtattttataagagaaaaagggaaaacttaaaattaacaaagttactaaagttactaaactagtacagtaattaagtttccttgtgaaatttattttattaggtgatacttataaatatatatataatattcaatactgcctcattatccacgctcaatggtcgaatcgcacggtttagtaccattcggataacgaaaacgggtggcatgaatcctacaaggaggtagcctggaggagtcaattctgatgaagaaagttgataagacgaagagtattaagaggcaacatactacaattcctctccatgtattattcatctcgtctcaaacaacacgaaaactttttattttctttttcaaattttcttttttctgtttttgttgtttgattttcctaaacagatgattatgtgtttaataagaaatgtaatttactattaatagtctggagtgttttttttgtggtgttttttttgtgctaattttaaggttatgaaataggatgcatggtttacgccttaaacatagtattatcgacgattggttatgaacacaagaagaatattgaccaaaaatctgtaattcctacggcctatcaacaaaaaaaaaagaataagaagtaattgatgatctttcaaatgaatgttaaatgtttccaaaataaatatatataaatgttacagtttcatcgctaaatggcttgcaattcttgtgaaagtcaaagaaaattctagcgggtatcattacaatttacaatttagcctagagatcatagtatttgtgattactaaatacaaatgtgaccttatttacgtggtatgtatataatttttggaatactaaattaagtaaattttatttattttcataataagttaaccactaatcgtctcaccttaatcacatgaatttgcattagaacaaaaaaatattacataaatttttaggaacacacaaaaaaaaaaaagatgaagtatcatcgagatagttttatgtcgcaatagttaagttttaaacttaatttattttgttcattagtaataccttttaactgtaagataattttattaaaaatgaattattcgtttgtgttatgaaatataaatgcttaaatattatcaaaagtcatactttttaattattattttccaaatgataagcttatataataagtttaatggaccaacccaaaattgtaaggaagtgactttagtggaatagatacgcgatagactttgacaagaaaaaaaaaaaaaaaaagatacgcaacagagttcaataataaaataaaataaaaactttcaaagaatcaaattccgttccgaattgattcacataacaacatgcatggaagcttaataacgtggacaaatcaacattccacattttattcttttcgtagataagaacgaataatatcattctctttataaactcatcactcaaatgcatttgttgcaattgcaaaaagaaaaccaaaacaaagctcaatc

SEQ ID NO: 1011 - DNA, 3000 bp, Unknown
  misc_feature (1)..( 3000): cDNA_ID_2128985_gDNA_ID_1620347_Annot_ID_154197 3000 nt of promoter + ATG
aaaagatcgaccttgtttagattcagatattgatacataaaatgtgtagtgtccgtgcgacatgtctattagtggacttcttcgaattagctatggcctatggactatggagtatgttggtgtaactgtggatctctcttacattcttttcagaaatatgttcgtcgtgtcttattattagctgtctatctacaaaatattttgaatgtattcttgtttgttaaagaataaaaataaaaatataagctctaattgatatgcatatatttaattagttgtgtctcttctgataaccgatattgtagaccaccccttatgacacaataatgctgataaaatatttaaaaaataaaaataaaatattcgagaattattgtcatgcatccaatgattcaacaagattttatcatttaagctctaattgagtattcttgaaatagattacccaccaaattaaagtgagtgagaattacttcaagaataccacaagtggtggatcattgtgctgttatactttatatagccgaaaagtactagaacagaacaagatgatacattattgattaaatgggactcttgtgtagcaaagatgaatatccaaattcagattaatatttgaagtctacatattttcaatctctagcaaagatccatatgtcactgactactaaactaatattatacttgattactcttctttggtttataaaagttattattgagtatgctttctaaaagagttgttatgatatatttaataaatgatattttgtttaattacgcagtaaaagaaactgtaaaactttctattcttttgtcagaggaaaaatattagtgggtgcaaattgttagatagtggagttgaactcctcactttgaaggctttgcgggagaatctcaaacaactttgccacttaactgatttttctaaaaactttttttggttcaagaagatatgcttgtaagaactttacagtagagtttaacgtgttatctcactaattaaaatcaataaaatcacatgggaatactttttgccagtattttttgatcatttgttaataaactatataccaagttgtgatcttttgtgtgtgttggttttatcaatttcctaagaattataaatatgcactatatcttgtcagagcttatcttcgacaacaattttaggtttccaactgctcgattttacattcttgtgctttgcaatgggttgatttatcttattgcatcgggaatcagaaaggatccaacatgtaccacaaccacatgagatcttcacgtcagtccctcgtagtttacatacgtgcaataacttttttactaagaacttaaaatccaaaatataatatgttcgtatagcggatgttggaagacatatatattaattcatacacaaggtttttagacccttttaactttctatccttttttttttttttattacaattctacacatatagtttgatataaggacgaagacttttttttgataaaggatgtaaacttataactaaaggtgagcacaaacttgtgttttcatatatgtcgtcctgtttttaatttcaaacctcatcccatataaaattaatatccaacaaaaaatttgtatcacaaaaagcaaatttttgctaacaaaagaagagtttttgaattatcaaagaaaaaaagatttttgtatcaaaataaattcgtcttggatcacaacggtccggttcaccagtccaaataacttcaccattgtagaggatacttgatcccaaaagaagtgatatatattttaatttggtagacctttttttttgctaagatatttgaccccaaaaaaatgtatatcaccccaaaagacgtttctgtagacttataattattattagaccgcaatcattttttcttggtatatcaaatcctccagacatacatttatcagtgatcttacaatcacatttttttttgttaaatggtttttccttgtttaatagttaatcaatgatcatactagcttcccttaatcatactagctataaaattaaagatgaaaaaaggttgtgcctttaaaatcaaatcctccagacctatgctataaaatatccgatacattttaaaatataatgtcatagtcatggactcatagttcaaccttcactagtattaaaagtcagtaatattattttgaaagaatacaaatagcaatagtataatgatagtagcattaattattgattgaatgaatcaattattattttagctgaacaatttttgtgaacaccgtatctcctagaatcgataaaaacttttacccaaaatctcaatgttccttgatctcgcaagaaacaaactaaaacggacaagagcatcagaacagtgtcatcactcatcagtatatgcatttccgtgtgaccgcgaactctgacagatgctcaactgatccaatgacaacactgcacgtggcatttccccacagtgacttagtggcctgtgtatagaaagatttaaagaacgtgtaatcccaaccattcctccatcaaagatatatcgatcatttctttttgacagcaataatttttaatcattttatctgtctctctgttctttctctctcccgcagtccctctcgtaattttgctatataagagcacctctataatctgtgtgagacagaattataaaaaaaaaacattgatagttttgtatctaaactcaatatataatgataacacgttcacgtgttcatcgtcaaaagagtgtctcagtgagtacaatcttcaggtgtcttctagttttgatcagacgctctattcaattctcttaattagtcatatctttctttcttttttcctcgtttcgtgttaattttattttaaaacaaaggattaaagagtcgttctttcttttggtaacatggagccttaatgatcctttgttagctctagctaggattttacgtactacttagggtattcaaactaaaataaaatcaagaagaagagcagagag

SEQ ID NO: 1012 - DNA, 1915 bp, Unknown
  misc_feature (1)..( 1915): cDNA_ID_3060141_gDNA_ID_1620347_Annot_ID_154214 3000 nt of promoter + ATG
ttggagttgttcaaagtgtatctcctaccatgagtattagaaggagaactgacaatgagatgattcctaagagggatataactttggctgatgagtcaaggaaaactgttgtggtgtccctgtggaatgatcttgcaactggcataggtcaggagctactagacatggctgatcagtcacctgtgattgcaatcaagtctctcaaagttggagattttcaaggtatgatgtatttggtattattgaacagtatggataaatcacacttgtttgaaccttttgctcatagaatccaatctctccaggtgtttcgttgtctaccatcagcagaagcaatgtggttattaacccggaatcaccagaagctaaaaagttgaaatcttggtatgccttttggattgagccagctgataaaataaaatgatgaaacttgtctctgttattcaattaccattctctttgacattggcaggtttgattctgaaggcaaggaaatatccatgtcttctattggctcagggatgagcccttctgccaaaaatggatctcggtctttgtatactgaccgagtgcttctctctcacatcacaagcaatccatctttattcgaagaaaaggtactaaacactgaaattcaaatcctgaaccaaaagtgcttaattatagagttatgaacttattatgaacttggattttctggatcagcctgtatttttcagcactagggcttacataagcttcatcaaaccagaccaaacaatgtggtaccaagcttgtaagacttgtaacaagaaagtgacagaagcacttgactctggttactggtgtgaaggatgccagagaaagtatgaagaatgcagcttaaggtaagagagatactcttttgattcataatcaaacttggttataatctttacttcctttctccgacatcttacaaatctgtccactttggttgtcgctaggtacataatggcggtgaaagtcaccgactcatctggagaaacttggatttcgtcattcaacgatgaagcagagaagattcttggatgttcagctgatgagctcaacaaactaaaatcagaggtaaggaaacaaaaccctacatgagcttttattaattgtcagaacttaagaagtatagtcatcattttgatgtttacatttgtttacaggaaggtgaagtaaatgaatatcagacaaaactgaaagaggcaacatggtcatctcatgtcttccgggttagtgtcacacagaatgagtataacggtgagaagagacagagggtaactgtaaaaggagtagctcctcttgattttgctgctgaaacaagattgttgcttcaagacatctccaacaagaacaaaacatctcagtagtagcttttacttctttttttttctctattggcctaaaaaagtctcaaaacttttccttgtataatataagcctttctgcaatttataaaattagggttttgcttaaaatttgttctttacattgtttacaagccatccatttcggtatcattaacaaataaaaacaagcgatctattttgtgtttacagctgtagagtcatagagagttgtgtaatttgtgaagataacttttcatcgaccactgtaatttgtgatatctagtccaaactttaagaaggcaggcccatatttggcccaattaggttattaaaataacaacataactaaaacccttgatagctagaactcgctctcttttctcagccaacaaacactagtctcttctgatttgtaccctaacgtttactcgacttatctaaagccgtgaacctcgccggaattcttaaagtcgcgatttttccttaacgccgtttgattcccttacggcctttgaggtccaggagatagcaaatttgttggtgagtactgaaaaatg

SEQ ID NO: 1013 - DNA, 3000 bp, Unknown
  misc_feature (1)..( 3000): cDNA_ID_3060145_gDNA_ID_1620347_Annot_ID_154213 3000 nt of promoter + ATG
caataccttaattctatatatgtgtaaaaatattcagcaaagtaattaaagggacaatatgatttttagggttttatggatcaataaaataagaaaatttgtcttgattgacctgaaataagaattcctcaacccattggataaactttaaaaagtcaagatttctcaaatagatccaattagttttactgacttattgaacattattaatgtactgattaagaagtagttcccgcactaaagtataggctatatgcaatactaagactgataaattggtagacaaaaaaggtaaacaaaaaatgcaacaaattgtcaccttaacacaattttgtactaagcttttacttttacgactctccgtcacacgcgttctcattctcttgaagttggacctcttctacgggttttctagttaagccatctcttcttcttcaacatcagaactacattttccggattcaaagtgtttatttcaatcggcggcgttgaatatacgagatggtacgttgtctccggatgtaagagagccttttttaaacgagttaagaggaatgaatataatcaaatcaaactgaaggattaataattggttaaattatgagctattccggtttggttaagtcccaccgttatattcatctcctctgaattaatcaaatagtcaattattctaattactgttgattgtctcattaacttggaatagaggaggtttggactctatttcagttttaaaaaactgctaattaaaccagattaaaaaacgaaactactaattaaatacagtaaaatttcgaagacgtttcaatacacaattaataccatagctcaatttcttcccctataaaaacagccaaggatcttactattattcatcattcaaagacaaactcgagaaaaataaactttgaaacttttttttttgtgttttcatcatggctatcaaaaacttgatttttattatagcggttatgtgcgtttttgtctccgtaaatgctcaactaccacaatttccttttccattttcattctaaccgatttctggtatgccaggattacctgatattacaaaatgtttgtcatccgtgatggatattccgggatgcattgcagagatttctcaatctattttcacaagaaaatttggtaacttaggtccggcttgttgcaaagcatttttggatgtcgaatccaattgcatgccaaaaattccattcattccgttatttccgccgatgctaaaagaacaatgttcaagaattgccggtgctactcctcctacaccaaaatagagtcttagtttatttttaaaacatataaaatatgaattttttgtcttttcaacttctttcttaaattttataattctcagattactcaacatgttttacttaaaaaaaaacgatgatacattaataacatttgagaagtcgtatttgtgtttaatttttagtcgttctttatttctaatgaataataccttcaaacatcgagtagataattaatttaatattgcaatatttcagaatttgttgttttcataaatcttttagatacgtcgtatagtaacacaaaatctgtcaacggtttataactttttatatacgacccaaaaccattctcaagatcaacacaagtaaatcctatttttgtaagtttctaataaggaaatgaacaagaaagacccaataattcaagaatgatgaagcccaaagtatgagtcttcttgcttcttgggccgaaccgaactgaactgaactgaactgaactaaagctaaactaaaactaaagttggtacggttccttctcttctctctctctctttctccgtctgtcgctgtctctctcgtcctctcctctgtttcgtagcttctgcagcagatctctctttgtccttctctctccctcagatcactgtaagtacacgacacttcacttcatttcctaattcgatctgtttcttttactctttctcgatttgcttccaatcttgatctcttttctctttctatatcgagcttgatctgactcattctttattatatacttctcttctcgattccttttttgtgaaaaaaacatctttaaaatttcatttttgttagttgcttcgtgtcttgattagtgttgttcttgtaataaatgttgtgatcttatattcattctagggttttgtgtgtgtgtgtatgagcttaatttcatacagaacagtgaaatcttagactttcgattagatcgttgacttttatctgaattattggaatttaggttattgaatcagtctttaggttattgatcaaaatgatttacttcagagaagattgtctcaataattactaacacagtggttgattattgataatgttattaatcctgagctatgtaaattttgattctcaccgtatatatatatattgagtgtagatggcacagcaggaagctagtccttcccctggtgctgaggttgttggtcgtgcctttgtggagcaatactatcatattcttcaccaatctcccggtttagttcatcggttttatcaagattcgagctttttaacccgacctgatgttaccggtgctgtgactactgtcacaactatgcaagtgagattatcattaagtctattactttaacaagattgctatgatgttctcttttgatttatattaacttggtttcgctatggatttcaggcgatcaacgacaagattctgtcgttgaaatatgaagactacacggctgagatagaaactgctgatgctcaggagtctcatgagagaggtgttattgtgctggttacaggacgcttaaccgggaacgataatgttaggaagaagtttagtcaatcttttttcttggctccacaagacaaaggatactttgtcttaaacgacgtgtttcgattccttgaggagaaagaggtgactgcacaagcccgctctgtccccatcaatggaaccactagggatgttcaggctcctattgaaccaggtagg

SEQ ID NO: 1014 - DNA, 3000 bp, Unknown
  misc_feature (1)..( 3000): cDNA_ID_3060162_gDNA_ID_1620347_Annot_ID_154198 3000 nt of promoter + ATG
atgtgtattgatcgtgacttcgttattgctcatataagtttatgacactatacggttatgggggaattgtgtcttggatcctcataaagttcattttctgttgtcaatttgatcataaaaactaaggcatatcaatggtttctaccttagcaacaaccacggtttgcttatataagcagtagtcacaaaatacgaaaatgtgtaggaattttatgggggaagatcttgattcgttgagcttgaaggagctccaaagcttggagcatcagctcgatgcagctatcaagagcattaggtcaagaaaggtaataggacaacatggatacatagttacatacgtctacatatgtatgtaaagctttcgatcgagaagttgagtttggcaaagaattcagaattttaaatttgagatgttattaattaactaatgtctgatgttcgcagaaccaagctatgttcgaatccatatctgcgctccagaagaaggtaaagtttcaactttttgtttagatagataatatatataacaaccgaaaagtattgttttcatatatatatataactatgtttgcaaccaatatcaaatcacaattaggtacatcgtaaaaaaatcattttgaggcataattctacttgtttcttttaaatcatcaggataaagccttgcaagatcacaacaattcgcttctcaaaaaggtaagtacaacttatttttgatataagtggttatatatgagtttaaaattgatagaagttgaaataattaactacagtatgtcatctcaccataattttttaaaaagattaggtttaacaatgttttatatattataaaagtatttaaaaaatatgtgactttactacatatataattctctaatttttgtaattaatcctattacataaacaaaatataatagcaaaaaaccggtactaatatataatggagaccaaatatatatttatattaataatgtttccataatatctgagtgaagaatttaagtagatgtaagataaaaaaaattagaaatggtttttagtttttttagcattagaaatggtcattatctaatcccaaaaaatggtcattatttaatcctctattgataacccttctaataaaaatcaatgttgagatcatgcagctatctagacgtaaactagttatacatatatcaaaagaaaaaaaaatgtttagatcgattttagtttaccttagttcttgatctgtatatatatgaagttgatataaattcttcgtaagactcaaagtggtaatgttttctaatatttgtataatttgtttctgacaactcagatattttatttatagaatttttgcaactgtagatttatgctggtatatattattactaactaatggcaaaacaataattttagattaaggagagggagaagaaaacgggtcagcaagaaggacaattagtccaatgctccaactcttcttcagttcttctgcctcaatactgcgtaacctcctccaggtctcgtctttctctctctcagtactagtccaaattagattaagaggttgattaattgtgccatgtgcatatatataattcaaatttgtacatgtatatctatgaatgattctgattaatttaattttatgggcagagatggctttgtggagagagttgggggagagaacggtggtgcatcgtcgttgacggaaccaaactctctgcttccggcttggatgttacgtcctaccactacgaacgagtagaactatctcactctttataatataatgataatataattaatgtttaatattttcataacattcagcatttttttggtgacttatactcattattaataccgatatgttttagctagtcatattatatgtatgatggaactccgttgtcgagacgtatgtacgtaagctatcattagattcactgcgtcttaagaacaaagattcatatcttggtaatgatttctcatgaataattaatgtaacttttactttttaaactgtggtgaacgcaatatatcaatattctatcatttgtaaatgcgatcactatgttttttatgactgatattcaaaattgctcaaatttagtcttcttgtaaatgtgctcattatttgcgctttaaagttgtcgcagcaaggtaccgcatggcacaaatgattatttgatttttgaaaaatggaaaaaggtttgtataaatacgataattgttcaaaatattcaaaaatattctaaaagtgattctatattttttttataaacaactgaatatggtatatgcatgtgttttaaaaatttataaaatattcagtgagaaaacaaagtatgtgattctatgatggtatataatccaaaaataattaacaactgaatatgatgtattatcatccaaaaatgtcaatgagcaaaattgttcttttactattcaaaatccaaacacaaggaatacaaagctattacgtatacaattcaggaatgtcctatcacaatatagatacaaccacactttgttcctacccttaaaagactttagaacacatgttcacgacttaagtaatattgtatggaggagaagagacttttgactctttcaaaatctggttcattgactaagagaaagaacaagaaatgtctaagtcttctcaacccctttcctacgttcaatagtaacgaacaaatctacattatgcaaacacacacacacacacaaacaaacacacacacactcgcatgtaatctcaagttctagcagaatggatttactttcttgtttgataatccatcttttacgtttacaatcagaaatatctaaagacaaaacacacacaaccacaatgtagtctatttgttcctacccttaaaagtctctgttggcttttcaaaacctggtccattgagtcattgactcagagagttagaactaaaaagtctttatatttacacatatacgcagatttaatctctacatctttgcttcagtaaaatg

SEQ ID NO: 1015 - DNA, 3000 bp, Unknown
  misc_feature (1)..( 3000): cDNA_ID_2129017_gDNA_ID_1620347_Annot_ID_154204 3000 nt of promoter + ATG
tttagcaaatcaactttatttttgttaaaagacttatatatatatatatatatatatatatatatatatattaaaattctattttctaacaacttttaaacaatgatttcttatgaaagaaggaaaatgtggcatgtatggaatttttggcaagcagtaatctctggtatgtaaatatgccttgcaacaataaggactaatcacccatcgcctattagatacggattgagtagtttctataacgcatattggaaatttcatcacagatgaataacatttgaatatacgagaaaatactggaaaactattaagtaacggatatggatcagtaaaaatagacgaaaatggtggccttgcatttacggagactataatgcatatgaccattaaaagtgaaatcacatttttaatagacatactgagatattgagaaaaaataaagaaaaaaaactttgttagtataacaaaatatatgtttagtagttgattgatgaacaacaataaaatccttgcctatttaaatggaagggaacaaaactatggtattaattatcttgattaacgtctttgaactcttttaatagcacttattaattagcagtttataaaattgaatagtgttaaaacttctagaaacgaacaacatttaagtaacaaatataggaatatgttaattctatgaggactctatgtattaattaaattaaaaaaaaaatgaataataaaattataacatgattattattagagtaggtggaggtgcggggaatcgaaccccgtgcctctcgcatgcgaagcgagcgctctaccatatgagctacacccccattttgagtaaaaatgaaacagatacataataaattcaaattaaacaatcaaaaggggcttaagcaaatcaaggcccgaaacgaagcccaattactcaagatgttcctaaatcctgaactagggttttattctatttccctttctcactaactctctagttaccaattttctctcactaaatcagaaatgccgccgtcgttaccgtctctgcaactccgacggcttctcctccgtagcttcatttcctcctcctccgtcaatactcttcaatctcagccccgtatcatttcttccaagccgttgttttctcctcttcccccttcccgttcctctatattctcaacatttccttctagattcttctcatctgaaacgaatgcggaatcggaatctttggattcgaatgagatcgctctctctttctcgaaggagctcaccgggaatccagacgccgagtctcaaaccatttcgcagagattcaatctcagcttctcccacatcacgcctaatcccgatttgattctccaaactcttaatctctcaccggaagctggtcgcgcggctctaggttttaacgagtggttagattcgaactctaacttctctcacaccgatgaaacagtttcgtttttcgtcgattactttggccgtcggaaagatttcaaaggaatgctagagatcatctcgaaatacaaaggtatcgccggaggtaaaacactagaatcggcgattgataggcttgttagagctggtagacctaagcaggtcactgatttcttcgagaaaatggagaatgattatggtttgaaacgtgataaagaatcacttaccttggttgtgaagaagctttgtgagaaaggacacgcgagtatcgcagagaagatggtgaagaacactgctaatgaaatatttcctgatgagaatatatgtgatttgttgattagtggatggtgtattgctgagaaactcgatgaagcaactaggttagctggtgaaatgtctagaggaggatttgagataggaaccaaagcgtataacatgatgcttgattgtgtttgtaagctttgtaggaagaaagatccttttaagcttcaacctgaagtagagaaggttttgctggagatggagtttcgtggtgtacctagaaacacagagactttcaatgtgttgattaacaatctttgtaaaatcaggagaactgaagaagcaatgacattgtttggtaggatgggtgaatggggttgtcaaccagatgctgagacttatcttgttctgattaggagtttgtatcaagcagcgaggatcggtgaaggggacgaaatgatcgataagatgaaatcagcgggatatggtgagcttttgaataagaaagagtattacgggtttctcaagatattgtgtgggattgagaggcttgagcatgcgatgagtgtgtttaagagcatgaaagctaatggatgcaaacctgggatcaagacttatgatttgttgatggggaaaatgtgtgcgaataaccagctgactagagctaatggtttgtataaagaagcggctaagaaaggaatcgctgttagccctaaggaatacagagtagatccacggtttatgaaaaagaagaccaaggaagtggatagcaatgttaagaagagggagactttgcctgagaaaaccgcgaggaagaagaaacggctcaagcagatcaatatgagttttgttaagaaaccgcacaataagatgagacggagaatgtgatgctgatgaatcttcaacatctgatagaattttctaaagattattgtctttgttctttcctttttaagatattgtcaagagtactcatcattttgcttgatcatgagcaaattgtcccaataatcttttgttttgtctcagtgtaacgtttactaagagttcatgcttggctcaagaatcggaggtaaaattaggtttcttggttaattgaatgcttctcttgtacatccaagttgagtttaattataacggatcaagtcagctaatctttgttaattatctaatatattaaagttaaaacaagatcccgtgtataaaggcatatcaacgtgcaaatgtatactagtcaaagtcgtcgccttgatctatattcttacaaagtctctctctgtctctgttcacatcggaaccacaagaatg

SEQ ID NO: 1016 - DNA, 3000 bp, Unknown
  misc_feature (1)..( 3000): cDNA_ID_2129013_gDNA_ID_1620347_Annot_ID_154203 3000 nt of promoter + ATG
aagaaaatgttactagaaaaactgtcactatttgtctcagatcagattgaatacctggagctcatcaaaagcaccactatcacccctatagaacaagagttctgtttgcagttgctcaatttggctccgcattctttgcatttgtgcggttgctgggtctcgattgatctaagtattagaagaaatgacaagaatgttaggccacaaatgatatctatagttgagaattcataattaaaagcaagaactaacatataagtaccactgctttgttttgaatattgcgagcacgatttgcgtatttgagcgtatttaaagtttcctcagcatttgtatcagcgggacttacacaagctgcaacattcagagatcataaattatgtgatccaatagatgggtgaaaacagttctgtctaatacttggatcataaatgaaatgtttgagaaaccataccaatcatcacagttttgctattgccaccaagagaatcctaaacaacagataattaccattagtttttctttttcataaccatatatttacaagggcatgtagttcaattgaaaatgtatttacgtgtataaacaaacacatagggaaccttgatacctgtagcaaacgagttaacttgctgtcacggtaaggaacgtgacctccttcctttctctttttctcatctccaagtgcacttataacatttccaagagctaatagacctttgttgatgtgaatacctgtgtaaatattgatgaaataaaccttatagtttagtcatagtctcttttaagaaaccagaaagaatatttatacaactttatacatcataaagataaacatgagatagataaccttcttttaaacgcatcccatcagctcctgttcgttttgcacgttctgaccccgctaggtcaaccaaatgaagctttgcacataatatatcttcacctccatcttcagttgttgtgcaagaaccaccggcaatcttcttttgttccagagtgattgtgaagattgcatgggaccgactaaaaaagcaagaaacaaacattacattagtatacttgtaagaactataatttcttaatattggtcatagaatatgatctaataatgaaattttatcttgatgcaaaagtactcataactctactagtggatcagccacattagctctttcaagtattgaagtagttataaagaaaacggaatgaaaacagtgcatttcaaattacaaattcaccttgactggctattcatgtttgtgctgcctgtagctcgagacaaagagcctcgtgctagaaacgagcccatctcctctttcgtcttgacttcagcctcagtaactccagccaatgttattcctccactggcagtttccctgatttgaattggagctcgtgagagagcagtgtgctttgcttgaacgccactgtcatttttaaggagggccgaagaatttgagtccagcaaatcaaaaacttcttccttaaaaatctgcatttaaaggtaaaaatcagcaagtgaaatatacaaatcaaatctcaaataacaaacacagaagctgtttctacctcaataaaagacactcgtatcaatagttcagatgaatctttggttgtctccactcttctaaatatatcctccataacgtttggtataacgccaccatttgtgcaatctccactataattagtacccatggtataggttttacctgaaccagtcttcaattacaacaaacaaacaatgaatttgatggatcaaaccaaaaaaaaaaacacgtagctaaagggaactgcagagtttagagaatttaaaaacaaacctggccataagctagaacagtggcattgtatcctttaaacaatgcatccacaagtggagcaacacagtgattgtaaatctccgaacacggatagccaccatttccgtagacgaaatcataagtaaatgtatgcgaaccaatatgtacctgtttcagttcataagaaattccaacaaaatgagttttatcaaagttcgaatctttaaacatattttcagcaaaaaaaaaaaaacattcacgcatcaattgatttcccgaattgaaccgaatcagttctatgtgaaaacaaatcccaaatgtttcaaaattcgaatcttacagcaaaactattaactgatgaagaataaacgttatttctcattcgcgcataaatttgatttcccgaatttaaccaatatataatcccacgaatcttatcaaaactgaaaaactctcagaagaaataaacgcagaaaaaacgaaaaacccttccaattgaattacctgtggctctttgggagccacggtgatgcaatctgtgcatccgttcaaaagctccggtgtaattaacggacggatgttgacggcaaccctaacgcactctgtgctctccataaccgccgagcagaaacccagaaaacctctggttacggatctaatccagaaacgaaacctcaaatcaacaccacgaaaatgtagatccaatccagaaacggaggagctagggtaattttcgagaagaaaattctcaggaaatgcgatttttgagaattcaaattttgaagagagagagagaaagagagaagggggacttttgtttattttgagaggtcaacaattaaaaaacaagaaaggcaaaacttaaaaccattatggaaattaaaattataagcgccgctcaggtacgaattcaaattttctttgagaccgttacgcacgtgtcatgcacatgatcatcactaaaatatcataggcccattattttatatttcagcccatattttaatatcaaaggcccattagtttatatttcagcccatagttttaaatattggcccatgttgatctttgtttctgaagaggaggaggaagaagacgatggttgacacttgacagagtaagctcagaaatggcgactctggtttcgaattgaacttgtgaggaaggtttttagggttataaggtgataaagaaa

SEQ ID NO: 1017 - DNA, 3000 bp, Unknown
  misc_feature (1)..( 3000): cDNA_ID_2045322_gDNA_ID_1620348_Annot_ID_154227 3000 nt of promoter + ATG
aagaactttattcaacaacttgtcagccatggaattgaaccgtaccacatgttacattgcatcactacgatcttcctcagtatctcgaggatgactatggaggatggaccaatcgcagaatcatgtaggctagcgataacaaaaaaaaaaagcagcatttactaaataattagctattgagaaaagataataaaacttactattgtttggcattgcagcaaagactttactgcttatgcagatgtttgctttagagagtttgggaaccatgtcaaattctggaccactatcaacgaggctaatgtattcactatcggaggttacaacgatgggacttcaccgcctggtcgttgttctaactgctcgtcagggaactcttccactgaaacatacattgtaggccataacttgcttcttgcacacgcctctgtttccagactatatcagcaaaagtacaaggtttatattagtatatagtttacataaccttataatggatgtttgaattgatcatgacaaaggagcaacatgttatatataatgtgtaggataagcaaggaggttctgtagggtttagcttatatgcatttgagtttattcctcagacaagctcttctaaggatgatgaaattgcaatccaaagagccaaagacttcttctacggctggtgagtgcagacacataaaaaagataattttcaaattgggaaacatatctaaggctttaagttaaaaataagttatctgctctttattacttaggatacttgggcctcttacatttggagactatcctgatgaaatgaaaagagctgtgggatcaagactgccaattttctcaaaggaagaatcagaacaagttaaaggctcctctgacttcataggaatcatgcactattttccggctttggtggaaaacattaaacttaaaccgtctctttcaagaaacacggatttctactcagacatgggtgtatctttgacttgtaggaatcaacacttaaatcttttgtataacaaaacaaactctattgttgttgttttggtttttgctaatcatctcttttcttttctgcttgtgggggacagaccttggcaatttttcaggtttcggggtaagagtttcaaggctaccaaattcagatgctaaaactcttttagagttaagtctttaaatacataaatttccccaatcaatattctttctgagttctttttttttgtttttgtttggacaagtatgatgtttttccatgggctatggaaagtgtcctggaatatataaagcagacctatggcaatcctcctgtctacattcttgagaatggtatgatcactgtctttctctatatattctgatctatgtctcttgttttttgtataagtcttctcatttcttttgccattgcaaacgaataggtacaccgatgaagccagatttggagctgcaacagaaggacacacgtaggattgagtacttacaagcttacattggtgctgtactcaaagccgttaggtaagtaaagtgtttcttactgcatcttctcttctctactcttgtctgtgtaataaataaacaaaagacattactacgtgtaggaatggatcagacacgagaggctacttcgtatgatcatttatggatttgttcgagttactaagtggatacgagcttagttatggattgtaccctgtcaacttcagcgatccttatcgcaagagatctcccaaactctctgctcactggtactctgattttctcaaggggaaaatcaccttttttggttcccaaggcatcaaacaattgcatagcaacttctcttattcctccttgtagtgaattgcatttctaataaatccggctcagtttgataaagtccggttactgaataaaaagattattaagaaatattatgtttaactataagaccaatcattttattagtctataatgttgtttattcataaacttagaggcgcgtaacatacccgagcaaacgaagagcgtgagtgattgtgagagattccttaaaacacaaagaatctttagaagataaagtttggatctcgaaattagtggatgcttattgctcaccactcaaaaagtttgagcaccacgactttgggaaaatattggtccaaaagttaaatcagaaacaaaacaaaaattcagattaaaaaagaaaacttgaagagaaaatttcataaacaaacaagtagggttccaaaatatccggattatcttttgataaaaataacataaatctttgacttattttgttttcttgggatttacataaactgagtatataagaacgcactcttccaaaatgttctaaaaatatcccaatttcccacttaggaaaaaaatgagtgcacgaacctaatttatttagttcccctataataaatctctctctcaaaagattcgtcgattgtctcgttcgttagctttcctatttttgatatataaatgggaaagattcgtcgattgtctcgttcgtttcctatgttcgagtaccatttattatttccgttggaatttacatattccaagcaaaatttggtaattctgtattgaaagagaactagggttaggtgagaaactttatatggtactcgaacatatcaggtcaacattttcttttaataacaaaatcatgactatttatatggaaactaatgtgataataaacttgtctttttaaattttaaaacgggaaaacaaaaaaaaagattctgtagatgatgttgaaaataaaaaagattcagctaatatagaatcttattaagctagaatctcctgataattcgcatttccaataatagcccgatattttcgcattctccgtttcgttaccaaaaaaaatttcaaagcatagcaaagtcaagcacacacacctacccccacctctctccctatatataaatacctgcaggaatctctttagtgttaccaaaaaaaaaaaggtttattattctttgagattcctaagatatg

SEQ ID NO: 1018 - DNA, 3000 bp, Unknown
  misc_feature (1)..( 3000): cDNA_ID_2045304_gDNA_ID_1620348_Annot_ID_154233 3000 nt of promoter + ATG
tttggaacaccggaggacaatattaggagtccgacgagaaaacccagtagggtttttcagcgaggaagtgaaattgcatccaattaacagctttggagaagaagctgagcaagaaactagggtaaggttctccatatctaattgtttctttgggagaaaaagaaacagaagaaggagagcctaaaacaaattctggtggagaagatgaaagatatgatgaggaagaaggaaacgaagaagaagagattttggtctaaaaccacgaggtttgagtttagcactagacttggatccagtgtagctaagtgtactgaaacctttttacaaattaacaggtggcgatattttcaccgtcaagatcaatgagttttatttataaaccaagggtgtgatgtgagtgagaaactctttcgagattattgcaaaagccatcccccactttttctttttgttatgttatagcccgtatctattttaagaatcagtgtacactcatttttgtagcagaaaatcaatgatgttagtactgtgattcagatttttctatatactgtgttctttttctttttttcatccagaatttttccattgtattataggttgtgaaatacaaagggtggaatacaaatttgaaacacaaagccggcggaaaacaaaaatatctccggaaactaaacctaaagaagggaaaacttaagacgaaaaacgaataaaattacgaactatggaaacaaggggaaccacagatggattagtccccaattaagcccatacatgagaacaacaaaattggctaggtttttcgttgtgtttctcgtccaaacgaatgagactacgcccaaatgggactaatccatttgtagttatactgttgtgtttttcggattgtccaaaaaattgaatacttagttcaaagctcacaatgaacaggttcaagagccttacgcctttaacattgatttaggattagagagtctggaaccgttgccgagttacatagtttacacatttcttattagaaaagagttttagtaataaagaaagatacactttcatatagtttctgaatattattatggaagtgtaagtctcctatatgtaactcgttcaccttcatcatcaaattggtttacacagtttgttccatatgtcattcccaaagtacattgttctgtcaaattattccaccatgtggtaaacatcgaataatgctctcttctattttcccaattttttgtgaattttccccaattcgaacataaaatgacattaaaattcctaactcaatatctttgtaagaagaaacccactcttggttggatacatatcaagcatccaaaaaagatcacaaagtaatcttacaaatcagctacgtttaacaatatcgaagacaaaaacagaattcatagctgcttctcagacaaagggcacaatgattccacatatgagtgcttgagaaaatgataatgttcttcaagatttaaactaagaaaaatatcgaacaagagctctacactgatctcttccttgatctaaaacacaaagggaaacaaatccccttcaagtattttagatcaaagtgtcatcaagcaatacatatagctcaagaactctttctttggattaaatcaagaagaaccacatcacattctcaagcccatcttttcagtgtggttaaagcaatataatcatcatagaacagccaaaaaaacaaaccaatttttttttttaaaacaacaaatttagaaaaactgaatatgagaaaaagctgcttctcagacaagggccaaggttgtccacatgagtgagcttgaaaaacgtgaatgttcttcaagcctcaaaccatgaaaaatgttgataagagctcgacattactctctaccttaatctaaaccacaaaggagaaaaagaatccccttcaagcaacttagatcaaagtgtcatcaagaaactccgagatcaaatctaatctttctctggtttgaatcaagaagagcaaaatcacattctcaaccccatcttttcagtgtggttaaagcaaaaagaatcatcatagagcagcatcaaaaagcaaattttcacaaaacctttatttgagaaaaggttaacactttatcatagaaattcgaagatctaaaatatccaaacataagatcagaattaaaaacataggaagatgtcgaatctcgagaaaatgctagaatccacgggaaaaaaaattcccagaatgctacatgtccagagactccaaaccatcaatgaagatgtttgatttagcatcggaacataagatttcttttaagctatacatgagtgctaagcttaaagactcctatcacaaatctgttccttatatgctattcttaacctaagatttcgtagcgaaaaattcagattttaacagaaaatcagaacaaaaaaatcggatcttttcgtgaagataatatcttgcggcgaaatcaaagacgaagtcttttatttatagcttagggtttacatctatgggcctttaggttctatttttattggcccattagcccaaataaaataacctttctcttcgctccctcctgtttcccctctgtttcgatgataaacacacacaaaaaaaaaaaacgatttctttcttaacttgttaatcagtaagagcgtctcaatttcagtgtttcatcgaatatgctgaggtaaggtctccgtttcactggttatgtttcaatttggctaaaaacaacttttttattgttcataaaagtgagtgacacaaaagcttcttcatgtttattaccagggtttcgacaatctgagattcttctccttgtgttcatgtccaaaggagattcctttcttcattctccttaccttcttaacaaacccttctctcttattatctaattcgcttttgtagctctatacgcaattagcaaatttggagaaatctcgattatagcaattttcttcagtctccatgtacttttcctctgtattactctaattcaaatg

SEQ ID NO: 1019 - DNA, 3000 bp, Unknown
  misc_feature (1)..( 3000): cDNA_ID_2045296_gDNA_ID_1620348_Annot_ID_154235 3000 nt of promoter + ATG
ctccttcaactaaaccgaaacctacacctgcaaaggatatagaggtggataagccaagtgttgtcttagaggcaagcaaagagaagaaagaagaaaagaactatggtagattctttttctgtttcagaaatcaacgtcttttcatttgtattctcaattttgactttcttcctttctcattttccaagcttctaacttggaagctgatttacttttggatgcagcctttgaagacatttcacccgaggaaaccacaaaagaaagcccatttagcaactatgcagaagtctctgaaactaattcccccaaagaaactcgcttgtttgaggatgtaagtttcgttttcttttgtatttccacagcacaccaagtggtgatttaaaaacgtgacatagttttgctaaccttctatgctctcttattgatctctgggtgaaggtcttgcaaaatggagctggtccggcaaatggtgccactgcttcagaggtttttcaatctttgggtgagttattgaatttcagttttcatcactatcagcgcactgtgcatgattcatgattaaggctacggatttcaattttattttatagcatatgccaacaattataaacaaaggaagatatgaaattggtgataaagaggaatgagttggcttcaaaaggatctactccgttacttttgtccttctgctagtcgttgatctgtattggtataaccatataagacttgcaggatattaccttggcaatctgtttcatatctcatgtgttatgattcttttttcttatatgctcacgttattgtctctcttttccttattctaaatttaaaactgaatcctgagtctgtctattgtttacacaggtggtgggaaaggagggccgggtttatctgtagaagctttagagaaaatgatggaagatccaacagtccagaagatggtttacccgtaactcatcttccctagcacattgtctttaaatgcatccattaagtttatctttaaaactggttgcttagtggacatttggtaacattgcatgtataaatgcagatacttgcctgaggagatgaggaacccagaaactttcaaatgtaagtcttttaatatttaatcctgctatcattcttttattagtcctcatttttacatatttctaaagactaaaggttacatgactagcttttgaatgatgtaattcgtttataggttgatccaatggttatctaaatttaaaatacagtttggtacttattgtctccgcttggaattttgtagggatgcttaaaaatcctcagtaccgtcaacaactacaggacatgttgtaagagctccattttacgaacaatttagttgtttccattgcttttaagaatgtctaaactatgtaattaagaaatactcttgtttgtttcttttcatgaatttaggaataatatgagtgggagtggtgaatgggacaagcgaatgacagatacattgaagaattttgacctgaatagtcctgaagtgaagcaacaattcagtaagacaaatctcagtttgtaccaagttaatagtacgttaaataggtctgatactcaatgattgaatctgtatttgtcagatcaaataggactaactccagaagaagtcatatctaagatcatggagaaccctgatgttgccatggcattccagaatcctagagtccaagcagcgttaatggaagtacgttttcttttaacctgaataagagaattgcttaattttaccccacttctttcttcatacaaaacagaaaccaattacattcttgttgttgttgcagtgctcagagaacccaatgaacatcatgaagtaccaaaacgacaaagaggtaataatactgccacttctccattgcccaaaaaggcgattacttttttaagaaatttgaggttattatacattgattgcaggtaatggatgtgttcaacaagatatcgcagctcttcccaggaatgacgggttgaaaaagctcacgtctttggttctatcaaaaatgtcacattgtctttagctttttgtagggagaaaaaaatgtttttttttttgcaaagagtcttcagttttggtcagatcagagaattgtgtaccatgttaatcttaaacgcggtcgggaattggagtcgtgtgaaaacgccgctgctgttgtttggtatgaatattatacaatagaatttgttgtcttaccaaaaaaagtctatgaagacactgaagagcaaattattatttttaagggaaaatttccaaaataaacttcatgtattcaaaatttgcttgaaaaaacctcaattttttttgtttgagattgtgtgaataaatctgccaatattttgttttagcaatttaaaaaattgaagtttttttctcgcaaattttaaatagttgtgatttattttggaattttaccttatttttaatatccaaaaggagaagtgacgtggcgatatcgaagcggtttaatgaagtgatggccccatcttaaagaaatcaatgacccttatcgttccacttctatcggagtcggagtttttttttgttgttgttgtattccgtacgtcggtcgttgtcgggagaattggcgcgtgaaatccttggctccgtcgaatacgtctgcctccgacggctgtgagtcgcatgattgagtcgtgggtaagtatccttgtgacttcaaatttgtatttccgttctttataatcccctgactcttgagaaaatcgaggagaaaaaaccatccttgcttggtattcatttgaagagtgttttagttataaaatcgtaatgtttgacggtatgtgatattctgtgagcatgattattcagaaagcttttgtctttttagtaaatattgtctctttcttagtcttaggtaatgtaacctcaagaactctatgcgagaacattacacattatctttggaattggatattatattgttaaagtttaatcattgatgaaagttgcaaagagttatg

SEQ ID NO: 1020 - DNA, 3000 bp, Unknown
  misc_feature (1)..( 3000): cDNA_ID_3060181_gDNA_ID_1620348_Annot_ID_154229 3000 nt of promoter + ATG
aaaacttatataacacagagatttgataattttttaattgttgaatactttttttttgtgctaatttttatatgattaagatttaattgattttgtatattaaatattaaattgttttacgaacttatttgtttataatttggtaacagatagatatttgagtattcagtatattttgcttcagtttaggaaatctttgatgacccgtctttagatccaataagccctataatctagatattaacctgtagtataacgcaggtaggctaatattttagttaaactaaaaacttttattgtaaagatgatttaaaaatatatgatattattttatttgattttaaatgtatagtaaactgtgagttgtatatgttttgttgatattatctatattgtttagtgtttaagattatacacttgtagtttgattgttaatttaagagtttcacctgtagtataccatcttgtattaatatcgatctaaacccgtcaattctaggattttccagcttgtattaaaaaatgaatcacatcatacacataaaaaatctaatatgttattaattattatagtatataagattataaattttcaatataatatgtatgaaattaaatataaatatttcaaattatgacccgttactcagtagaaagttttcttaaatctatttttcacccgttataatattttttcatgtattgaacaatttatattcgtttttaaaaattctaattatggcatatgcgaaaaaattctaattatttttttataatgatgatattattttttcgcaaaaatagaatcatataaagatgagaagtgaattataataattaataaaaaattaataaaaaattaatacaataatttagatatcaaatctaatttgttgattttaattggttacttttttggaaattaataatgtatttcatttttctaattaaatcaaattaattaaaatttagatatcaaatcttatatgttgattttgattggttattatttttgaaaattaataatatatttcgtttttaaattaaatttaattaattaaattagtatttgactttttaatccttaaagagatacattaatttactctttaaaattttatttctaatggcatacctatgtaattacttacaaaaattaagattatatttaaaatgtatttcccaaataatatagtaggactaaaaagctttgaatcttataatactttaacgaaaaaaaatttgaactaaaccaaatatcataactgtctgtgagctattattgtattcgcaccacccaattagaattttgataggtactacaatattaagtttgtgataacagccaattattacaattgtttggtgggtcattatgttcccgtgactctgggctattttgtatatatgtcactatttttgcctttcttgttgtaaaatttcgaaagctctttattttcattggtgggagagtcctaatcttcttaatttcttatcatatagtcccaacttgtatgttttgtaattgtaataacaagttggaccgacgggatattgtgtaatatgattggtaatacgcaaacgcaaagtaacatcacagaacaatgctcacacggaaaatatgaattcataaaattttatcattatatgaatggaaagtgggaaaaaagcatacattacgaaattgttttttgcatgacataagaagaaccatttaaaaacttggtaacgtcaatttatgctagttaagtactatactctttcgtcaaataaagaaaaatgctagtagtagtagagtagactgatattgttgtcccatgaaataaaaggggcttcaaatatatagtttgatttaagaacccattcttgtataagcctattttatgggccgtaatcaataataataatgggcttactttctacaatgtactcttaactgaatatcaattatagtttgggccgaaataaaaacgttggtctcatcaaaatcctaattgttttactttaatatcatgtcttcagtactaaaatactaatgaggtaatctaatttgtatattttcttcccaaaaattttcgatatgagttattccattttaatacagaatatattcttacttttagaggaagtaaaattttgaaactactcaaatcctattctatatatgtacaaacacattttttttctgccgatgacttagatagacacaaagctaagaatttcatattgtaaaaaaagttaacacgtaaatatgttccacatatccgaaaggaatttaaattagtagtggttcagtattattaagtcagacatttttaggagacgttcaataatataacatactttcccaagagttgcatgtttccatcgtacataataaaaccataactaaacaatttaaattattcattaaaaataaaaaaacggatagtatttgtttaattttcacattaaagtatcttttaattaagtatttattattatcttttatctacttatgtaatgtttataacacttcttacaaatctctccagattccttcataaatggaaacaaaagcatttaaatatgtaaatcatatgatttgttactgaaaatgctaaattacacaataataaaaagatgtaagaatatacagcaaactcatttcttcttgctgtaaaaataatcgcacggaatatttaaataaattaataaaagattctgtatctcactgtaaaaactaaaaaggtaaaaaattgaacaattaactttttctttccattcactgcagtctgcaattaatagcctctctctctctcctccttcatcatctccccatagccgtcgagacagatagagagagctgaaatttctgtgagaagattttcttccgacattttctctttccaaacactgttctacacgtagtcggaaatctcggaaaaaccaatctccgagtcagagagagagagagaggcgttcactgttgtaaaggattaagctttgggtaagaagaag

SEQ ID NO: 1021 - DNA, 3000 bp, Unknown
  misc_feature (1)..( 3000): cDNA_ID_2045313_gDNA_ID_1620348_Annot_ID_154230 3000 nt of promoter + ATG
ttaaaaacgtgcttaaactagtaagccttgtgatggtgaataatccgttgaatattgaacttttgccatcaaaaatataatgaagaattaagtcatggtatattgttgacaagtcttctgaaactttgtagattagctaagtgatagtgatgaccttgtacgagaatgactgaatgagattcatatgcctataattagacctagagagataaccgacaaaatcagtcaaagcatcatattttcatattgaattaattaacatccaaaacattttataactttaggcttcacataactctatgtttctcgttgttgtagcatttattttggaatttaatgaagcaccatattataattgtagctatttgtatttttgtcagcagaaaacttagtatttgaaattacaattgctactaaatgctaaaaaagaaagaaaaacaactctgtattttttgtgtgtaaatttcgaattttttgtttctaaagctgtgagttcttttttaaatgcataaaatatcatatatttattaaaaatgacgttatttaatattaaatatgaatgtgttacgttttgatcagttgttaatcaggtggcataaatcattttacaccgagtcatggacacagcattttttctcttgttctatctagctcatatccatgtgggttcacatgcacttgtatatgttaagagtatttattttattttattgttatcaaatgtgcccaagacaatgccacatagcttatctaccctgtcaaatccatataaaactattgaagcctttacaacttgtgattcattttcctaaagtcttaaattttaacctttgccagctcataatttattccttatattgtttagtgcaaagtttgtttgaagatggttgccgaatatcataataatcttttaattttatcgtatgtgacaatcataactataatttattaaaaaataaaagcttatataaataacatattctaaaaattatgcatgctaattagacatgagctggaaaatgaattaattgaggtaccatcaaatgttcggtcacgaaaaaaagataaacacataatccaaatagaaatttagttctatcagaatatgataaaactaattatattagtttattgcatcaacatataaataagatgcatacttatgtggacataaatagttatacatactcgtgatgtttgagattcataaattatactccagaagtttgtttgggaccgatagggatatagaacatggccaccgcatcaaggcagtattggacgcggtttctcctccagtgccaatgattatgccaacaatacaaagtgaataaatatttttgacaaccacaaaaaggagtagaagaaacaatatggcaaagtaaattgcctaattggtatttttttcatatgtctaagaaattactgatcaaaacacatacatcttttcgggccacgaatcaaattagagtccatttgcaacgttttaacttttaactcaaaatctggcctgactcttacgaaatctgcttatgttcgatcgattgagctaccaactcatgaatttatatttaacgatctctactaatttagttccttaatttaccttaaatttccatgttacattaattggtttacgttgtacaagttgaaattttcttgacattgttgttgttgttgttgtcagaattatttatctctttccatatcgtttttgtcttaccttgagttggacctttgttgtattcgtttataccgatccatttaaaagaaaaacaaagcaacataatcatcttggagtttacccaagaaaacaaaattcttggagtttgaaataggttaagattcaggcgtgtccaactacatattaaatttatttatgggccattttgtaatgttggccttttgttcttaaactgggccattttactgataatagaccaaagttggtgcaatggctcgagcttacccatttgtttttcgtatgaggacatcctattggattagattttttcccactgaccaaataataaatttatagtattttgttgtatataaatccaaattaatagagaatatttagtctcccagcgaatatcgaagtgataaaaatacacaaaatatcaaattattaaataaactttaccatatcgaaataatgacaaaggtgggattatatattgggaacacgtaccactatggtgacgtcatgggtaccgtaggtttgtgttggcaccaccaacaataacaacaaacaaacaatacaaaacccaccacttagtgctaactaaaacccgccaatcacattatacttaattacaaaagtaaaatacgatttgtttcttctggtttgataaaaactaaacagaactctctttttttttttaaattatgagattcgagttttgagacataagcgaagaagacaacattggctgatgaggtgtttttgtctaaggaaaaagaactttaggcgtgatcacactcgcttacacgtatttgtttttaactccaataatttgactaaaatgttgcaagattttttttgttttacatcaaattaaatgtgatatagaaattggacgatttattaaaagaattatatatatacacatttcatacacagtttcatcatctgctttttttcttcagtttaatggtttttttaattagtatgttatgtagaattgtagatattccgatggtccgtaaaacgacatacatgatctaaatgtcgataaatatcacttatgaccatatgtaaaaatatggattaaaaggttggatagatttataattaatagaaggaagatacgagaagaaatgtaggtccaaccacaaacatggttttgacatctctctcactctctatatataggttgttgtgtagcctctttagtcttggaaatacaacatattataagtatattaggtaacatatatgatcatatctctatatataaagtaggtatatatatatttagcgagagagggagagag

SEQ ID NO: 1022 - DNA, 3000 bp, Unknown
  misc_feature (1)..( 3000): cDNA_ID_2129155_gDNA_ID_1620349_Annot_ID_154240 3000 nt of promoter + ATG
gaatatgagagacagcttgtggaggttttgcaagggcactgtactgctagagagttcagggacatgaaccctctgaagccagagactcttgagtttggccaaattggtaaagatggagaagtcatgtagacgcgcaggagacataccattgttgatgatcacgagcgctgtaagcttgcccatcttagcaatgaaaggaggcaatacatacttgtcagaagagaagtgtagtatcaaaacttcagccttagggagttccatgtcaaaccaatccatctgagtcatttctcctgtaaaataaaacagaaatccatatcaaaactttattattctagtaacaaaccaaattattcattagaagatggtcgtgtaacaaatccttacctgtgtgaatggaaactactctggctttgtatggctcatcattgttcctctcccattctctcggaagcattgactctctttttggcatcaataaccgctctctgttatttactttcccatgattgctaagacgaagtgctacatctcttagaacatcatgctgcgtgacaaatatatcatagtagctagtgtacatatgtccaaacctgaaaatttatcgatggtaattacattagctaagaacgaataaaaccgttgaaagtggctacaagagatcagatcataaagagttttataaccaaccgtaccttggatctttcacaagagtaaggagattcctgtttgctaaatcaacaataacagcaaaagcagttgcatcctcgagatcatgcaactcaaccaacacgttgatgagaacatcaagagggatcttcttatcttcagggaaagcaccgagaaccaagaaacaatctctggttttagggtcaagattttctagagttgcttcgatttgagcaaacactctactctcatgagtttcatcagcaggttcacctcttgatagcctctccactgcaccttcccaatatttttcaggtcgttctttcaatgaagcaccaatgactttcagagacaaaggtagacctttacactccccaacaacctaccaaacagagtcaatacaatatgagtactgaaagcaaaaaagaacattgctactatgcatgtgtcacctaaagcagaccaattacctgcttgaccaaactttggctgaaccctgaaggcactaatttctgattgaaaacagagagacagaacagggccgttgcttcatgttcattgagtaactctacatcataagtgactctagaatctgcgagtttagaccgtgagaccacaagagttgtggttccaggaatattttcgaacatcagctggtccagagattcccttgtccaaacatcatcaaggatcactagcttcctcgattctggaagagtagcaccaaccccagcctcataactagtaagaaatccccatatatgggctctaagctcctcaagattgggagattgtgacacagtcagaaacaaaaccttgttcccaaagtggcctgtataaaagcagtaaatgaaagcaattttagcaactcaactatacaacaaaacaatagaagcatgatcatcaagataaaccaacaaaatataccattaagaaacaccacaaagccactgcaatagagatcacaaagatgtaccaagcaaattaacaaacgatatggaatcagaggccagcaaagaaaagtcattacctcgaacctcctcgtcccgggcaagctctttggcaagagtggttttccctgaaccactcatcccagagataccaataagtctttccccatcaatggatttaaacaacatctccttcaccttcctctttcccaaatccaatcccacccccaaatcagcaccatcggttgtcaccatctcaacggtagcctcggccgtcttcaacgcctcacgcaacgattcacttcccctgagtttcatagaaccaagcttctcattcaaactatcaaccttcctatcaatccgatcgaaccggaattcagaatcggctcgaacatgatgaacatcagcgagaacatggactaacaattgaccgttgagaaagctagacactttactctgaagattctccattttcctaacatggagtagctgtctaaccatgttccaacggctggatttaagaactttctcggtgagcttcctacacttgtctaaggtttccgagaacatacgcaactgagcctggcgatgaggtgtgagctcgacgccgctgtattggatctccttgatcgttggttgaagaccatcgatcatggtggcgagatttttggcgatgcctctgcatctgagggttttttgagaaaccgcatagagctgcctcacgagctccgtcacaacttcgccgccgattatatctgccatggcaaaggccgatgagaaaaagagagagagataagtggagagaagaaaaggcaaggaagagtggagtaacaagcaacgaagtaaacaaaacaaaaggaagtaaacaagtaggtgacgttgtggaacccattaacgaagcttcgttgcagtcaccttttggtaaagtctacggagacccaataaagataaagacttttggcaaattaatgtcatcatctttcatgtaattatgtctaataaggcccaagggcaaagtactgaagcctaataaggcccaatacataaagacacgtccttaacacgcgttcaataaaattggaatgatgcaagtgtggaccataaaaggcaaaggttctttggtccaaataaaatcatgtgaagagtacatgggcccaaagcccatagaagtggcaccatagcccatataatcctcatgggccatggccctcagctcagctcctcaagattagaagactggggacacacagtaagaaacaaaatccggttctcgaagtcgaagtggtcttcaaatctccggcggatggtaatcgtcggcggatggtttagactttagagataacagaagaagacctcatctttagagtccggagcgaaattaatg

SEQ ID NO: 1023 - DNA, 3000 bp, Unknown
  misc_feature (1)..( 3000): cDNA_ID_3060206_gDNA_ID_1620349_Annot_ID_154259 3000 nt of promoter + ATG
gttagccgtgattctattggatattatttctgtactaagagagcattagctaaaatttctgacaagcttaactaattccaattgtgtgaatcatttgcatcattgctgatatttcctaactaatattatgaaaggttgaggctcgtaagttttttgcttatgaacacattttttcaaggtaagtttctcaatcttcatgttgttgaaacatatgattcctagagtatctctactcgtacccctctcataaatcattgtgtttaaagccgagcatctgcatgatatgtaaggatctcttgcggttctcttcttgagtctccaaactccagttgagatccctggtgttagcaatatggattttctcgagaatatagtatttgatgctaggaacagaaaacctggtcagccaaagattgagccaatgtaggtgtcttcgcgcattagtcagttagatggttttggactgttacttagttgatggtgcacactcatatatctgatatagaattgtgttcatgcagttggaggatttagaggtggcgaaaagaagcataaagagattcttccatttccaagcgcaacacatgataagaaaggtgagggttttcttaccttattttccggtcaatggaagacacacacttgaataccgtcatttccctttcccacacttgttctctattagtgtcataaacagaatgccgaataggttacttttcattttatagtcatgactaggaaattttgttcctcatagcaagatatggaaacagttgtcaatttaatttcgtcatagtgaaaaggatcaatcaaggaacaagtacggaaaagattgagaatctctgtaataaggatcatctgtttttggaggtccttggatgtttacttgatcaggacgtggcagaggcaatgaacagacttttgtcaccaaaaaacgctgttgtgatgattgataatctactatcagaacatactgcactacatcaaaccaagtctcatacacatcatagtgagcgtctttgccacaaatcatatcttcttaaatactgattcaaaccaccatctcttgataacaatagtgagcttcgtttttgttttaggcaagcattctttccatatcaaatcaataacagagtgtccagagattcataccgttctattgcagtagggacatctcattggcttatctactggaaaaaggaagggtgcttgagtgttccgttaggaccagcaaaaacaatggaaagtggtgatcatgatgtttagaacaccaaactcgccgtctctacaatattagttctggtctaggttttgatcttcaataatagctgtggtcggaaggagtaattagggtaaaacataagggcgaagacaagaatgtgtagagcatgtgatttgttcaagctttaacatgtggatgtcttatttttaatgactgctctttaatatgtgggttttgtttgcgcatttttcacttgcgggttatatttttcaaaagtagtaaatgatgggaccattataaaaaggatgttattaggactccagaaaggaaattgattttatggaaaatcacctttttacctcaaagttttaatatattactaattaagtacccttacataagaagctgcgttgccaagattgaagagggtggtggactttgtaatcaaagattaattaaaaagagagttaagacaaatctcagcggaaaactcggcggtgatagataatcaaaacaaaagaaacgcgtttttcaaactggttcaatcttcttcttcgtctttcttcatcgtcttcttctctatacagaccttgactctctcattaaattaacaaatgtccctacggtttatgcaagtgtagtgctattaaactatcccttttattttcccacccaactcaatttattttctcattctttctctttactcttcttcagatctctctgtttctttctttgttgttgttatctggggatgctttctactctctgtttggtttccttcattgtgactttctattttctgggtttgtttcaagtcatgatttttccgatacccttttgatttttcttgctatttctcacctctgtataagcaagctctctgctgtttctcctcatccaagttgggtttatcagttcagctgtgtagaaattcaatcgtctgagaagtccgaggtttgatgtctgatggttttaagatcgaaaggatttgacttttatcagattagtaatgagattagattgtttttgaggttattgtaatcagatcttgatgctatttctggtgaaagagatttaagacaagttagggaatgggtaatacttgtgttggaccaagcagaaatggcttcttgcaatctgtttcagctgcaatgtggcggccaagagatggagatgattcggcttccatgagtaatggagatattgcaagtgaagctgtttcgggagagcttcgatctcgattatctgatgaagtccagaataaacctcctgaacaggtcacaatgccgaagccagggactgacgtcgagaccaaggacagagagattcgaactgaaagcaagcctgaaacgctagaggagataagccttgagtccaaaccagagactaagcaggagaccaagtcagagaccaagccggagtcaaaacctgatcctccagctaaacctaagaagcctaaacacatgaagagagtgtcaagtgcagggcttaggactgagtcagtgttgcagaggaagactgaaaacttcaaggaattctattccttgggaaggaaactcggacaagggcaatttgggacgacttttttatgtgtcgagaagactacggggaaggagtttgcctgcaagtcgattgctaagaggaagctattgactgatgaggacgttgaggatgtgagaagagaaattcagataatgcatcacttggctggtcaccctaatgtcatctccatcaaaggagcttatgaggatgttgtggcagtgcaccttgtaatg

SEQ ID NO: 1024 - DNA, 3000 bp, Unknown
  misc_feature (1)..( 3000): cDNA_ID_2129163_gDNA_ID_1620349_Annot_ID_154242 3000 nt of promoter + ATG
gtctgcgtatgagttttgtgttcacgtgtgctttgagatgacatttgctggaaaatttgatcgcagaaatcggaagacgatgacgacgttgttccaatgccaatggttatgatagaccaggatgctgaccctgaagctactattgtacaactcagttttggaaatcgtcttggggctcttattgacacagtgagggattctatatcctgttttggttttttgttctatcttatcgatgtgaaaaaactttagcttttcttgatttgtagcgtttttactatcagaatcagatgtaaacttgccttgttttcggcttatgaatcatatgtgtgtggcagatgcgggcgctgaaagatttgggattggatgtaataaaaggaactgtctcaactgaaggatccattaagcagaccaaattttctataacgaaacggtaagaaaggcctttcttttcctggtctccctttgctttagatgattttctatcacttattgacttctcacttgttcaataggatgcacaattttgtctcaaactgcttagtgctgatatgatcttcccttatctcaaattatgctagtatagaattctgcagttgtcctatgaagttcatgcttgacattgggctatatcatttctctggagaattctttctaaactagataattagcttgagacaagtgaatctgataaaaaagaactttctgtttttgagaattattggtgttgtgtgcatatatcatcttcagcaacctgcattgtcagttgttacagatgcctgaaataaattttctttttcacaccagagacactggccggaaagtggaagatcctgacttgttggaacaaatccgattaacaatcatcaacaatctcttgaaataccatccggtctgcctacagttttctttatctctttaccgtaatcacattcacattcaaagaggcttgcatgcagctgtttttttttttttgaacattgcctttggttgttttgcaggaatgcagtgagcaacttgcaatgggtgagacttttggaataaaggctcccgaaaagaaggtaatgtttactctgcttattggatgattacttttgtgtcctgtgttttatacaaactcttttctaatgtcttagtcgagttttataaagaagcttgcagtcattaaaagctagctctaggttactgatgtctcatttctgctttggatttatttggtacagattgatgtcgatatcgcaactcatatacatgtgaaagaagatggaccaaagaggaggtattcaccatatttattagcattattaatgacaccacaaaatcatatataaagaatagccctgttgaaatagtttacataattctcgcctgtttcctgttttctctagcctgcttgtcatagagacagcggacaggccaggtcttgtcgtagagatgatcaaagtgatggctgatgtcaacatagacgtggaatccgcagagatagatacagaggtagtcaaaacctacataagtacatacactgtgattccatttctatgctatgcattataatagtacgtctccattgtctctctcagggactggttgcgaaagacaagtttcacgtaagctaccaagggcaagctctaaacagatctttgtcacaggtaagtttttgtttctgttagtcttgtattttgcacctttaaaagaagagagagaggtaaaaagaatcaactatctcctgcaggttttggtgaactgtctgcgttacttcctgagaaggcctgaaactgacattgacagctactaaatgagcttttgtttgctctaaaacaaaactgctctttatcctttaaagcaatcatatctgtgcttgcgaaactttcagacttctgtatggaagattatgtggaaattcgtgatactataattgaaccactgtggctaaaaaataaatgggttcttgacacttgatttgggtgcgtttagaaaattcgtagaagactcaatttttacaaatctgaaacctcccttaccttaattagtctgtggttaacctgaaaactggacgcaaaatttggtggtttttcgaagcggtctaatttattagaaagaagtataggacacgggcaagcatgcggacttatctattcaccgtaacacacctaataacagcttaatgcaaaacaaagttgtggattagacttattaatctccttaagtggcatgagtgtatttgttcatctccttaatatataactattaatatcatatattctaaatttgggatccaacatgctttttcgtgataacgactcttaataatcgctctatctcaaaccgcattttaccctcgaaccaacaatgaatcctacttggactgtttttttgatcatttaaaattatgaactttcaatcaaactaattaacgagtgaacttttcgacgtgggatccatcataattattcggcaatactcttgcatatgttttttttaattgttttggtgactgattctagttttcttttcccaaaggtcactttacttttgtcgtcccaaatgtcaataatataataaaaggagaaaaaaacacttcgctgaagtttattttattgttttgatgactaattctacttcttggtgacagctttcatattatttaaatttcacaaggaatagaataagttcactagtttgatggattctccaaaagggactaaacacaaacgtcacatataaaaaggacttcttaaaaatatatatgcgaaaatgtcaaaagaatttaaaatgtacaacatgagatatttctaattacagactttataatatatttggtaaaaatgatcgttaaacatttatcaaattatcgttgaccttttaggaattaaaacaaaacaggaaaagaattagagtcaaacaaacaaaatgatcctactgataagaacatgagtcatgccctagttgggagaactcaaaacaaacaaaaaaactgttagtaagaaactagatgcgatg

SEQ ID NO: 1025 - DNA, 3000 bp, Unknown
  misc_feature (1)..( 3000): cDNA_ID_2129193_gDNA_ID_1620349_Annot_ID_154252 3000 nt of promoter + ATG
tctaatgatcatttttcttagttaatgagttaacttcaaagcacaagctaaaacttccattttcattgacattttttgtagaacacaaaatcattgtatctcattgcgaatgctattctgaatctgccagaggatcaagaacagatgtcttggcttattgacttcacgggttggtcaatgagcactagtgtgcctattaaatctgccagagaaactattaacatactgcaaaatcactaccctgagagactagctgtagctttcctctataatcctccaagactctttgaggcattctggaaggttagacgaatcacttcatctatgactcatagttagacaatacattggtttggttaagacaactttgtgtgtgttttgttcgtctatatgtgcaggaacatgcaaagacattcgtcaaggtgaagtttgtttacccaaagaaccaggaaagcgtggagcttatgagcacatttttcgacgaggaaaatctcccaaccgaatttggagggaaagctttgttgcaatataactatgaagagttctctaagcaaatgaaccaagacgatgttaaaactgcaaacttttggggattgtgtaacagtaacaataaccagctgcacgcgagcaacgggttttctggagctgagattgcccctgagccagtccaaacacacccttgactgtttttaaaggcaatgtattgttataaccaacccttttgaatcttagctcttgatgctaactagagaggttgtatgatttagacatagcatttgaataaaataaagaggggttgtgtgtgtgtattagtaactcttgcaaggcttgtaagtgaatccaaaaactctttacactcataagcattttattaacaggaagcagaaaataagattcacattaccagcaacaagctttgtttctttcaatctgaatctgaccaaacacaagaagaagggaaaatgaattctttcaaaatttgaaggcacaaagagattaaaaaaagtacataaaacaaaaattatactagacagcagtattagcttagactatatagcttagagttctgcagtcaaaagtgatgtgcaacggattggagttagagcctagagggagagagagagagtaggcaatttgaatgaaactagataatcctccttctgaagtttctggtggttgattgataggtgcgaaccagcaggccaaccccaatgccaaaaacctacacagacaccaagaccaattcccacaccagcgttgaaccacgacatctcaccatcttcaccatctgcgtactctctattccaatacatgtcgctgtgttctccttcatattcttgtttactgaattggaaataggcccaacaaaatgcgacgaatgttagggcccattaatggaaaacctatatttatatagataagcaattagggattgcgttgccgcttagcttcgtctgaaaaaagggggatcagttccgtcgccgcttcttcgatttttgacgccgccgcttcttcttcttcctcgcaggtacgttctgggtaacttagggattgcgtcgttgtcggaaactgcaaaagcttgtgctgtaggtttcgatttgttgtttttttttttgtctctgtagcttttgaatcttaggtttggttagattcgttaataagataatggaaaagttatgaaatgggttgatttttattaccggatactgccgctgcatcttcattcttttagttttattgtatcaatggcttcgttgtttttataatcacattaggcctctgtcaagttcagtgttatggtgatgtatatttcttgattcatttgcaattctctagacattatttgacattgcatttacatgtgattcctgtgtttgtttagtgttacacctgaatgttgatgtttaagacacaaatcaactatacacttggttgtttcttcatttgtcatatgcttatggatctctattgtttctatttgacattgctgttcatatgtttccttgaactatgattataacaatcgatgctttaggtgcatttcttgatacataaatggttttaatttcatgatgtaattgaatcacggattttgaaccctaactaaagacatggaatttctttggtttttcccctttcagcaggtaagtcacacaggtaactgaaagatggggcgtgttagaaccaagactgtgaagaaatcttctcgtcaagtcatcgagaagtactactctcgcatgactcttgacttccacactaacaagaaaatccttgaagaggttgccatcatcccttcaaagagactccgcaacaagattgctggattctccacccacttgatgaaacgtatccagaagggaccagtccgtggaatctcactcaagcttcaggaagaggagcgtgaacgccgcatggactttgttcccgatgagtctgccatcaagactgatgagatcaaggtggacaaagagactcttgagatgcttgcttctctaggaatgtctgacactcccggcatctctgcagtcgagccacaacaagctatggcaccaatcgctgctttcggtggtggcagggcacccagaagatactgagatggctttgttatcatcagccaatcaaggcaaacgactggctctcttttttcacagttagggataagaaagacatgtgtgttcttggaaagtttattgtttcttttgattcaagtttttatgtcttaaactcagagtgagactctttcgtattaatgggttttgagttatgtggaaccaaaattggagttaaaactttcgatagtaacaatatcttttgcttatcagatccgagttgattcatgggggagaaaatatcgaaattcacctgaaactttctcgaaagttgggttaatacttatttggactttgagaagggcaatttggtaaaatttcaaaagttataaggattatgtttcgttataaccagagagaagagatactagagagaagggaaagatagaga

SEQ ID NO: 1026 - DNA, 3000 bp, Unknown
  misc_feature (1)..( 3000): cDNA_ID_2129201_gDNA_ID_1620349_Annot_ID_154254 3000 nt of promoter + ATG
cgaattaatattagcaacattagccgataaagaatactactcttaagggaccaaagcttatcaatttctacacaaataaagtaatgatgttaaataataatgtcttaagaagattaatgttctctcacctttttgcatttggtatgcccattgaaccacacgcattttcagcaacaggtgaacggttgatccctttcaccgtatcatccaagttctgaggcggtgtctgagaaccataatccgaaaaggcagaagcaatagggttgttagagaagctagagttgttctttgctcttggcgagttgggaccatatacacaagcagactccaagtccccacaagcttcagaactcaaactttcttcatcctcactttgatcaaaaccagaaaaagtagcagaaatgtctcccaaaagcacaactgagtcgctagctgagcggcgcagaggacctcctctagtgagcaacccatcagttttgtcacagagcaactcatcaagccaagcaggttgatcttcgagcctggaatcttgagtagaagacttgtattgaccaatgtatgattcaatgggtgaggaagaagagtagaatgtatctgcaactggactcaaagaaagtttctttggaatcgggcaacgaggtggaagcggagcaggccttgacatgattcgaatttacctaataaatcaacaatccaaaaaagctttcttagctaaaagtaaacttcacttatcatcaaccttaagaagctatagcttctacgcaatgaaagcttccagatattcaattctacagctcttaaagattgatttttattctcagctagcaaacacaaacctcaatcccagaaagaaagaaaaaagtatttttttagtaaaacaaatttgtgaaattccgacaaccattcttgtactaaccccacaagacaaaagagtgaaagaaaaacaaaaatcacaagaagaagaacaacattgaatcaatggaacagttaccctaaaacccattacaagattttaagaaacggcaatgaaaaaactggaaatttcagcagagacattaaagagaagagaaccctgaaatctacagtgcttttgactcgaataatgagatacataaacatcaaacagaccaaagcattcaacttgtcaatcgtcagttgcttgtttacctccagggaaaaagaaaacaaattttcgccggcgaagatagtaacggaggagcaatgcggagtaaaaagagagcaaaaacgcagagtgtaggagaagaagaaaataagcgatcgtctctttctctttcactagttgcaacaaaaaagaaaaggagaagaatttattctgttgcttgctttatctctctctctttctcacagctgcgtataaatgtataacgcagaattgaattgtgtatttgaaagccccaattggctggaggaggaggcgtacggacggctcttttgggccctttgagttttttttttttttattatttggtcaagcaaagggttcactgacccatctccatccgtacttttttgttataaaatttttaaaaaaaattgtttatatttgtgttgtcacattgattaagatatttgatctgattgtggcatttacatttattagtctagaacgttcgggaagaatttattgtaaagaagtgagtcttttaagtgtctttttaaaatgtgatttgtgatggtggagaagaagtggtggaatttatatatttggggtcatcaaaatgttgaatagttaaaaagtaatgatctaactaacttcgcttaacacatatttgttagtaacgttttgcgtattgattaccaaagtggcgatgtatctttaaatagttgttaaccaagagatttttaattcaatcaagggcctcgttttggcctttttttttttttgtttcgggtcaaagatttaagtttaaccaaatagagttgaccaataaaacagctgttatcagagaaccaaataataataaatagagaaaaacagctgttctgcttctccaaacgtttagtgttataatatttattagtactttgtgtcgtttacgcaaagttgagattttttgtattctcatttgtagtattaaattattattatagcatgaaataatgaaaaaaacattattctttctgttcgttattattccaaattttaagttttgttacacctattaaaaatagattataaatttattccttttgtgattaataattttttacaactttaaaccaataattttgtagttatttatttttgaaatctacaattcatcattaataactacttaaaaatacatagaagacttcaaaattatatcttttgcaacattttttccattcaagaatttagattaataaacaaaagagggagtatatattaacagagtaatggtactaatgattagcattggaatgttaagacaaaaatacatgtcaaagtcaaacaaaaattttaagcttcaaaatgaaggtaactaaaatggttcggaaaaagaatagtcacctaccgtatattttgtttgaagatctgaaatctaattattcctcatctttgctttaaatttttgtgatacataaattaaatagcacgaatcacattttcaactttgtaatatttttcactcatactaataattaaaagggactaggaaaaataaaggcacattttctccgttggaataatcaacggttacgtatggagaagattgtgtcacgtggaagctaatccaccacgatccagtttcatctctattaacaaagatcactccttccctcgcttcaattttagtttctattgttgttcatctctcaatcgtctctttcgatattttctcaggaaaatctttacaacatccgtggagaagcaacaccagaatccgaattcaggttcgtttccttgtacgatctgattattgttggtttgtggatgagagaggctcttcatcttcttcttcgattttctggtgatgtgaaaatgaaacagcgatg

SEQ ID NO: 1027 - DNA, 3000 bp, Unknown
  misc_feature (1)..( 3000): cDNA_ID_3060218_gDNA_ID_1620349_Annot_ID_154256 3000 nt of promoter + ATG
attataagccgtgatgggctgatgaaactcacggctcgagtatttctcgcatcaattgatcagagaagcgagagagctgctggagaaagcgcctgcacagctctagttgcagtgatggcacattggttaggatccaacagagacataatcccaacaaggtcagagtttgacagtcttatcagagaaggatcatccgagtggagaaatatgtgtgaaaacgaggaataccgggaacggtttccagacaaacatttcgatctcgagacggttctccaggcaaaagtcagacccatctgtgtagtccctgaaagatcattcatcgggtttttccatccagagaaatcagaggaagaagaaggaaaagaagatgctagtctagattttctcaaaggtgtaatgtcctttgacagtatctgggaagagctcatgaaacaagaaccagaagagtcggcaagcgaacctgtgatctacattgtaagctggaatgatcatttctttgtactccttgtgaaccacgatgcttattacatcatagacacgcttggagagaggctctatgagggttgcaaccaagcgtatgtcttgaaatttgacaaagatgcagagatcaaaagattaccatccgtcatcaaagacaacaaagccgacatgggaaaccagaaacaaggtggtaagaacaagtctgagcaacccgaaagatcaaaagaatcagaagaacaagaagaagaagaagtagtgtgtagaggtaaagagtcatgtagagagtatataaagagctttctcgcagcgattccaatacagcaagtgaaagctgatatgaagaaaggactggtttcatctttgcatcaccgtcttcaaatagagcttcactacacgaaacaccttcatcaccaccaacctaatatgtttgaatcctctgcaaccgaagtaactgtgtcagaagctgctgtgtctgtgacagtggcttggtcattggcgagccaattcagcaatagtggtgggtttagttgcgaaatggctgagcttttgggggttaaagtttaagagaagtgtatagagaaaaggagttttccttctgtgtgaattttgatgtttataacttgataacccctttggtgtttttctggctaatttgatgttcataatgtcttctgtggagatagacttttactcctcactccaataatttgtatttaggaaatttaccagagttattataagtatttaataaaatcggtaactgttttttcttaaatgttattgaatccaaaaccaaaatcaatatataatagaaaagttttctctctattcagaataccgatatcagtgtgacatcgtctacttaagcatccatttaaataaaattacaagttataatttatttacaatgttcaatcaatacataagtggatgtgtctagaaaaccactcaaaccttcaaaatgttaagaaacatccatgagttaagccagtctcaccttccatcttctaattcgtcccaagcaaataataagcaaaaaccaagcaaaacataagaatgaaaaaaaatgttttcaagacttatattttagccttgtcgtctcggtcgatctttggttctccataccatttttccatatctcaatacaaagctaaacagtaaaaaaaatttataaatagttaaatactcatatgtttctaatagattattattttggaataaaagttgatatatttacgtttttcacattttatcaacaaaacaaattttttgatataatttacatatcaaatatttttaatgattatgaattaatatgcaacgggacttgtttcattggaatcgggcaacgaggcgggccttgtcattatctagaattcccaataaaagatcaacaattcaaaacctataaagatcaacaattcggaaaatttttaacggctctatcacttttgaattctaggtaatacgtttatctcaaacttactagaaaaaccaaaaacaagttttcaactacaattgacactcttggcaattcacagtctgtaggttgcaggttttgatcttcactgttctatataatgataagaagaagagtgaaggaaaagcaactcactcaccatgattaactcaacgaatcaagactttccgcttccaccacatcagtctcactcttctttcggcttagtggtgttgttcggagtcatggcggcatttgcatttgtgatcgtggtggttgcggcagtgtgctactgtctgtaccaccgcgagcaagctcgtccatgcgtcgagcaataatgtagaaaaaaagaagcaaaacataagaacgaaaaataaattttttggcttagttaagccagttttggcttccatcttccaactctgtctcaaacaaataataagtaaaaaagaaagtaaaacataagaatgaaaaataatcttttttagactcatatcttagccttgtcatctcggtcgattttcagttttccataccagttctccatatcttatacaaaactaaacagttaagaaattttataaataattaaatattcatgtgtttctaatagattattattttggaaaaaagaatttgatatttttaggtttttcacatgttattaacaaaacaataaaattgtggttacatcaattatttttaataattatgaattaatcgtaatctaagaaatttaattatttctactatatgttaatgaaaaataaataataaataaaaatttgggaacaaagtaaaaaaaagagccggcgccgagaattaccaggctacaagcccaaagtgttttaaggcctgttattgaaaaaagaccaaaaaaagtaaaggacataatttacatgtcaagatttacaaatgatgccgatttattttatttgaatatataagctatggccggacgcaaataagtttaatcgagttcttcttcttcggagaaggctttgtgtctgtatcatctgattatagcgcagagagattagttgatttgaaggagaaacatg

SEQ ID NO: 1028 - DNA, 3000 bp, Unknown
  misc_feature (1)..( 3000): cDNA_ID_1534508_gDNA_ID_1620349_Annot_ID_154246 3000 nt of promoter + ATG
tgataaaaagaaggtatgaaatttctgaattgaaaaaaatacatagaaaggaaattagaagaggggataaattggtgaggtaaattttgaatcaaacattaaattaacaaaaatgtagtaaaatagggggaaaaaaaagttttttttttttttttggaaatgtgtatgggctagtagcccaaaaacaaggaaaacacaaactattggactggactgatcaaaatagttaatgagcggttttggtttatgtaaaaaagagaatgggccttttagatagactctttaaatagaatttgacaatctcttaagttatctatttatggataaataagtgatccaactttaactaggtgaatttgacaatcttaaactagtagggagtctcactcatgaacattttacatatttatttttaaaatactacactttcttgaatacacagctttttttttgggtgatataataaggtatcttcaaaaatttatatatgaaatcagatcctaatatcttgcttttactgaaaccaaaaattgtgtttacaaaacggctcacatatcggattggcactcaaaagtcaaatcacatattttgccacggattttatataacttcaaatatatggagaatggaatttttgtatttttcaattagaaaaaaatactatagggaaaacagagatgggcaggtctggcacagggcgtgtgagacgtggtcggattgaggcaacctgaattttgcatcttatctaaaattcagatttgaccatcccactcactgtataaaccactccacattatcttttttatttatttcattattactcttttgtgtacccaaaaatgtgagacttattggtgaccatacaagtcataatttattcttgtcgaaattaatttatatataaatgtatgcgtatgtgtgttgtagatacgaatatgtgtcaacgttgctgacactaatctaattatcattattgtgaacaaagagaggcttaagagtgttcgattgaagtagatatttaatactatttgtttggataaggtagtgttaattcaatgcagtgcgcggccaaccaaaaaataaaaagatcaattgcaacgtgtatccagttacgggtatgattgggagcgatagaacttttacataaacatacacaaatcattctacaacactttttaatcaagtttcatagatggttagatgagttctattcgaattaaccttatagtgagttttggtgtggtaaaaatagtgttgattttggattacatatacacatgcggttagttggtggtgttggtgattttggattttggatttcagtgaacagcatcaaaggctccgagttcgacccatgaaaataaaatcagtcaatccattgcttcttcttcatcttaaagcgtcgagtctaatgccgatttctctatggagaatactcatcaggatcatgatacaacctgcaaacatgttgcgttgcccttatcacagagaacagatcactcatcttttttttcaagaactcactcatgcatattaccactcacacatactatcaaataacacggcactaacactaaaacaaattactaagttacaaactgtaccaacacaagatttgcggttatttattcctctaagtaccaaactattcgtgtcctcgttttaaaacatttaaatgcagagacaaaatcagttgaagaagaccttaattagctgcaaatatgcgataatattttcctagtaatgccaagttgccaactataaaaaatgagaagattgtcgaaaagaaccaactaattacaaaaactcatttcctcaaattctggtcacgcttcgctttaaacctgtgtgcttatccattgaaaacaaaacaacatcccacgtgtcaccttctttgccacacgtgtgaatcttaaaccacacatagccgttagaggtaacgtcgttaccgtgtcttatgatatacggaagttaacgccgtttgtttagttttttctttttaacgtccgtgacggtttcataacctcgggaactaagtaaggaagagcttttgaagcagagagtcgttacgtttcaaacaaccgatcatagtcatagacacaattatggtattaatttcattaattagtactaattccctatcaattacaaggaacgcaattacaaaattttgtctataataacatcaattttagaccctcatttcaaggaaaaatgtgggaatgattctccaatgacatatttatgattaaaaagttcatttctcaggttcgaaatattttgaccattttgaaatatactaataatgttgtttaaaaacatatcttattagaatgtttatatggtgttatagtgttgagatattttttttaaatataaataattgagtacaaatctataaatttaaacaataaagagtgttattaacaattaatgataagtagtaaaaaaaaaagaatattcttcaataaaaaccgtaattcatttttttcctattttttaaaaaacaaaacaaaataagataaccataggaaatgccactctgttacaactcagcagtctaatgatatttaataaaataccaattttagtggtttatggtcaacaaaaatagtttacaagcttagctagatgtgaatacatactatatactaccaaactagtttatgatttgtatatgaatcaataaaagcgttagcataattagtatatataaatgtaactgtaattggaccaaagagataaagcatcttgggtttagtaagcttttgagctgatgatgcttatgtgattaatgtgaatataagaattagggaacaatcttgttgttaataacaatacttataacatttaaatgcccttaagtatcgtcataattacatctttgtccctatccttctctttttcacttttcctaatctctaatataaaaccaactcttgtcaaattcaacaaaattctcacacaaaccgacccgacccgaatctggccggtgagaaa

SEQ ID NO: 1029 - DNA, 3000 bp, Unknown
  misc_feature (1)..( 3000): cDNA_ID_2129159_gDNA_ID_1620349_Annot_ID_154241 3000 nt of promoter + ATG
tacttctttgaaaagaaaagaagtgattccactggttgcatagcgttgatttgcgttatgtttgattacaagacccttgtgtagttggggacggtggttctcttcatgcttgtctgcaaagttggggtggactccatgagccatgtctgcagacactgcaaccacaagaacccaaacacaagtttcagtagaaattagaaagtaagagataggaaaccatcccaattttgtaaccactgtctcacaaaaattctggaaactacatatgcataaacaactgcaaaagtagaaagtgtgtaccaagaaacgatttccggatagcacggtcaaatgtacactcagtgacctgcttatttcctagggaactcacaatccgtctcattgcttgaaacatagtgggcgccccagcaccttgacatgaatctgaaccaacctattgaaacaacacatttttaggaagaatttttacaaaaaggctcagacggttcaaggacatcatcagctcaaagcaaaaaagttatggaaggttaaatgcaagtcctctttattcaacaattttcaggacaatagtgctgctagtatgttactcgatttgaaggaacctaataaatatcttagaggaaaagggtacctcctcgttgtcaaataaagctatcatccggatatcatgttcagtcgacagattttctgatgattcacatgaatcaatgagagctctcaaagcacagaaacttgatgcaagattatcaagtcttccagagaatatgaattcattatttgctcctccaaggcagctaggttgggtgtcacagatatttaactcaagactcactatatcctcgaccttacagtccaggtcatctgacaaaatctgcaacacgatcaggaaactttgagatatttgcggattttacagttacccaaatttaaactaaatgatacaaaaatttagcaacactaatggattatgatgacactatgatagaaactcgaaatgttggtaatgatacaaaaatttagcaacactaatggatgatgatgatactatgatagaaactcgaaatgttggtaatgatataaaaaatttagcaacagtaattccacagttctcatgatctaatatcttagaaacttggtgcatgttcagaaacgatgcagaggaatgactctagtgactaaccaaattatgtcatactcatacctgcatgagtaatggatgatgagcatctttggaggatacatttttgtccttggactctgctgaggattcatctgattttgttgccagtagcggaacaagttgggtctccaaatttggtttaaatccatcactgttcactgtgctaaacaatacacgaagaacaaaacagcatgaatgagcttcaaaacataactccacttgatggcaaatgcattagcctaaaacttcactagacaagctcatgaaagaaatttaccgatcaagatgaatggccaaagtgggtacccttagtaatggccttttcactttgacaagcctatgaacaaacgagccatcactggctctcacaattgctcgccccgcaacacttaagtctcgatcaaaccatgtgtgccacaaaccacctccataagtctgaacattcaccatgagatagccagacttggatgaagcagacttcggtttaagtttaagacacgggctatcggtgtgagcagctatggcatgaaaaccattaccaggcacatacctacaaaatgaggaacaaatgtaggttccctgaacccaacaaataaggaatctaagaaagaaaaaaaaaacgatttttgtgaagaacccttcaattatcaaagcttgaactagttccaggattcattatcaaagccaaaccaaatcttataccatggaagcataattgaatcggaagactcacttttctccgacagcaaaagcaaccaaacaggacatgtttcgtgtaaagaagtaacggccaccaggtttcagattccagtcttcgttttcactgaggagatcaaacccagcagccaaaagctgtctcttcgcctcagctgccagcaaagagaaaaagaccaatgagagtcgtcacttaaagttgaataccgaaaagaaaacaatatttcaatataccagtggcgtgaaactgtgtccaggattcattaagataatccagaagatccccaacaatcgacgcattagaatcactccccggcgatctcgaatcgcgatgggaggtgcagaggattggagagacggaggagaaggagcgaaagggagagcgatggagataagtaggaaaagagagagactgagagaggaaggatgaaggattgaagatggagggaagagaatgagttagtggaagacgagctatggccgccattaatttcgctccggactctaaagatgaggtcttcttctgttatctctaaagtctaaaccatccgccgacgattaccatccgccggagatttgaagaccacttcgacttcgagaaccggattttgtttcttactgtgtgtccccagtcttctaatcttgaggagctgagctgagggccatggcccatgaggattatatgggctatggtgccacttctatgggctttgggcccatgtactcttcacatgattttatttggaccaaagaacctttgccttttatggtccacacttgcatcattccaattttattgaacgcgtgttaaggacgtgtctttatgtattgggccttattaggcttcagtactttgcccttgggccttattagacataattacatgaaagatgatgacattaatttgccaaaagtctttatctttattgggtctccgtagactttaccaaaaggtgactgcaacgaagcttcgttaatgggttccacaacgtcacctacttgtttacttccttttgttttgtttacttcgttgcttgttactccactcttccttgccttttcttctctccacttatctctctctctttttctcatcggcctttgcc

SEQ ID NO: 1030 - DNA, 3000 bp, Unknown
  misc_feature (1)..( 3000): cDNA_ID_3060279_gDNA_ID_1620350_Annot_ID_154282 3000 nt of promoter + ATG
tcctcactctgagttacctagtaaatcgtacttgttctgcaggaggattgcctgcttgttctttacatgtcgacgttgttgtggttttgacttgagttgcttcgaatcgtcaatactaagatcctctatatagtcaaaggcaaaaacattgcgaaaatattgtcgtttctaatccgattgaccttaatcttcggcaaggagtagatatactgtgaccattcctgtttctcaacatcctctagaacccacacacacaactcacggggatgtccatcaccagcatcacactccaatttagtcacacctaatttacccttgtagtttataaattctctatgaaaattagagaagtcttttccatcaagaaacttgaatttctcagacctaacattaaaggaaactactagaaaacacgatgtcctagcaaagtaatacaaaaccccattgatggataaggctctaccataataaggttcatgggttaagggacatatcatcttcctccacttcaaattttcagttcctaatgtcagaatataatgaacccattctttattgagtctcttgttcatgcacaaaaccttatgttgcttgccaatcggatcaaaccctaaaaagcttcttgacgttttgtagccatttgttcaggtaagctaacatagcgtcctgtgatagggttaaatatcacacaaactgaagcctttgaggtccaaatatcatggacagggatatggaacaaaccagagacatagctacacatgtataggttcatgtcttcatggaacttcatatgattatgaaaatctacttcaagggacggattctgagactgaggcgaagagtagaatatcaaaccacttgcttttaagaccgcaaataaaagacgtggacgagcggatgacttcgttatgaacaactcggtgaaatcttgacggtaaagtatggacgcccatagcttcgacacgcaacgacaccgagcgattgactttgaagacaatctcaatgctatctccacaaagagatcatctggaatggaatcaaaagtttttctactttccatgatcagacggagaaagatctttgagaataaaaatctcacaggctcactctacaaatagatttggaataaatctcttaagaggtcgacctaattaattagatgatgttaattaatcttagggaggtggtggtgaatttgaatcctattaggatcgatcggcactaattaacctaaggcccaaaaaatatgggctttttaaccatccaaatcttgcttttttgaagaccctaacatatagtatttcacaagaagtcaatcaagaaaggacatgatacttcatttttggtcacgctgcttcgctgcgtgactcacgcacatgttaacttatacctaacatatatttcccaagaagtcaattaagaaggacatgatacttcgtttttggtcacgctgcgtgactcacgcacatgttaacttatatacctaacatagtattgccactcattcatgaatttttttttgaatgaaattatgatatgatactgtgaacgtgttttttcttattctattcatgattttttttttgaatgaaattataatatgattctgtgaacgtgttttttcttattctatgcatgcttacgttgtacgtagtgttggctaaatgatttgaggggacatcactttaggttttagtcacaaaatcttttaattagaaaaaataaaccaaaatgatccctcacgtataaaatatctaagtctgaagattattacaaaaaaaaaaatgaagaaataataaattttcaaaaagaaaacaaattagatcaacgtcagtatatattaagggaaatttgcagaaataactagcaaaaaaactataatttactaactaaccatcctaactatgtaactataatattttctgtataatatgtaatattactaaatttgccattgttgcctcaatactttcagcagccaccaccaccgccggccaccatctattccggccaccaccaacactgatcaccatcaactccggccagcaccaacttcagccaccaccaccaccgaccaccaccaccgccaccatcatcaccggccaccaccaccaccggtcaccatcaccaccggccaccaccaccgccggccactaccaccacagcaaccaccacaccgatcaccatcacttccgaccaccatcaactccagccaccaccgccagccaccgccggccaccaccggccaccactactacaatctccaaccaaagaaactaatttaataattttactaccctttagtgttagtttctacatttgacatattatagtagtgttagttttttaaataaattatcaaaaagtgttagtttcgcaattcacccatatattaaactgaaaaaaacaataattttttctctcacattaaattaaattaaatatttttttaaaatacaaaaagttaaaaaaaataacgtagatcaatatatgaaactgaaaagaaaaaaaaaacatttttactcacagtaaagttaataaatattatttttaaaacacaataaaatgttggaaaaagtcaaaataaatttcgtttgaatgtgcatttaataatttggcttcagcgccaacaaacacaaaagctataattttccctctccttcctttcttcacctcccattctctgcttctttcttcaactaaaattctttttccgcagagatcgatttctcaaatctctgtatcatcttctccattgtttagaaaaactagggttcttatagatcctcttctctctcgtccctcaaatctctcgtcgacatcatcttacgaagatccacaacaacatctgaagaaaatcgcaagaaaacatccaatttcacaaactctaggtttccgatttcttcttccttttctctaatcttcaatttgatcaatccgttgcaaaatcgaacttcaacatctgtatctaatccaagattctcaatgatttcaggatca

SEQ ID NO: 1031 - DNA, 3000 bp, Unknown
  misc_feature (1)..( 3000): cDNA_ID_2129711_gDNA_ID_1620350_Annot_ID_154298 3000 nt of promoter + ATG
tgataatggagagttttgcctttaacatacgaaaccacaacacacaccactgggcgctggctctcacgtccgttagactcacatcatcgactttcatgcctcgactcttcccgtcttccgccattgactcttaacgccatatggacgcacgcttacccattttaggccatttgtgtttatgctcttcttacttttcccccctagagaattgacttcacaataatcacctacatggacccaatcacaacggtcgtcaccttagaggaaaattcttacacaacatgtgatgaccgaaagaatgcagcagcccacacatcacggaaagtctatttaattaaggttttgccacttatacatttttccaaataaacaaaatttcgtggttatttagttctattagtacctaattttaaatatatgactaaataagagttattcgtaagttaaataaaatttaacctagttaaaaaagaaagaaaaagggtattatcattagtatccatgaacttgattattagttggatgattggatcaacatcatttaaatacttttacccctacaacttctcttcccttttttttgctttcttttacttctttggtgatttttattttccgacgacacgagaacacgggaataacaatgacaacataaaaatcaaatcgagtaaaatgttgaaatcagaagctggcctgaaaagcaacttgaaatggactaaaattgaaggatgccgtgtgtttggaagtatgaggtgagacacatgaattcagttccattgtcgttgcagaaggctttaccttgtttaccgaattgacgttcagacattgcacaaaagttacgaataagttgcgaaacttcagttttgaaagatatgagatatgtccaaaccgaatgagaatagtcatcaattaatgtgaaaaaataaacagcacctgatgtggatggagttctgttcgaccgccatacatcgccatgaattaaagaaaatatttcattgttttattattgctaataggaaaaacttgtcgtgtttgtttagaacaaaaacaagtatcacaactatcaatcttgtcaaaaccttacaaaaaagatgacattctggtaaagaaagtaaaatactagtagaaaaatgtcctagtcgacgatgccacaaatcgtcaagtactatgcatcttgttacagaatttatttaatttaaaatattcaatcgttaatgaccggtaccatccgcaaacacagcatttataaatggtaaagaagaaccaatcagcctctaaaagtgaaagatcccgccgagaatccgtttggacccaaagcaatcaaatttggtttttttagaaacctttttttattaaccaaataactgaaaatagtcaaaatacaaatcgtgatcaaagttatcactctatcacagcgataattgaagtacatgatatctaaatattaatttctatccaactatactttaataacaaattctttatttataagaaaacccatcacgattcagttataaagcacaaactttaatatgaaatgaacagaggaatcttcctcatccaactaccgaacaacatattcatgtcaaagatcttgagaaattaactttaaaatctactctttctacttcctactttttcacctttctagtattaaaataaaaaattgcaatgttatttaatttatacctttttaggattttataaattcacctaagaaataaaaattgaatctacttatttttatgttaatggatcaaactggatcaaacttgtcggaccccacacttcacttgatcttcagttttttttatataatgaaattgtactgctaatctaaaatgtaagaagatatacaagactagatcatttcaatttatttttaaaaaggatatttagttgaaaaatctaatcaaccgttatcaactttttactgaattgtatttaatatttgtaaccaatttataaacaaatagaaaaattcttatcagaaaaacatgtgttcgaaaaagcggtttacgcggttgcctaggagctagctgttttggtcgcctaaaatcatatatattttgtttcattgtaaattttcaatttccaactacataaatttaaattataagcttaagtttcctatattgtttgatatgcattaaaatatttatttttatctaatttttgtttacgatttaatatttttttaattttataatagaaagttttatatgatttttgtctataatatcatatttagaatatgttttgttgtaaacgcttaaagtgcctaaaactgttttatgttctgattaagcattttagacgctagacattgggttgttggcgtctagcattttcttgtaaaattcttttgtctagtattagttatcaaaagatttaatggttgaacaccaaattcgaatcccgtatatgatcgcgtttctatattattatatctctacaatatgatcaatgattttgttgtactactatcaaaaatttattctctagaattcacacatgcatatattaccgtgttttgtcatgacactttcccaatattacacaaacgacttataattcgtgataaaaaaatatattatgctttgaaataactcttttgaacaccatcatgcttattttcatgctaggagacaacaaaagtgacaaatatgtcatgttttcccacatactatccgaagccatagaataagaaatatacatagagttggtgtaataatttcttgttttttctctagtaagttcatttatcaatcttctctcttgagcatgctgcacttaagacttgacttagctttctatataaacacttgcaaacacatcctcctagtctcaaccacattccatagccatctctctctccctctcactctttctctctttctctggtctgtttcaaaacatagtacataataatagagacaacaagagaaagaaaaaacagagtgatctgttttaaaacagagcagaaaacagagtgagatg

SEQ ID NO: 1032 - DNA, 3000 bp, Unknown
  misc_feature (1)..( 3000): cDNA_ID_3060252_gDNA_ID_1620350_Annot_ID_154295 3000 nt of promoter + ATG
ttgcaaaggcgttccaggttgacccaagggttgtcatggatctacagaccaagttcaagaaataataatatcgtacttttgaattgctatccctttatatatttgtgcctgaataaggatcgtgtttctccgtccatcctttcgtgacatgatctgtttctttgcttcaccttgattcaattctaaataaattaatatttgcacatatgtttttaaaaatgtattcatgttcctaatgtcagtttggaaattcacaagttatcactattctggtggagttttcttcaacaaaacaaaaacaacaacaaaaaaaccatattcattcattacaaaatatatcaaagtctctagctcattgagagatttttgccttcagaatcccttaacaaaaaacagaaaaaaagaagaagaagagatgtttcgccttgagaccatccacattgaatagcctctcatgttgtcttaaatactaaacatagttaaaattaaagacatcctcctttttggatgtcaaaaatgtctttcctatgacattttagacactcaaaacagaaaatgtctttaattaattaattaattaatttttatttatttttttaatgtctttaattttaatcatgattaaactatttttaccatggttagtctttgagacatccatgagaggttatgcaatggagatactttgaggaattaacgtttttagctaaagaagttaaagactaatcacgtgccatgagcatgggaaattttactcggttttaaacaaataacttgctttgatttatgttttttcttcttctccatcttgcttgttcaatttgtatcaaaagacaaagagaggaaaattcattgatgtggcacatatatatggctagtgctctacgatggatttaccaccgaaatacgggttcggatttatgtggaaaaggtaaaatatactccgaaaacattagttatatatccaatgatcaaaaatcgatatatagacggtaactaaaacatttgataagagtctggggccttattagtataaatatgggttagaatattaccatatatctaaatcctcaatatatttaggtttagccggcgcctaaactatcttgtaatataaatattttcctctagatcaataaagattcaagctattctctcaactttggcatgctagcagagccaaacactaatagagccaaacactaattgatccaaacacacaaaactcttctctcatcacatagattttcactatggtgaaccctcctccctcaccaaactccggtaaaagtacttcgacctccggaataactaaagattcttctcaaatctcaaactctccttattacttatatccatcggatcaccctcatcaagttcagttaagatttgctcactcaaaaacgtcgtctactttttcttgagaacaaaccacacacaaaacacgaacaagaatatgctttgttttcgaaacagaatattgagaacatagaaaatgtgaaaccggaaaagatgcaagatgaaagtgcaagaagtaagaacagagaacacaagagcaggtttgataacctagttcactcccaaaagggtagctacgtctcggccgagactgtgctcggaatccactaaatcagagatagtgtttacaaggagaaatacaaatgaccactcgatacctttcactagtactcaagttcactctgtatcactctccttctaatccagttttccacgagcgtatgaaacacattgaaaacgactgtcatttcattcacattgagctcgtttcaggaaacattgcaaccgctcatgtgggcactaccgagtagctaacggatctccgtactatagcatttggatgttaacaatttcagtatttatttcgcaaattaagcgtttataacctgcacggtccaacttgagggagagtattaggataaatatgatttggaatattaccatatctctaaattctcaatatatttaggtttagcctaaactctcttgtaatataaatactctcctctaaatcaataaagattcaggctattctctcaactttggcaggcctagaacgagagtttaggcagaacggagcctaggccttaagaaatttattgtatttagttatatacatgttaagattttatatatcactaattatatatacctgcctccattttgaaaagaaatctaacaatacattcccttatttcaaatttaaatttgaatttaacatagaagaaaaatctaatatcataaagttcaaacccaaaaaataattaataaacagttaaaagctaaatgtcgagatgatcaattgaatcctttttatatccgaatatttagttaaagtacgtcgtatgatacgacataagcattaaacaaaaaaaaacttaaatattaaccaatttgagcaattttggccaatttgaactgatttagactgcctgaaccggatttctgatttttcccagtgatacgatgaaaatcgtttcggttgagaccacctagactgcctaaacgggccctttgaacgttttttttaaaacattaattatatcttatctctatactattattctcattatccattaattacatttggtttatatagtcgtgtcttatctaagaaacaatcaaacagatacaccaaatgctaacaatttaacacaccccaacacgttcacattgaccttcccttcgagtaatcactcaataaatgtatatcaaacttcaagtgcaccacgtttcgttgggaaataattttttttttttcatcaacttgaattttgaattaaacataatttgttcaagaatgtttttttaaatacttttaaccaagtcaaatatcaagttcattgtattacttaatttcttggattagttcaacacgtaaactcatctataaaattgaagtctatgtctcataagtttcttatctcttcaatacaatcttattccacaaacataaaccctcttcctatctttttaatggca

SEQ ID NO: 1033 - DNA, 3000 bp, Unknown
  misc_feature (1)..( 3000): cDNA_ID_3060244_gDNA_ID_1620350_Annot_ID_154302 3000 nt of promoter + ATG
catttataatgaacctgcaatattaggcccatatgtttattatgatttcttacatctttaggcccagattttaatcgtccaggctcaatattaggcccataacgttcggtttgtagttgtacaatcgcaaaaaacgtaggtagtcccgctagttcagctactgttacttccactaactatccttcgtctctacagagcatcaaagacttccatgtctttacaattcagtcctcacgacacctctgtaattacccttttgccctctgtcctccataactatccttgtctctcttccctctctatttctcgcggcttcaccaaaatcaataccccaagcgttcggatgatgatcattttctctttttattactatcatacacggccgctagtcccgctactgttacttccactaactgtagcatcaacagtagtgggcttttactattttaacatcaacttcaactaaagataatcgacaagttgtaataacgaaattgtacaaatgtttatgtcagtatgtaataaagccacaatattctctggcgaattattggtaaacaacaaaattgtggcaaagaaaaagtgatcctgttacagttatttggaaagttagaaaaaaaaaataaaaaaaatccatgaacaaaaaagaagatggctggcgttttcattgaaaaagtgatttgatttgatttttcttttttaaaataatactttgaacgtaagttaatgaataacaaaccattaaaaaaaaaagtaaaaaccaatatgatctaatatcttataaatatatataatacattaaattataaatgaacctcaatcttgatacctaaatctatatcactagattttaacccgcggtataccgcgggacgatttattttttaaaagtaatatatattaaaacttgcaaattttatttttacataatatttatattttacagtttataattgttattaagtaacgctataccatgaattcatgagacaattgttaaaaaaactgaagttttaacccctattaaaacagtatattaataatattttaaaattttataaatattgattcaaatacatcaaccatataacccaattccaaaataaaacacgttctttaatttatttacccgtcccatgattttttttaaagtagtaatttttaaaatttaaaaattattttttttatataaaagttttgcaaattgtatcattctctaatacatttatattttataatttaattttatatatagtaacattatacatacgacataacatttttggttttatataattttttctaaattaggatgatttgatatgtttaatattagtggtcttaaaaataataaattaaagatttaatccatattaaaatggtggattaattatattttacttttttattaatgttgattcaaaaacccgcccctccaaatccgtcttgccaaaaagtcatttattttattaatattagttttattaatgatatgactctgaattataatctaaatattttagctaataacataggagtgcactttatttatttaataggagaatgtaccatatgacctgaatgcacttttatccaaatccaccaaaaaagtcttgcaaaaatactatagagataagaaaacattgatattgcgataaaaaattaaaaactaatttttatgtgattaagatttaattaatttcgtatataaaatattaaattgacttatttgtttataatttggtaacagatagatatttgaatattcaatatattttgcttcagtttaagaaatctttgatgatccgtctttagatccaataagccctataatctagagattaacctgcagtataccgcaggtaggcttatattttagttaaactaaaaacttttattgtaaagatgatttaaaaatatatgatactattttatttgattttaaatgtatagtaaactgtgagttgtatatgttttgttgatattatctatattgtttagtgtttaagattatacacttgtagtttgattgttaatttaagagtttcacctgtagtataccatcttgtattaatatcgatctaaacccgttaattctaggattttccagattgtattaaaaattgaatcacatctaatatgttattaattattgtagtatataagattataaattttctatataatatgtatgaaattgaatattaatatttcaaattatgtctcgttactcagtagaaagttttcttaaatctatttttcacctgttataatattatttcatgtattgaacagtttatattcgtttttaaaaattcaaattatggcatatgcgagaaaactctaattatttttttataatgatgatattatttttctgcaaaaatagaatcatataaagatgagaagtgaactataataattaataaaaaaattaatatgataatttagataccaaatgtaatttgttgattttaattggttacttttttggaaattaataatgtatttcgtttttctaattaaattaaattaattaaaatttagatatcacatcttatatgttgattttgattggctattatttttgaaaattaataatgtatttcgttttttaattaatttaattaattaaattagtatttgactttttaatccttaaagagataaattaatttattctttaaaattttatttctaatggcatacctatgtaattacttacaaaaattaaggttacatttaaaatgtacttcccaaataatatagtaggataattataaaaaaaaaaaacttaacaaaaccaataaaaatgtgtattatatatttgttttcaaataattgttttcgctaggggatcaattattttgtattaaatatggaccaaccaaagtaatcagtctacccctatatttacgttccctatccattatcgacaaaaagcaatcactcctcaagcaaatcactcctcacaccacagaaaaacaaataattgaagaa

SEQ ID NO: 1034 - DNA, 3000 bp, Unknown
  misc_feature (1)..( 3000): cDNA_ID_2990560_gDNA_ID_1620350_Annot_ID_154284 3000 nt of promoter + ATG
attcggataatttaggtgttattaagatttgtttttaaagatgaggttaatacagtttcaaactttcaatgtaatagttcaattaaccaaatagaaaaatatacaaacttaatgtaacaaaacgtagtacgttttgagattttttaagctaacgcattagatgtttagaaattaataatatgtgtatacaatagttgtggaattaatctctcaatttcaaatctcttacatatattaattgtaaacatattattttaaagaaaccttattcttacttattataaacgaaattgtcatgacgttatcctataggagaaattttttaactagtttaaataactaccaattcttactagaatattaggaattagtctggactacatccggttttatgttaaaaattgatgtttttgaaatagtttactaagtctttttatttgtttttacgttttttactatgcatagaaaaacgtcatgtgatgtattcttaacattttaatagtataaacttaaatataatattaaattttcacctttatctatctatgtttggtttttttcattgtaatttttttttctttctaatttgtacagattgacaagcctcaatgaacattttttattagtaagagattgtgaaaatcacataaaatactttcaaagtaacaaccacatgcactttcaaccttcatggttttgaactcacacaaaccatcaaaattacgattttgttactttaaaacttcaaatgacttttgtgttcgtggatcaacataaatcagaaaaatttcatcaacacaagtatttgttttccgttataaattaagatgtggttttaataagtaatttttgttttaataaaaaattaattttatttatttatttattagtaatatattttaaaattatggaaaattgaaaaattcagtattatgataaccaattatatattataatagttatggaaaattcaaatttaaaaatttaaaaattattactttctctttggtaatcgatcgctaacaataatattgtatgaagataaccaatcatatattacgtctaatgaatctatatgtgtttattatcttttttgtatcccctaaaataaaccttgaaatacctaagagattttattattttcaatatgcaagggaacatctgctaaaaaggagagacgaccgtgatctttctggtaatttatttgttggtttaaatgtgaaacaatatttttagaacttttattgtttctctttaagactatataactaacatgtcttgtgagcctatatgcaaaaaagtacacaaatgataccttagatatagaacataaaaatactccgacttaaaaataaacaaacaaagaaacttgattatctttgttttttttggagttgtaggctttgatatataacttcatctttactatcactatcatttttatccttttttggcttagtcaacaagaattagatataaaaatccgaaagtaatataatgagggatttaatgtaccttttcaaacatttttgttttttaatttttgttgagataaaatttattgtttaacaaaaactttaatttacaataataaatcaagagtgtgaaaagtttggtcaaaattataatggcgattgctaatttctttcatgaagattcactgttgaaagagatgtcttgtaattgtatttcttcactgaactaacaagataataatattattacaagagatcagcatctttagtttaagtatataacaaaatcataatattaagacttgtaactaaattaacgagattctaacacttgaactcaatggattttaatttttgcaatatgaattattttgaaattataagacatatagcatatatttagatgttatcttacgattttttgtagccaaaaaataagcaatagatagttggaaaaaagctcatataattctttgagtatttgcaattgagagattcattctccaactatcttgtgtgcacattaattctctaatttggtgtccaatcaacaaaaactagacttaaaaaattcaacgttagacaataaaattgaacgttaagtacttcgattacaaatagaataaatccaaagaattcctaaatctttttcctaaattgaaacacaattgaatcctaggcgattttttctcaaaataaagatctataaagttcaaatttgcatagtcttcatcgattttatagtgtgtaaatttataaactgagtaccaaagattcgtagggcgtgcgtattgtagaatgtgtaagcttccaaatcgaaagtccaagttaaatacgaaatagtagaaaccgaaggtgaagagaaagatagtggaatctgatgattatgatgctagtgttaaaagagataattgcctagttatcgtcttttttttttttttaggaaagacttgagaactttaggttttgtttttgtttctaatcaaatcacttaacgtcctaattaattatgcgttgatgtattttaaattttaaatttgttaattcaacaataaatggggatgtgtctttcatcaagtggttaagtccatttgaatccgtttttcctactaaagttgaattctattaaatcacgttactttgcatagtagaaattaattataaatcgaccttctcaaagtaaatatgtcaaaagaaaaaagaattcaacaataagtttgagaattaatatatacacatgttagttatggaattaatctttgaatccgaacataataacaattatgtctccctaaaaattgaaaaattcgggacgaacggtacgggcctaactgggctctaatagacgggccgggccgtttgtacatctatttaccgtttagtttatagcattttctactgtataaagtaaacggcccaaattacaacccggattcaaacccgtacccgatccgagttacaattgccgcctcactgatctctttcttcggccaaatttctgaattctctaatctctctgcaacca

SEQ ID NO: 1035 - DNA, 3000 bp, Unknown
  misc_feature (1)..( 3000): cDNA_ID_3060267_gDNA_ID_1620350_Annot_ID_154287 3000 nt of promoter + ATG
ctggaaaaagtagcacaggtgaaagttaagataaacagactttaaacatatagccatacagtgcaacatatacaaatacagcactagaagaccaaaacatatctttctgaattaaacatttgcctgaagcttaaccctcctttctccatatcttcaaattaacaagaagaaaccagcaaaactagacatagaaagcaacctgccgttcaaggagctggttgttagatccttggaaatgagtatctgtgcctatcttcccgtttccattaaactgataactcaaaggggagctcacatcagaagaagaattgtctgttacacggttgttctcaaacttatacctgcaaatagattgacatccaattgcttatgttagtccaaagcaaccctggaacaagaacttaagaaagcagagacgaaaactgaaaacttataagagacagagatacaattatcattgatcagacatatcttaaagggagtccaggaacttcagcataagtactaatttgctatatgagtttcataatcttccacttgtgtgtcaagaaaattagcaaaaatagcatgcaaggtgcatttgggtgaaccataccctgcagaatcaggagtgcacaataacaaagagtggcataagaaggaaagtcaggacacaccttaacatttcagcatctgctctgacatcaatcttctccatctctctggatatcagagtcttaatgcgtaaagtgtatgcagcaatagcctgaagcagcagaggaggacccctcagggaatttactataacagttttcatctcatcagttatttctccatcatactcaaaacccagcttggcagtttccagctctggaagtgaacaaattccatttccttcgtatgcagggaaggagttacgtattctttcaatcatgcgtgatgcaagcaaatcacatactatcctgatatttcgttctcgggttgtttccatgagaatgacatcatctgcagacttagttcctttgacagtggaataaacagcttccctctcactgttagcactgaggctgcttaacacttcattcgatgaattgacagaccgttgtgcatcatttgcttgattaacatagacttgtagccttttgtgatactctgcaaatattcttgttgcttcatcacattgttgatcatacgcttccaacaatgcttgcttgtgtctgaaaaaaggaaaaataaaactcactaaacaatttgaaagatctactgaacataactacaacaaatattttgatttgttgtatgaacagaatcaatgcatttcaacatagataaatgctgttgattgaggttcatgaagagggcaaaaagacaatcaatatcgccatacaaaagtgagaatcttaagaatgggcgatgtggcatatccatgaaaccagagaaacaaaatagcctgactaaatcccatatattccattctagggtatattaaaatcattggagaatcaacaaaacgaaagaagaatacttcagggctatatatctatggctcctgaaatcatagagaaacgaaatcgaaataccaccaaaactctaagcagctaaccatactacacatagcaaccatacttgtaatggttctgttgaggacttaacactaacgataataaagcataacaacaacaagagaaaatattaaatgaacctgagctgagtggtgcaggttatttctattgtattattttacaagtgagaagcaatgtatccaaatacagtattcaaaattgaaagattcaaaacaaacctgtaatttgctctttcatcaagcatcctcttccgctctgcttcttctctagagacctccaacattctagctttcaaatcttttctttgcctcctcactatgttcctcaatctctccacttcctttgcagctaattccctttcctgcaatgcagcttctctatcctccgcataactcgaactctcaccagtcactgtcttatccttccgccttcctttactcttactctcctccttcccaggatttaccgaactcccaatgctagcattactacttcccccatgaaccgtaatattccgcctaattctctccactgtcttctccgatttcactcggtttatcaaaaaattccatataggtatcatattccctctacaaatcttccttatagcatcaatagaaggaacatgagatttgctcgatccattatacggacctaattgcctgtaccccatttccttctgtaaccattctaatatcgcctccggtgtcggagccgagctcgataaactctgcattctctctacaactacaatacctaactcaatccctcaaatcttcatgaaacttccgaaatttctactcatactttgcgccttttcttcaaatccaaacaatcaacgtagagaaatacctaggttactcaaatcgagcgaaaacaggagttcatagacgctataaacctaatacaattcgcgaaatgcagcaacaatcgagcgaattggtactctgatgaacacagagacagaaggaagacgtagacaaacagatctggaatcccgacgactaactcgccggttccggtgacggtagatggaagattgtgacggagagatggatctggataaagagatttcaaatcgaggtcccgcttgtttattggattttcaattaaaggaatcaaactcgaatttttctgcaagtgtcgtcgactgttgaaagttgaaactgggtaataaccgcgtcggactcgggtatgagatgtatccgggtcggactaaggtatttaagtctaaccgggtcgaattgggtaataagaaaacactatgggtcaaaattagaatagtttaaaattacaaccagaacatttagggtcaaagttgaatttatataacactaaagggatggattccgaattgttttaattttctcaatctaaaacccagaggttccttcctagggttttgtttgatactctcaaatcggaaaattttgaaaca

SEQ ID NO: 1036 - DNA, 3000 bp, Unknown
  misc_feature (1)..( 3000): cDNA_ID_3060263_gDNA_ID_1620350_Annot_ID_154288 3000 nt of promoter + ATG
tagcttgtcatttattacacttgctgctattcattgactcgaacaaaaggtcaatgtgatgaatttatttagatatgttaaaatgtaagaaaaaataagttctatttgattgtttctttacacgactatatcaaccaatataaaaaaaatcccaatccagtcaaaagacccgatcgactccaagcagaaccagtccataatgaaacacttataacaatggtttagctgccaagctgatgtaagatatatagtataattttgttttcttaagttttccaagctaatacgtaaattaatcactaaatagattttttgagcgtattagtgtaacacaattggattcgaagttagattatgacacaacaacaacaaaaacaacaacaacatcgatacatattattcagccacatggccttcaccttcatgccttgtcatacagtttacatggtatatttttttttaaagtgtcgactaatattttgctagatatttttgtttatagttttggtcgttggatatcttactatattatttgaaaagtacattttaaatgtaactttattttttgtaattaattacatgacaataccattaaaaaaatttaatcaaaaacaaaatcttttaatgacgtcattaagattaccaaactcatttaactacaatattcatttcttaaatataaggcttattggatctaaaaacggatcatcaaagatttcctaaactgaagcaaaatataccgaatattcaaatatctatctgttatcaaattataaacaaataagttcgtaaaacaatttaatattttataaacgaaatcaattaaatcttaatcacataaaaattagcacaaaaaaaagcattcaacatttaaaaaattatcaaatctctgtgttatataagttttatactatattcaaataaagtgtaatataccttttcaatttgtattttttaactagtttaagctaactaatatatttgctaatcttatacctatcaaaaccgactatcgtttcttatctctatagtatttttgcaagacttttttggtggatttgggtgaaagtgcattcggatcatatggtacattcccctattaaataaatatggtgcactcctatgttattagctaaaatgtttagattataaatcaaagtcatatcataaataaaattaatattaataaaataaatggctttttggcaagacgaatttggagggacagtaaaatataattaatccaccgtttcaatacgggttaaatctttaatttattaacatatcaaatcatcctaatttagaaaagattatataaaaccaaaaatgttatgtggtatatataatgttactatatataaaattaaactataaaatataaatctattagagaatgatacaagttgcaaaaattttatatataataaataattcttaaattttaaaaattactactataaaaaaaatcacgagacgggtaaagaaattacagaacggattttattttggaattgggttatatggtagatgtatttgaatcaatatttataaaattttaaaatattattaatatgttgttttaataaggattaaaacttcagttttttaacaattgtctcatgtattcgtcgtataacgttacttaataacaattataaactataaaatataaatattttataaaaataaaatttacaaattttaatatatattatctttaaaaaataaatcgtcccgcggtatagtgagggttaaaatctagtacttgtgctatgtttttatcaaaagtcaacgagattaactaagcaaccacaaaataggaaaacgcatcaaacgcacatatatatgagatcatgtatatgattatatcatgatgatactcatgggcgtagtcaatttacattgtagaaagtcttgtcttctttaaagagttggtcaatttaaattgtccaatgaaacaaatattatcacaattcacaacttcttcgtcacaaaaaagatttaaaaccaaatggcccatgcaggtttcgaacctgcgaccttcgcgttattagcacgacgctctaaccaactgagctaatgggccatttgctacaaaactaaaatcatatttactaatctttaaattatcatttttatacaaattattagtccaaaaaagatgcaagaaatgttgaaaaatatttttcatacgggttattggtcaaagtatatgcaagaaatgttgaaaaatatttttcatacgggttattagtcaaagtatatgcaagaaaaaaatggaaaagtttgggatatatcatcgtgcatggttggtcattatgtgtgtatcttttgattttgacttgtctctccattaattagaggtttcacgatcttcttcctccaatctttttccaggtaaacaaagaaacattaaatttttgatcatatcattacacttacacatatgcttagttttgtacaattaggacatattattgttcttctaatcagaaagttttcatccaaacaaactttttagcgttaaagctcatttcttggagaattttgaagtgttgaatttttcaatttcgtgtttgattaaagatttgacagaatcagaaaataagggttgatttagagagtttggtgttgcagattaatcaaattcataagtttttgtctatgagttcaaaaatcctgaagagtccaatcttaagatttttcagaggcaagttttgagatgatccttttgatctgaacaattatgtaattagtacactttgagccacctgatattgaagagcatgtttttgttcagtttttgagtgtaatgaatttttgaatctagaagttctagatgaactttttatgtgaataaagattatccatttgcctttgttgtcttaaacttgaaggtcaagtttctgtcttgttttggttgagtttttaaatggattcttgaattctttaatttgatatctgaactgtgactgaaattggttaggaaaagtcattatg

SEQ ID NO: 1037 - DNA, 3000 bp, Unknown
  misc_feature (1)..( 3000): cDNA_ID_3060256_gDNA_ID_1620350_Annot_ID_154293 3000 nt of promoter + ATG
ccatccaaagcacgttcttgtcggagtttctaagcacccagccgatgccacacttgctgcgttctgcattccaagctccatctgagttacacttaacccacccatgtgggggttgcttccacttgatcacttgctgctcagatctctctatgtgttttggtagaaaactccgctgcagattttgcctccactcctcaacatcctctacagcccgccgaattacatctggtgcatcaaactgtttccccttaaaaacgaggtcatttcgattcttccacagtctccatagaatccatggagctaccataccgtcatctcccaactgtgggtggtactgattaatgttcaatatcctgtgcatgttttggtatagagaatctgaccactcaccttcaggcggggctgggatgggggatatagcccaaacaagtctagcaaaactattcctgattcttagtttttctgattcttagtcagcggaaagtatagcccaaactttttctgattcttagtcagcggaaaaacaatttttccggaaccaaaacataaaccaaaactattgaagcaaaaaaacaatttaaggcataaagccataattaaaataaactcaacaaccgaaactttaaaatgaatccttaattattttccactgagaagcaaatcacaacacaaatacttttttttcaaaaactgaattttgttgatgatgatggtaaataccacaaccggaaaatttggaactacttgtcctcatttagttagtgcttaaaagacttatgaaatcaaaccatctacttacaaactccagtttgacaggcttcgttgaagaaactttagaaacatagaaaacatgctgagatcgataaagtcgagatatgtttaatagggtctataagctaggaaatatgtttttatataaataaataaataaataaaaaaacgacgtacatatgactctcatttctaccgatgatatgatatgatatatttttgttacactttccattttccgcgttaacttcatcactatgatttctttccaattttatttaccaattattgttacaacttagacgaaagtgtgtaatgttatttggatagtttcgacgacgaatttacaaccgttatatggttcatatttatgtaagaaaaagaaaaaagtaaaattttccctaaaaaaattagttatatatcttaatctctatactgttcccaatatccattatactttatatttggtttatatagtcgtgtcttatcatctaagaaacaatcaaccaattttaaccaaaaaaaaattattaaacaaaaccagcaagtgttaacattttaacacaccccaacacgatcaaattgaccttctcttaaagtcagtgatataaacgacagataaaaggaagaaatcattaagaaaaaaacacacttgccatttcaaatttcaagtgcatcatgtttgttggagaaataatatatataaacagtttataatgttcaattaaacataatgggttgaggaaagaaaactaaaactttattagaataattgttatgaatgccttttcaacattactctttttccaatactatccatttttatttttcattttcatttataccctctcttaatgtttaatgaccattttacctctatttggaaaatgttttagataaacaaaatgaaatatttgttttttcccgcccaaaatattctgaaaataaatttcccgccaaacgttttccgccaaaatgtttttaaaaaaaaacatttttcaatttcaaaaaaacaaatttggcggaaaatagattacaagggattttaaaagattttaaaagggctttaaaacattttcaagagattttaaaagattttaaaagggttttaaaagatttacaagagtttttaaaagattaacaaggtttttaaaagattttcaaagaatttacaagggttttaaaatcctttaaaaactcttgtaaatcttgttaaaactttttgtaaaggttcacaagagttttaaaatggttcaaaaattattaaagggtttaccagggtttttaaaagatttttaactggtttaaaaggattttaaaggatttacaagggtttttaaaagattgaaaaaacatatacaagaatttcaaaaccctttaagaactcttgtaaatctttttaaaaccttttgtaaggggttcacaagagttttaaaatggttcaaaaattatttaagggtttacaagggtttttaaaatatttttaaatggtttacaaaagttttaaatgatttacaagggtttttaaaagatttacaagggtatttaaaattcttgtaaatcattttaaaactctttaaaaacacttgtaaatcttttaaaatcattgtaaaaggtttaaaatgatttacaaaggttttaaaaagggtttttatagtatttacatatataaagactttataaagattttaagaggttttaactgatttacaagggtttttaacaaatttacaaagcttttaaaaaactgtacaaggttttttaaagagtttttagagggttcttaaaacttttacaaggatttttaaatgcatgtttttagctgggacttttttgtcgtggagaaaaaaaattggagggaaaaaaaaaatttggcggaattttgtttttgtcgggaaaaaaaattttggcgggaaaatttcagtttattattacatattctcgttagatgagtgtaatttggtcatttgctcaagagaagtgggatttttaaaaatggacaacataaaagggtattgttgcaaaagggtagtagaaaaagggtatttttgcaaatctctaaatatattaaccaagtcaaatatcaagttaatgattatttaatttcttagattatttcaacacctaaactcatctataaattgaagtctatggaacataagttattttatctcttcaatacaatcttattccacagacaaaaaccctcttcctatctcgttaatggca

SEQ ID NO: 1038 - DNA, 3000 bp, Unknown
  misc_feature (1)..( 3000): cDNA_ID_2129680_gDNA_ID_1620350_Annot_ID_154286 3000 nt of promoter + ATG
aaaagcatcaacctttcagataaaaagcatcaatccgatgaaacccaaaaaccatcataagctcatcgatcaacatcagatgatcagtaatgaatggtatcaaaatccaatgatcatcaaagaaactttcaaaggaaaacaaaaaacagaggaatcgatgagtacctttgtgatagagacctgagaaaatccagaagcaagagaaaacccaggaattttccggtattgactaattctaaaattgaagatttttcaggttcgtcgaaaaagtgcaaaatgaagtttcctgaataatagcgatcctttctctctcgtctttgtcttcttctaccttttgatccataagcctttttggtcgaaatttaaccagggaaaaacagaaagtttcgtaaatagtccctttaattttacatatatttagttatgaccccaaacgtttcgattataaagcttaaacttattctaattgtgacccatacatttttgtatacaaaaaccatttcttttctcggcagcaccaagggcatacagatttacatctcttaggaagtttgtttcttgattttctgctaagtttttatactaccaactcaccaagaaattgcgacaatcgaatgaatttttaagttgttccgagctaagcctagcatttccacattgttggagttatggatttatgttcaaattctaacaacaaaatgtctttcgagtttaagaagttgtaagtatcctaataataatagtatcctgactattgtcgaataaaggtcaagttggtctaaagttatctctacacttgataacaaacaacagaagagctcaaaattgtaataatctcaaatgtctgtcttgctgcagagaccacacctcattatgtgagagaagccaagtgttgtcttgaattcaattacccaccttggcaacttttctctgctcggtttggcccgacaaggggcactgcatctctgtccaacttatcggaaccattgtttcgcctgcacaatcaccagaccacataaacatttcgattactcaaacggaaattaacttcgtatagtattataaactgcccaaagaagcaaatgcatctacacattaacatactccaagtccaggacgaaaatatttgttactcataattccataatgagaactacaagttagaaatgtattacaatttgatatgtgatagattagctatataattagtaatctttgccctcattaccctttatttagtttctaagagtaggaaaaaaattacccgcagcactttcagctgagaccacaccaagttcattcttagcagttgacaagtagtaagcccgtgcatcaccaagagacagctttaagagtccaagttaaggcaacttcagatattatcacccaaaacatcatctattattatagactacacctacgctacattcaaattaaactatacaaagagatatgtaagtaaaaagagaaaataaatggcataatgtaacaaatcttagaattgtctctcctctaataaacaatgttaaccactgtactactagacaataagtgtgaaacataagcgcaaggatacaaccatagctctaacaatgtcaccagcatggaaagactgatgcatgtcaactttgtcaatctctgttgctctaacatcttgttgcctatgaaagagcaaacacaagttagatcgacacataaaagaacaaaccttgaaaataaacaccaaaggaggatgagaaattcacctaattacaccagcaaaattttcacgaacggcttttgaaccaacacacaagatatcaacagcagccatcttagtcataactttagtcacctatcacgaataacagagaatagtgagtgatgaaattactctctttttttccaagtatgaacatcaatgaatccaatgaaataagtgcaggactcactcttgctatgacaacagaaccagtctctggaataggaccatgtgccttgtgacctgtaacttccacaatagctctctgcttaccatttttatcatccaataagttatatatccataacaatcacaaaaacaagtataacaatccaacgatttcgatttcgattacgaatagatgtgccagaagaattaatcacttggaacaaagacgaaacctgatcaattgattcgggaagaggagaaacaatccggcaagttcctgtgagggaagcgtagatggtggcgtcgttgacgtaagctccttttccagctttaaactctgtcgctttcccgattacatctcccggcgttactagccccgtcgtcattgtttcaaaattttccgatttgagagtatcaaacaaaaccctaggaaggaacctctgggttttagattgagaaaattaaaacaattcggaatccatccctttagtgttatataaattcaactttgaccctaaatgttctggttgtaattttaaactattctaattttgacccatagtgttttcttattacccaattcgacccggttagacttaaataccttagtccgacccggatacatctcatacccgagtccgacgcggttattacccagtttcaactttcaacagtcgacgacacttgcagaaaaattcgagtttgattcctttaattgaaaatccaataaacaagcgggacctcgatttgaaatctctttatccagatccatctctccgtcacaatcttccatctaccgtcaccggaaccggcgagttagtcgtcgggattccagatctgtttgtctacgtcttccttctgtctctgtgttcatcagagtaccaattcgctcgattgttgctgcatttcgcgaattgtattaggtttatagcgtctatgaactcctgttttcgctcgatttgagtaacctaggtatttctctacgttgattgtttggatttgaagaaaaggcgcaaagtatgagtagaaatttcggaagtttcatgaagatttgagggattgagttaggtattgtagttgtagagagaatg

SEQ ID NO: 1039 - DNA, 3000 bp, Unknown
  misc_feature (1)..( 3000): cDNA_ID_3060275_gDNA_ID_1620350_Annot_ID_154283 3000 nt of promoter + ATG
gacataattgttattatgttcggattcaaagattaattccataactaacatgtgtatatattaattctcaaacttattgttgaattcttttttcttttgacatatttactttgagaaggtcgatttataattaatttctactatgcaaagtaacgtgatttaatagaattcaactttagtaggaaaaacggattcaaatggacttaaccacttgatgaaagacacatccccatttattgttgaattaacaaatttaaaatttaaaatacatcaacgcataattaattaggacgttaagtgatttgattagaaacaaaaacaaaacctaaagttctcaagtctttcctaaaaaaaaaaaaaagacgataactaggcaattatctcttttaacactagcatcataatcatcagattccactatctttctcttcaccttcggtttctactatttcgtatttaacttggactttcgatttggaagcttacacattctacaatacgcacgccctacgaatctttggtactcagtttataaatttacacactataaaatcgatgaagactatgcaaatttgaactttatagatctttattttgagaaaaaatcgcctaggattcaattgtgtttcaatttaggaaaaagatttaggaattctttggatttattctatttgtaatcgaagtacttaacgttcaattttattgtctaacgttgaattttttaagtctagtttttgttgattggacaccaaattagagaattaatgtgcacacaagatagttggagaatgaatctctcaattgcaaatactcaaagaattatatgagcttttttccaactatctattgcttattttttggctacaaaaaatcgtaagataacatctaaatatatgctatatgtcttataatttcaaaataattcatattgcaaaaattaaaatccattgagttcaagtgttagaatctcgttaatttagttacaagtcttaatattatgattttgttatatacttaaactaaagatgctgatctcttgtaataatattattatcttgttagttcagtgaagaaatacaattacaagacatctctttcaacagtgaatcttcatgaaagaaattagcaatcgccattataattttgaccaaacttttcacactcttgatttattattgtaaattaaagtttttgttaaacaataaattttatctcaacaaaaattaaaaaacaaaaatgtttgaaaaggtacattaaatccctcattatattactttcggatttttatatctaattcttgttgactaagccaaaaaaggataaaaatgatagtgatagtaaagatgaagttatatatcaaagcctacaactccaaaaaaaacaaagataatcaagtttctttgtttgtttatttttaagtcggagtatttttatgttctatatctaaggtatcatttgtgtacttttttgcatataggctcacaagacatgttagttatatagtcttaaagagaaacaataaaagttctaaaaatattgtttcacatttaaaccaacaaataaattaccagaaagatcacggtcgtctctcctttttagcagatgttcccttgcatattgaaaataataaaatctcttaggtatttcaaggtttattttaggggatacaaaaaagataataaacacatatagattcattagacgtaatatatgattggttatcttcatacaatattattgttagcgatcgattaccaaagagaaagtaataatttttaaatttttaaatttgaattttccataactattataatatataattggttatcataatactgaatttttcaattttccataattttaaaatatattactaataaataaataaataaaattaattttttattaaaacaaaaattacttattaaaaccacatcttaatttataacggaaaacaaatacttgtgttgatgaaatttttctgatttatgttgatccacgaacacaaaagtcatttgaagttttaaagtaacaaaatcgtaattttgatggtttgtgtgagttcaaaaccatgaaggttgaaagtgcatgtggttgttactttgaaagtattttatgtgattttcacaatctcttactaataaaaaatgttcattgaggcttgtcaatctgtacaaattagaaagaaaaaaaaattacaatgaaaaaaaccaaacatagatagataaaggtgaaaatttaatattatatttaagtttatactattaaaatgttaagaatacatcacatgacgtttttctatgcatagtaaaaaacgtaaaaacaaataaaaagacttagtaaactatttcaaaaacatcaatttttaacataaaaccggatgtagtccagactaattcctaatattctagtaagaattggtagttatttaaactagttaaaaaatttctcctataggataacgtcatgacaatttcgtttataataagtaagaataaggtttctttaaaataatatgtttacaattaatatatgtaagagatttgaaattgagagattaattccacaactattgtatacacatattattaatttctaaacatctaatgcgttagcttaaaaaatctcaaaacgtactacgttttgttacattaagtttgtatatttttctatttggttaattgaactattacattgaaagtttgaaactgtattaacctcatctttaaaaacaaatcttaataacacctaaattatccgaataacccgaattccacatcgacaaaaccccgccaattcatctggctaccgtaattggttgggccgaccctcagacttaggcccgttttaatattgaaatcttcaaacacgaaagagaactgttgaaaagtaaagtaacaacaggtcgcataagttaccaaaaacaattaagaaaaaagggttttttcgtttttgttaacttcgccgtgtagttgtggtggtgagattgtgagagatatg

SEQ ID NO: 1040 - DNA, 3000 bp, Unknown
  misc_feature (1)..( 3000): cDNA_ID_3060317_gDNA_ID_1620351_Annot_ID_154314 3000 nt of promoter + ATG
gtcctaaccagaggaggaagcacagcaagacttgtggctaagtacagaccaggaatgcctattctatccgtcgttgttcctgagatcaaaaccgacttctttgactggtcttgcagcgatgaatcccccgcgagacacagccttatcttccgtggtctgatcccagtgctctacgctggatccgcaagagcctcacacgatgaatcaacagaagaagctatcgagtttgctactcagtacgggaaagagaaagagctatgcaagactggagattccgttgttgctctactccgagtcggtaatgcttccgtgatcaagatcttgaccgtcaagtgatgattccactcaaaaattcacgtttttggcgtttggggaacgctactttaaacgttttattatgaaactattcaagattgtgattaaaatcttgagatagaaaactcaagttctattttttgcttattaccacaactactgtgaccggtgaatccacttaacagctccttttgggatattttggttgtattgaaacctattggatcattcatacacgtatcaattatcatgatttctttttgtttctcaagtatttcttatgtatacgccaatacaatggtgaaaatatgtttatgtttcatgttcttataatcttacaatgacagggacatgaaagacaaaaaagaagacagcgcatgaatcgtcccatacaaaaatcattccgacaaagactcatcattatctccatttttgtaaaattcccatcattatttgggattcatctgaaaatataattttcatatttaaaaacaaagataatggacacacataatttgatcatctctgtacaaaaacatgaaagattgaatcattgtatatatttcgtcattatttggactcgattgacagataatttcatacttgaaaactaaaacaatggaaactgaaatttgatcatctctgtacaccaacaatggatatttgtttttcaacagtctgagtgaaagaacatcatttctatgtacagtaaagcagagaatgaaatgcagaggaaataacaagttcaatagctagaaaaatgagagaacaacaaaagatgaagaacaataacaaaatccaagatgttttagtttttgattgttttgctctcagcgagaagaaccagaagatcttgagaagaaattgttctcaccagattgagatccagaggttgaagaagacgaagaagaagaagacgagaacaatccactaaacggccatggaaacgaaaaccgtctcccatttccactcctcacctcatcctctcttcctctatccgcatttcccacattctcaacaacgtttccgttactcgtttcccgaacatttcttgttctcagcactctctcggaatcagtcttagtctcatcatcatcatcagcactagaaggaagctcaaaacgacacacaggacaagaactatgaagctcaagccagggaacaatacaccgaacatgaaacttatgcttacaaggcatctctttagcttccgtacctttctcaaaatcatccaaacaaacagaacattgcaaaggttccattatcttaaccgttggtaaagcttcaacagcttctttacgagcaggtggagtcccttgcctattaggatcattctcagccaaatgctgaagcaaaagatctaaaccaggtccaatgaagtaatctccaagtgaagtcaatgaaggatgattctgattctgatccgaaggaacaactagcgattggttatacggattaatcattataactctatccctctctcgagaattatcccaattgttatcagagctttcatactcagaagcaatccctgcacgaatcccttgaagcaactgcaatatattccctgagcttcttcgtcttctcctcaagatagattcaaactctctatctaaatcaatctctccaccatgtctcctagctcgatgatgacgatacacgttattattactgttgttactatcattcccattcccatcagcattagtagtcaagtcatcaccattatcatcattctcttcaccaaactctgatcttctaaaccttcttcgtcttcgaggactactcatcattccaagcaagattggtgcccatagagacaatgcacggtctgttccaaaatcggtttctgaatcttgaacatctcttatgcctctgccaccacctccaccgccattaccgctcatttcttcgatgaatccgctttggcaaaagggacatttgatctcagattccattactggattcaccatttgtgaacacatgtgacaccaatacctagctgccattgtttcctccatgttccttacttcacccccacaaatctattgattctgcaaaacaagaagaacacacaatgaaaccctagaaattttgtttatcatctaccaatttggttttaaatttcagatctaagaccctcaaaggttataacttttatacaagtatcaatctaaatgggtagattttgtcattaataatccaaattaaatgattttgaccaatcaaattcagacaagaacatcttttgaaaaaggagaggaaaaagtcaagatttttacataaatttggataaaacccaaaaagaattaaacccagaaaaggagaaaaacatctgaagaacccagaatcttgtaaaagatcaaagagagaaaacaaaacccttaaaaaggaatcaaatttctagctttttgttttcttcctttgtcataaattttctcaaataaagaaacacaatacatgagacaaagataaacccagaaatttacatgcccacaacaaacataaaaatcatacctttaaaatgtctctactttttcttgaaaacccaagattttttttttaaaatctgtccttgcttctttcgattcctttatagaaaataaaacccagaaaaaggctcaatcttttttgtccaacgattagagaaaaaatggagaaggaagaagaaagaaagaggaaatg

SEQ ID NO: 1041 - DNA, 3000 bp, Unknown
  misc_feature (1)..( 3000): cDNA_ID_3060299_gDNA_ID_1620351_Annot_ID_154328 3000 nt of promoter + ATG
cagaattatccagtctcagttcatctatctttcgcaacatctcttgaaagctaacaccttcctttatctcgttgtggcttgagttcgaatccacgcaaggaaccaaatcatctccagcaaagatatctctttctttctttttctgatccttaatcgtcgcttgaggttttggttttctctttatgggaatttctaggggtttctaaattttccctgtttctttggaatctacaagttgtttcgttcccaatataatgtcagattgagaaattcgaatcaaacccatttcccaatttgttgtttttcattcaaagatcgaaactttgtgtttattgactgcattttcaaagatgtgtatttcaaaagaagacgaagaagatccatcaagaaatcgaaggaatcaatcaccattatcgcttcctcaaactctgaaacatttccaaaaagatttgcttgctggtgctgtaatgggaggtgttgttcacacgatcgtggcaccaatcgaaagagccaagcttttattgcagacacaagagagcaatatcgcaatcgttggagacgaaggtcacgcagggaagagaaggtttaaaggaatgtttgattttatcttccgtactgttagagaagaaggtgttttatctttatggagaggcaatggaagcagtgtgctccgttattatccttctgttgctcttaatttctctcttaaggatctatatagaagcattcttagaaacagtagctctcaagagaatcatatcttctctggtgcattagctaatttcatggctggttctgctgctggttgtactgctttgattgttgtttatccgcttgatatcgcgcatactcgtttagctgctgacattgggaagcctgaagctcgtcagttcagaggaatccatcatttcttgtcaacgattcataagaaagatggggttagaggaatctatagaggcttacctgcgtctctacatggtgtgattattcaccgtggcttatactttggagggtttgatacagttaaggagattttctcagaggatactaaacctgagttggcattgtggaagagatggggtttggctcaagctgtgactacatctgctggtttggcttcttacccgttggatacagttcgtagacggataatgatgcaatccgggatggagcatccgatgtaccgtagcacattggattgttggaagaagatatataggagtgaagggttggcttcgttttaccgtggagcactctctaatatgtttaggagcaccggttcggctgctatcttggttttttatgatgaagtgaagaggttcttgaattggggagggatctaagattaacaagctgagaggtaagccttgtctatccaaattagagacagaagaagaatgatttttcattttgttactacaccttaacatggacatatgtagagagaaagctttaggtgataatattcgttttaccgtattcagttttgaggatttggctgaaacactatgcatcttgattcttttctttttgttatagactttgtgtgtatgaggaaagaaaaaagaaggaatctattttgtaaataaaagacatggattggtctaagctcaagcattgcattcgtttttgataatttttgtcatcatcaatctaagttttcattatgtataagattacaaaggttcgaactttgatctactcttgttctgtggatacaagaaagtgggtctgtccaagacatagtacgatggtttagctttttaacccggataatgtggaatttatactcggttacacacgacgtagtcatcttatctctttctcattttcattgtgatctctttgttacatttttgaagttgggtgatttatgataggtgattgtatatgtaaagaagaaataaagcttcatgatttagtattcatctgccatgatgaatcagtgacaccaagtcaaatactctgcccattaccaatatctgaaagccacaaagattccatgtcttccctactttggcaatttattctgagtatctgaaacgaatcacttcaaaatttactcttttttacgcagtatcgaaatcttttggcaaatttatttgttcagaacttactactatgttgcttgtgtctactggtttggttggagagaaaacctaaggaggttgaaagctacttgatcagctaagtggtgatgtatttattagagaactctagacagctaaagacaatggctattatatctttgaaatcgactagtgataacgaggaactcaagatgttgcaagagctatcgtctacaccgaggatttctactaaatctcggctttccttcacgtgaagttccattgatcatctcagagatatagaactagtcgtttttattcttggagcatcatgagcagttatgttttcaaagggacttgtctaattctcatcacttctcacgacaccaatcttttttttttctttttttttttgtgtccaaagttattggtgtcattgccatcatgagaacatactttgttttcagaattgagatgaataattttttttatatataacattttagaattttaccgtatgggtgctgttgacgtgtgctgtaaaaagttgtacaactttgtcccaagtgcaaacggcgtcgtacgatcaaaacgttactttttcctttttttttttttttttcttttttgcttcatttagagttttcctttctgattaaaatttaggtggttaaaaaaaagaggacaaagttagaggttaaactttctcgttgattctcaatttttctttcgtatatatattctcctaagagtcgaagatggtttgatctggaacgagtgcatcgtcatcattgctagggtttggtttttgccttcttgcttgcgaaattgataccgaagatgcttttaacctttttaaatcttactctattatcggcaacaaaaaccactgaggcaaacttttgagattttgaaggattcgtttacaatg

SEQ ID NO: 1042 - DNA, 3000 bp, Unknown
  misc_feature (1)..( 3000): cDNA_ID_2045344_gDNA_ID_1620351_Annot_ID_154331 3000 nt of promoter + ATG
gatcaaagactttaaatttggatgtttctctcaaattcaaaatgtccattaatttaattgttttttttaggttgatatttggactaatctgatcaattcttgcttgccgccctgaaacgaaacattctatgcactcaacaagtcaacatgacgtcaattggttgaaacataatattatctttatctaggaaattctaagcttttgttcattattttcagtattattactattataacattgaccgttgacaatgcaagctgtaattctttctaaaagactcaatgttttatcataactcataatattataactttgttctcatagctaagtttagtagagttcaccgcctcaccggctaaggaaggggtcgaacaaatgagattgacagattgttaataattgaaaatatttgaaatgttttcttgatacatattctttggctggtattatgcaaaatccacggaaaatcttcatctttttaatccttaatatacgagaaaataaaccgtaagatgcaagttaagtttttcttcttacccggcaagaatgtcctttcttggtctacaattaacaaatctaaaatgatataattttttaaaagtaattggatatatacatcttttgtttattttctaattctagttttttttatatatcatggtatttttaaaataaacttatagctgaatttctttttatgctcaatcagtttatacatatatggatgggtatttggtcctctctttttttttggacaaagatttttagtcctaagtggcgttccgtgattcaaatgtaaagacatagtttcttttaccaaaagagtgtaagacagatattgtttagcaatatcttaaggagacttcttagtgagggaaaaaaatagaaaggataaaagaacaagtgggtgtggaatgatctatagcaacaactttacatcaacgaatcagagaaccttttttacttctctaacgtctaacctaaagaatttagaaatttgctattagtcgggaagaaaacaaacaacaaattttaagcttatttaacccaaaaactgagaaaagaaaaaggagaagaaatttcaagcctaacacctggagaatgagataaaaagggatccaagaaacaaactagtgggtgttgaattatatctcttgttgaagcaactttctaccacttattattacccgcacacgtttgatttattgtattcacacacattttaatttcgtgcatttgaatgagtaaacttaaatacaataatattactatatctgaataaaaaagaacctcctaacttcagcttcacttgttcaaaatattcaatcatattgtcttctttttttgacagcacatacaatcatactaacaataacatacaaaaattaagaaatactaaagagtaaatgtgcgtgatgactgatgacataaggaatacataaataagtcggactttaagtggaacattaatcttgaagattcttctgcgttttgtaatgttaggtatggtttttataggatatttacatataattatatccaagttgatgctcattgatccactaattttccgattctacggggtaatatatttttttttttgatgaacattgtttgtataaatcattataaccatacatacatgactaagatgaataaacattcataaatacgacaaataattataaaatttattatgacaaaaaatttcttataaaattttcaaaatatatatttttcctcacgtataagatttatacaataactaggtttccaaacttacatatttacaaaaataataattaatatacctctacttagagaaagaggaataattaaaaaaaaatttggaaagcctaatgcataaaaagtcttgctttaataatggattggatcctttttattctttgtttaaggaaaaataggttcgtcgacagctctacttgtgagtaatgactaatgagcacatccgtttttggagaaattagccgatataaaatattgagccactttctgagattatgcactaacatagtatcgattaaaatgaaatgtgaatgacgccaataatgagagaaatgtgaacacacaattttatcgataacaaaaaacaaacagaaaaagagcaataagaaagaattgagaaaggcaaaggcgcacgcttagacaaaaagaaagcaatcgagaaaaaggaaaaataaaaatagaaataacaagaaaaataaagagacttgtggtctgaaaatgcgtttcatacatgcgcactattaagcagaaaacaccaaaaaaacaaatcccaaaaatgaaaataaaaacaactttttttgggtagagagaatggttcttggtttaatttggatttgaattttgcatggttcaatatttcaattattaagttaatcaaattatattaaattttttttttatatacaataaccattcgactaccaaaatgaattgaccaatcgaaagggattagaattcggtttaaagcaatcggaaactaaaccagagagaattgtaacaagaccggaccggaccaaaacaaaacagaccagagtggactgatgtcttaatcgtttttgttctttattttctctgagaaagagtctctgttctgatttgtcagtggaaaaagagaaagagaagtgggacccatctccgccatagccaaagacctctttctctcccacctcatacctctctactctctgcccatcattgcccccgacgaaactctctctctctcgctctctctctaaaaagagaaacaaacatttctttagtgtctctctctttcatcatctctttaccttttgcttcttcgaaaaaaaaagagaaataaattctaagaagagaaattgagagcttggtttttctttattggcatgaatttgtaacttaccagagataataaagttagggttcttttttttcgttcttataaatatagtaatctttctatttttaagtgtgtgtgtgagtgttgtttgggaata

SEQ ID NO: 1043 - DNA, 3000 bp, Unknown
  misc_feature (1)..( 3000): cDNA_ID_2045336_gDNA_ID_1620351_Annot_ID_154333 3000 nt of promoter + ATG
ctatggatcaacataccgtccttaactgatttatttttcatttgctaatgtgaactggtgatgagctgagaaatttatggtacaaatgtttaaatcagttttagaatattttaggctttgtagccaaaggagaatgcagaacccttcttatttgttgtagccataaaaccccacataattggatagaggtctacaaaaggctctaatcgagttagatgaggtatcagaatatgttattatgtattaaccaatagaaaccagaataattaatagaggtctacaaaaggatcaaaattatcaaaaaaaaaaaaaaaaaaaatgttgtttaaggcttagatgaaatatttatggtaagtcaaattcatatcattttctaaagagaaaaccttaataatgtagctagctaggtccagtgtacacataagttgttccctgaattccttttaatgatttgatctcttttgtatttgtaaaattattttgagaatgtgatgttatataacatataccacataagatcaaattatttactttttcaacatgtacatataaaatgaagaggagcatgaggagtcatctggcgaagcaaacaagaagtgtgtgagagcaaagcgatcgactagcatcttttttgtttggaatctcatacggtgtgaccaataatggtatttcttgaatgtttccatgtaacatttttttcagttatatcactgtaacagtgtaattcctactgcaggcgttatattcacaggctatccggtaatcggaagccaagaccgtataatgtcgtctggtgcgtgtctagacagtcatcagaacggattgattacatcttgtccttgggatccacgcattaaaggcgagttcttttaccaaacagcattaagtgttcctctcacacatgtcaaagatttcatcaacgacattaaagcacttgtgaagattgaaccaaaatctctctgtggccttgaactcaactatggtgttctagtccgttatgtcacatcctctccggcttatctaaggaaagaagaaaaagctttagactttgacctaacttactacagaagcaaagatgatccttggacaccacgtctctacgaggattacatggaagagattgagcaaatggcgatattaaagtacaacgcgttgcctcattggggaaaaaataggaacctagcttttgatggtgccattaaaaagtacaagaacgcaaacacgtttttgaaagtcaaggagagattagatccgtgggggttgttttctacagaatggaccgatcagattctagggttaaaaggaaacgtgacgattgtgaagcaaggatgtgcaccggaagggctgtgtatttgttcggatgattctcattgtgctccgaacaaaggttatatgtgtcgaccaggtaaagtttacaaagaagctagggtttgtactcttgtaaccgcttaagatttatgagtgattctaaactgatgaaataaaaatcctacgaaattaattggtgccaatagcttcacgatgctactgcatcaaatacgattgatctaatttgaagtatatatacctaataataatttgtaacatgcagatatttttctccattaatattttaaaatctaatttaattggccaaatacgtgtttttgaaaacttatcgtagcaatattgaatttgaattattgatactactataagccatacaaactaggcaaagtaccaatcaacaataagatagaaaatagggggcggtcttcaatttttttttgttttaggcgtaattcaaattacttcatgtagacaacttagtcatgatgtctcaatgtctaatcatgccaccgggaactaggtaacctgcgaaaaaatcacaaacatatgaaatgtataatctataagataccacaacctaataactttaaacttatatactaatgaaatgaatgtattaaatttgcaaaccaaattacattgaccgaaaaaaaaaacaagagaattgggacttacttccgcattgtgagccaggagcaagtggacggccacaagcagccgcgacattgactagcttttgcatatcaatggcggcttcgatttccttattgatgacttcgcatacacattccatcccgatgattcggacaagagtgcaacaaccttgggatggtcttggcggagttggcagctccttgtcgatagaatctggacatcccctcagaacttcgatgcctgaatcattacatctctccccctgaatttgagatgatgacaacaacatcattacgactaaaaactgacaaaatatctgttctttcatttttctttatttttattcttctattgtcttctttcttttacgcattatatgtataaaagattgtacggtatattaagtacagaattgagaacacgatcacattttgcttattatggcagtagatcaatctagaatcctttgatataacatagtaagtagtaacaatattgactatatatatactgtatcagtatgagtgaaaattagataacgttattctttttttggtcaacaacaatataggtgaaaattagatacgttactttttatatataaaaaatatttgatctctttttggttaaaagatatttttccgtattttgaagacttagattaaatgtttacagtaagtcaaatctcatattttttatagagatcaagtcagtaagacagtaactatgtgatgtaatgacattccctacatgcccccaataatactgcaatgttttctatccacataagttgtcctctgaaatttcatttaatatattgttttttttttggggtcaaacaatttgatttaatttcttcttcgttatttggtaaaattacaggtcgctattaatatccttctaataaaagccatatggatcacatgatgttatgatatattgaaacttatcataaatacatagatgagtgaatgaatgcttcaaacattgtcaattattttcttgtaaagttacaaa

SEQ ID NO: 1044 - DNA, 3000 bp, Unknown
  misc_feature (1)..( 3000): cDNA_ID_2045332_gDNA_ID_1620351_Annot_ID_154334 3000 nt of promoter + ATG
taggtgaaaattagatacgttactttttatatataaaaaatatttgatctctttttggttaaaagatatttttccgtattttgaagacttagattaaatgtttacagtaagtcaaatctcatattttttatagagatcaagtcagtaagacagtaactatgtgatgtaatgacattccctacatgcccccaataatactgcaatgttttctatccacataagttgtcctctgaaatttcatttaatatattgttttttttttggggtcaaacaatttgatttaatttcttcttcgttatttggtaaaattacaggtcgctattaatatccttctaataaaagccatatggatcacatgatgttatgatatattgaaacttatcataaatacatagatgagtgaatgaatgcttcaaacattgtcaattattttcttgtaaagttacaaaatgtccttttggctaagtttgatcttttgctttttcacatttgcttcctcatctccaccggatgatcctgtcaactgtgaattcggaaacacaatgtgcacggtgacgaactcgtacggcgcctttcctgaccgctctatatgcaaagcagcaaaggtggagtacccaaggacggaggctgagctggtctctatagtggctgcagccactagagccggccaaaaaatgcgggtcgtgactaggtactctcacagcttccccaagctggtttgtactgatggtaaagacgggactctcataagcaccaagtttctaaaccatgtggtgaccaccaacccggaggccaagactttgacggttgagagcggcgtgactctaaggcaactgatcgaagaagcagctaagtttgatctggctttgccatacgcaccgtattggtggggacttacggttggaggaatgatggggacaggtgctcacggaagttctttatggggtaaaggaagtgcggttcatgattacgtgaccgagataagattggtgagtcccggtttggcttctgatgggtatgtaaaggttcaggttcttagcgagactatagatccggaggaatttcgcgcagccaaagtttctctaggtgttcttggtgttatctctcaagtaactttcgaattgcaaccaatgttcaaaagatcgttaaattatgttatgagaaacgattcggatttcggagatcaagcagtgagttttggcgaaagacacgagtttgcggatttcttatggttaccgagccaaggaaaagtggtgtatcgcatggatggccgagttccgcttaatacttcgggagatggcttgttcgaatttttcccattccgttcacaactctctttagtgttagccatagatagatccttaggtaaatctttatttctcaagataattaataccaatatttttgatttgcatagctataatgtttcttatatatatacttttgcttcatgtcatgcagaggagagtgaagagtcacttgaagatgcaaacatgaagtgtgtgagggcaaagctagtatcgtcgtctatgtttttaatgtcatacggtgtgactaataacggtatttcttttacttgcttatacatttgttgattgtttcgatataagattatacaaaactttcactagtaatttccatggacaggcctaatattcacaggctatccggtcatcggaatgcaaaaccatatgatgtcgtcaggttcatgtctagacagtcgtcaagacggactaatcacggcttgtccatgggatccacggataaaaggccaattctttcaccaaacaacattcagtgtttctctcacaaatgtcaaaagtttcatcaacgacatcaaagcacttgtgaagatcgaaccgaaatctttatgcgtacttgaaggcagcaacggtattctcatccgctatgtcacatcctctctagcatttctcggaaaagaagaaaaagctttagattttgacctaacttactacagaagcaaaaatgatccattggcaccgcgtctatacgaggattacattgaagaaatcgagcaaatggcgatattcaaatacaatgcgttaccacattgggggaagaataggaacctagcgtttgatggtgccattagaaaatacaagaacgcaaacgcgtttttaaaagtaaaagagaaatttgattctttaggattgttttccactgaatggactgatcagattctaggtttaaaaggaaacgtgacgattgtgaaacaaggatgtgcattggagggactatgtatttgttcagaggattctcattgtgctcctaccaaaggttatttatgtagaccaggtaaagtttatagagaagctagagtttgtactcgtgtaagttcctaaatcctaatcaaagttttggtcctcagttctgttatatatcaaaaacctcattcctctctctgctttaagagaacagagcagtctctgttcataattgacaagcgaaaacgacgttgtattgaattcgtgacacgtgtcaaacaatgagtagttaatcaaagtgtcactcgcacgtgaagagagtagagtaggtgggtttagggtttaagtgttccagattcttccaaattcagttgatccaacggctcagacttaacctgaaacctttgaagacgcgatcctcgaacttcaccagtccgtttgcactatgcaaccaaacacactttgtatcgaataaattaaacaaaaatcataactttacaatcgcataaatcgactttcatcttcttcacaagaaaacctctctcagtcgctaaaacccttgaaccatctcttgatcgctagcttctaagtaagtgtatagttgaatcatttcgatcaaagtttaggtaaaaagttgtttgctttcagatacccttgttttgatttgtgtcgatgattacaaagttttactttgatttgtgtctttagggtttattagattcattcaagctataaagttttgattttgatctgtttttgcagagagtgaaaaacc

SEQ ID NO: 1045 - DNA, 3000 bp, Unknown
  misc_feature (1)..( 3000): cDNA_ID_3060302_gDNA_ID_1620351_Annot_ID_154324 3000 nt of promoter + ATG
ccaaaatgtaccgctgatgatatcggattgtggattaaactcgcgctggaccgcaacatctgcgagctaataatcaaacattatcccgatcacggacacatcaggttatctaggagactatgcgacagcaaaaccctagtttccttaaaactcaagaacgcaattcttggagctatttggctcccaacatgtttcatttcactcaaaacgcttcaccttcgatatgtgaagtattccggggatgaatctgttcgtactctcatatcaagctgtccttcacttcgaaatcttgttgtgaaacgacacaatgaagacaacgtcaagagatttgctattattgtgcgttacttacagagcttgacggtttatttatcacctctacatggtgtagcagattcagatgcatatgtgataaatacacctaatttgaagtacttaaacattaaggatcattacactgatctatgctcttttgaagatatgccttacctagacgaggctaatctcgacgttgccttcacccatactgagaatttttttgaatctcttacctctgtcaagaaactttccttatgcttgaagaaatcaaatgtgagtctagtaacttaaaccctatcattgtttttaaaacaaattctcatgtacttagaaaagtttgtgtgtcatgtgcaggctcagtatcctgagggtattatcttctctcagcttgatcatttggagctatgtacatgtgatgattcaaagtggttgaatatactcgcaatgttgcttccagattctcctaaacttcgagttctcaagcttaacgataaggtaattagttttccagttcatggctcatcacttgatctgtagttttttttacttgatgatctaactaccgaccatgttttatgatctttttttctcagaaccatgatttcgttgacaagtactgctcttgtacttggaaccagcaaccaagttatgttccggaatgtttgactaaaagtcttgaaattttcgagtggcgaaactataaagcaacattcagagagagagacgttgcggtgtatatcttgaagaatagtacttgcttaaagaagacggttatctcccccaaattaaagatttcaggagagatttgtgatcatcatattatcagagaagacttggcatctttgttcatgggctcgagttcttgtgaacttaaattcgactgagaaataaacaggtagctttttgtttttgctttgggtttccttttcatcgtttaaacaatcaaagaagaatttttctgtactacactggaaaattaactatttcatgacatttgaatcaaaaaaagagagtagttttatcttgtatttgattaactattggacttatatcaaaaaaaacatttatgcggtatatttaatgaatttgtataaacggcgtatcttaaaaactagtaaataatatgaacaaattatttagctttttttctctatccggtttgttttccagtattatatcagtatgattgatctaatccaccatactttcatccatgtatcttagtaccatccccttcgggctaaagaaccgcgcccacgctggaatgaaccaagctcagtacctgaatgtattttatacagtcttgaaaccttcaaatgggtacactacgaaggaatggaagaagaaaaagaactagttggatttatcttcagaaacggtagcttgttaaagaaggcaactattattccccctaactctattgacagcgacacgaaacttgagatgctcatggagttgtctttgtcatcccggcgttcacccatctgtcagcttgaattcagctgaagtcttggtcaattatgatgcttattagccaagtaacattttgttgattggtttttggatctcaatctccataagctctattgaacttgttagagatgttctttctttccaatatttagttctctgaatttcatatgtttttacttggaaattgatcttccttatacatggtctgctctgttggtgattaaacaccttctgctccgagaagaggcttccaattagttacatgaatcatcgatgactcgatgtcaacgattatttatcttaacttcgtttctctttgcacattctctagacaaaaattaaatattgtaagattcttaattatacttacggtgtatttggactaatctattgatttggaggatatggatcaaaattctaatctattgattgttttatcttcttgctatgcgtctctgcttgctggaagaagaaaacataaagatatatcttctctttgttactcttttattatatcttctattaggaagaggttctttgatctctatggatatctattaaacaggaattgctctatttttggtgatttacacactttttgttgcaggagtgggtgtagtttcttttggtctgatattggttcagtttaaaaatttggtaaatctttttttttttgacatcggtttaattgggttatcttggttcagaaattagaaaggaaaccgtgacttttttgttgcgttgcggttagaaattaaatatcgaataaccctagttgatattaatgtgaaaaatcacgctctgatcggtaattaatgatatccagtggttttacaagtcaacttcaacaacaaaacacatatttacttgagattttttaaattgtttttggtgagtgatagagttaagatttatcttatgtactgtattagacagtggatttaatatttaattagggttaatttagtaattaatacagtatttagctaaatctccctttttatatttatcattattttatgaattaaaagagaggttctcggtgcttattattcggaggagttagtttggattttgtttctatatatctcgctaggttttcgcttatgactatttgtttggttcctaagaatctcatatcccttgttcgtcttttttgatgttttcaggcatttggatttctccagatgcagaaatctcttaattatg

SEQ ID NO: 1046 - DNA, 3000 bp, Unknown
  misc_feature (1)..( 3000): cDNA_ID_1020019_gDNA_ID_1620351_Annot_ID_154316 3000 nt of promoter + ATG
aacttccgtgatgagaataactctttctttttgagacttgtctattgcattttttcaataactctaccccttctgagttatatctcggagattattgaattcctgactttttcctaacgttagagtactctacattctatcgataggaggattttgtaaccgagaagaaggaagagttgtcaaaggaagagttggggcgtcttgttgcctctcgttggacaggagagaaatctgataagccaactgaggcagacgatatccccaaagctgatgatcaggaaaaccatgagcacacgcccatcactgcacatgaagcagatgaagatgatggatttgtttcagatggtgatgaggataccagcgatgatgggaaatacagcgaccatgaacctgaagatgattcctatgaagaggagtatcgccatgattctagttcttcatacaaatctgatgcagatgatgatgtcgatttttcaggtctgcactatttccacagatgtttatattcttgaacgatgttaatcatctatcatatttagttgacttgattgaatttcattactgatagagacaacctcaaatcctacttggttggagaagatacaaaagactgtcaagaacattttgctggctgtgaatttattccaaaccaccccagtggacaaatcaggtaaaaaaatagtttagcattttcatcagtagtattagtgatactcgtattctttagtgattcatctatattgttgtggaatgtgcagaggctgatcgggtacgcaaagaatacgacgagtcaagctccaaactgaataaaatacagtcaaggatatcgagcttagaaaagaagctaaaacaagactttggtctgtatgataagacatcctaagccttcacttacgtttacctttctttaagttagtccttatatattgtttataacaggaccagagaaagagttctattcattccatggtcgttgttttgagagcaaacagggcaagtaagaataatcttagcaatttaatgtcacatccattctttattaacattactatcagctattagaattatatatctgatgcatttactgttattacctaaataatgctgtaggtatacttacaaagtctgcgcatataaagaagcaacacaagaggagggctattcgaaaactcggttagggtaagtgtcatgccactttatcttttctgtgcatgctgatctctttcatgatacagataactaataacaaggaattggttcgcagatgataattaaatatgagtgattattttatctgtgcttattttgtcgcttccttattttgtttaatggaatttgctaaaatagggagtgggacaaatttgagaactcttaccaattcatgtcatataccaacggagaaaaatgctggaatggtcccgatagaagcctgaaggtagtgtctgattacattaaatccaaactaattgttcaattaatattttctccaattatatttatataaaaaaaattatctgagaagatttttgcgcttgcaaagatcacagagatatacaaagcttgactgtctcactaaatgcaggtgaaactaagatgtgggttgaaaaatgagcttatggatgtcgatgaaccaagccgttgcgagtaagttcttatcgtaacctacatctcacgggtcatcatctccttttatctccagtttttctttttatatccttaaatttttactctcttgttgcagatatgcggccatcttatctactccagctcggtgtttggaagacaaacttaaagtaagtttttgtgtcatctcaaatctcaaaacagacctacactagttaacacttccttaacctggtgtttgtctttgtataggaactacaacagaagctcgagaagttgatgaaccaagacaaacctcagaatcacgacgaactctgatcattttcacctgaaataattcttaccatatgcgcactgcgcttagatttatgtcagtttagactagtaatcttgctcagtcgcaaacgtcaagagaggacttaaaaaaagaacagagaagttttgggccggaagagaatgaatgatagagtcaagtttacctcatttgggttcaatggagattttctatatcaaaagtatttagacaatgttcaaactctggttaagcacaaagaacaattcttctatataaaaacatgaagaagagctaaaaccttttaacttttttggagtcttaaaatttattcgagattgttggagctcgtcaatattaaggtacatatgtcagttatcaaacatctccaagttcacttttaggtcagaaaatggttttaatgtctaaacaagtggtaggtttggtttggttcagttttaatgctttcttttacagattccattaccaatagagacaaactagaacacaatatttccggaaataaattactgcagttcaacacttaacaccatgaaagaagacaaagaacaaagatcaacttcagaaattagtttaaacactattgccaaaatgccaaaatacaattaataccattttttaatcaacataaacacttaaatgagatatcattataagatattttatatttggaaaaaaacgtggcccgacaatagatcgagaagacataaaaaggtaaacgaaaacgaatattaataaacaatgtgcgtcactccttaattattcaaagaaaattaaaccggtgtgaaccaatcagtaaacatatggtcttttgttgaccaaatctaaaccaataaccttcaatttcatttctcattttttacctcaaaagtcaaaaaaaactctagaagaagactcttaactcataaatctctcattctttctcagattctctctctctgttttccttgttctccaagccagatctctctccataaatctctcttcatctctctctttccaccaaacatccgcgatcctcgattctcaattccgtgtctgttttttttcttcacttagcgatg

SEQ ID NO: 1047 - DNA, 3000 bp, Unknown
  misc_feature (1)..( 3000): cDNA_ID_2129800_gDNA_ID_1620352_Annot_ID_154345 3000 nt of promoter + ATG
gaatttgctaacttgggttttccataaactctcaaatgtttgattttgataaactcttaaatgtttgattttgcaaggaaagaaaaaaaagtaataatgagaagagaaagagagagagagcgaaaagaagaagcgacgaagaagaaggaaaaaaaaggaacgtggagagatgaaactttttttttaattataattttttaattttcaggggcaaattggtcaaaagtttaatgaaaaagttggaaaagtgcctcatccctgacaagtggctcaaaaggaataaaattctctaaaagtgcctaaacgtgtcacattccctattatactccctatgattttttaaaaattaattttctagaaaaaacatacatattaaaatatatattaaaaggtgattatatatatatatataagttttgtgatttacatttcaataattcgaagccaatgattttcaattatttttcttgaagtttacaatttatctatgataactaataaatattgcatagaaaatctaaaagaatcaaattttttaaaacaaatattttttttagaaaaccaattaattaagaacagacggagtaatgtattctttaaagtgtttaaagagaatattatttcttaaagaatgttaaattgttagaaaacttatctttgtgggacgaagaaaatattattttcttttaaaaaaagttttgtattgttaaatctaaacatatacatcaaactttaaaaatcaaagcaaaaaaagaatatctctccttttgcatgcttttgacatattgaatttaatagctaattttcttaattaagatgttaaacttatggattcatgatttgaacaaaactgaaaaaaagtatatggaagcgttggtgagattcatacctatcaaaatgaacaaaaggatcaccaaccgaatagtaaaaccaactactgtattttttcttcttctttcttaatttctctctttattaaaaatttgttaattatatcataatcttaactgttgtatataaagtatttcttcctaaaatatacaaggtgtacgcaacaaatgccaataaaaatggtttcaaattaaaaagaaagaccaaaactcatatgaacctcaaaaacatagtatgctacttttagttaaaataaactttctcatttcaagttctattttttttgtcattcgcttagttattaatgctcaaaaagccatttctgaggattgttatttacataagtgacatgaagcatcacacgatctaaaagctgttagaaccacatacgaaggcaaacacaatcactatgtactaaccgcaaggtataacaacaacaacaacaaccatgacatgtcagactagttgtaccgctaacacaatcagcctcaacttaggtgttgaaatcgcatcggacacccttgaccatacatcaaacgagcatccacatccacatctgcatccgcatccgcattcacatcgtgttcgttctgaacttaaaccagtggaacgctggattcaagtttattcatggaccacccatgggaacctgctatctaagtagcactaatgccggtataatcatcaatataacggttcgagagaaacgatcgaggctcaaacagatgacatctcttcctgttatccgtatatatccacataacatagcaagaatacaatatggtctctagaggaggatggtctgcacaaaccaaccacagtaacacaataaagaaaaagaaaaacaaaggctctatacttgcattatttatcttgattcttcctaggttaggaatggaataacattgttctttgtaatctatgatctatatgtatgtatgtatgtatgtatatcatgacacactaagatagagatattggtcttaatctcccaacatatttatttgttttttattaattcgaaaatgttttgtaaaaaaaaaacacaaagctttatatgtttccaagaaaatctgattgcagagatcatcaacatcagcctgtaaagaatcttctccatgactgccatggaagaaacccacctgcaaataaaacagaaacaaacactaaagtatacttttacattttcaaaatgtaaaagaaagatatagagagaaatcgaagttaccacattcaggacaacgaaaatactttttgtctcgagaaacaagtcctgttcctccacattcttcacatctcttctgtgcaatctgaaaccaaaactcatttttcaatagacaacacaaccaaataattaatgtatgtgtgtaataatacatactattcttttgctgaattcaacacctgcaacaacgaatggtatgattccagctgcaagatcaattgatttattataagcttataagaaaaacacattttttaatcacatcactaattagctaattaattaaattaccaatggttccaactataatctgccacgtaatctccgatttgcctgtctccgccaccgtgtcagctagttcacttagagccgacgtcgttttgagccgtcgattactcatcgtcatcatgccgccgccgccgccgcggcttcttcttcttcccggagaaacgaaaccagccgtggattttatctgacgtggtcttgatctaacggtccacagagacggaactctacacagtgaagaagcctccattgtcgccattatgactcaagaaatcaaattcaccgatgaaaatatgttaaaaaaattgggccacgtcgacgttatttcgggtcgggttcgcgccaaccgcaaataccatcgtgtggctttaaaaaagctgccaatcaaaaatatattctaaaatacattaaaacgacggcgtgtaatcggaaaacagtaaacgccattagagtcttgtgtgtgttaataatgaatctcaaaacaaaacttttttgtttgtttgttttggaattagggttttagggtatattcgcaatcactctaatcggataattcctctactctgttaacattatcttcttcttcgttcctaccgcaa

SEQ ID NO: 1048 - DNA, 3000 bp, Unknown
  misc_feature (1)..( 3000): cDNA_ID_2129868_gDNA_ID_1620352_Annot_ID_154366 3000 nt of promoter + ATG
atcatgtggagcagagtaagccaaaaatatgttattgcgtttctcttatactgtgaccccttgtgattgagagctgtcataatctatccgtatattggaccataaatggtaacaacctttcttgaaatttcgaaggtacctgcgtgatttcgaggtggaaactattggattaaaggagacatcaagaaagtgttctgttgaaaagtgtggagctaaacttaaagatacggtcttggattgggaggtaacacgaaagcgttgcctttgaatcagagtccaccagttttacctttttatgtagttaaagaatttaagaaactgaattatgaaactttctttatatgactcttatgctgcaggatgctttgcctccaaaagaaattgatcctgcggagaagcactgcaaaaaggctgatcttgtactctgtttgggtaccaggtaattaatgactcataggaactctcatgtttgtttccttaacacttttgatcagttagccaaacaactctcttctctagagtatgttgcattttgtttgttatatgtgtctaacctctttatgcagtttgcagataacccctgcttgcaatttgcctctcaagtgtctcaaaggtggaggcaagatcgtcatagttaatcttcaggtaattgtttattttgttcatgtgcacgagatttaatgcgcgccatatatgtaaatgaaattttctccgtttgctgatattttctctggaatgtatatggcagaatgagttttctggactgtgtagtttgtgactgattatatttaccctttcagaaaacaccgaaagacaagaaagcaaatgtagtgattcatggtcttgttgataaggtaagatttacgttttgttgttttcaaaaattctggacataacctaagtgatgtttaacagattaccttcagcactgtgccccaacttgagtcttatagattttttcccttcattattctgatgtgcaggtggttgcaggggtcatggaatcgctcaacatgaagattcctccatatgtcagaattgatcttttccagataatcctaactcaatctataagcggaggtagcttttcctgaatctttcatggtttttgtgcaacatatatgtcttgtcctgcactgtaattgggtgtgtcaaactttttattaatgatgttaggcttcatagctctcactcacatgtttttcatttctgttacagatcagaggtttattaattggaccctgcgtgttgcgagtgttcatggattgacttctcagttaccattcatcaagtctattgaggtaatctctagaaactactaaaccaatgccaaaacaatcaaattcaatttttctgatatttttcatttgcaatacaggtttctttctcagataaccataattacaaagacgcagttctcgataagcagccttttcttatgaaaaggtaaaactaacctcttcttagaaatcagtttcttgtcctatttctaactcttatatatattctcatcctctttcaggagaacagcacgaaacgaaacttttgatatattctttaaagttaactacagtgacggttgtgactgtgtctccactcaacttagcctcccatttgaattcaaggtttattacgatccataaaagatctttgttatcttgactcatgaccatttttctcacaacattttcaaataacctgtgtagatttcaacagaagagcatgtagagattattgacaaggaggctgtgctacaaagcctgagagagaaagcggtagaagaatccagttgcgggcaaagcggtgtggttgagagaagagtggtttctgaaccgagaagtgaggctgttgtgtatgctacggtgactagtctcaggacttaccatagtcaacaatctctgcttgctaatggagacctgaaatggaagctggaaggttctggaacatcccgtaaacgctctagaaccgggaagcgaaaatcgaaggctctggcagaagaaaccaaggcataggaagaagaaaagaaagcttttggtgtatataaagaaacactagtctaaccggaataggtaatatggaagttattggcgttttgagagctgagtgaattttgtttttggtccacattcggttctcttgaaacaaaagttaaccaggaattgaaagagataatcttggttcgttgtcgtttagtatcggttgatttttgtagaagctagtgcattcgaaatattattaaaaaaaatttacaagatgatcaagcgatgccagaatctgtcgactggtaggaatctcggatttgaaaaatacataaaacgacatgctctcaataatccagtactgttgctattttagctttaaaaacctagtggtgaacaattaataatgatcaagaaaagatgttatagtacataatttagatatacattgtactgttctattttaatataatatgcaaataatgtaaaacaaatcaacgaaagttagctgtacttatatgacatcgtcagttagaattctttttttttttttatgtttttttattgaataaaaggataattatgtttttcattttcaagggattattttttccaagtggcaattaatatttcaagtgggaacatgtgtcaagcgaaactttttttttttttttcacaatattgattgcaacttttttgtttgacaacttttaactgttaggaattaaggaataaataaaagattcaaaaaaaatttcgttttttgtttgacatcaagagatggtctcctctcaaatgaaagtaaaatagaaatctatattcatgaaaaagattggacagctattcaaaatcaataatgaacgacttgtttttttttctattaacaaagaatagaaaaagaccaagcttagctacagctgtattacgcaagttttatatgaaatgaccggctaacatatatatgcaaggggaagaggagaatacaaatatcacaaaaatccaaatttcctttgtagcaacc

SEQ ID NO: 1049 - DNA, 3000 bp, Unknown
  misc_feature (1)..( 3000): cDNA_ID_2129864_gDNA_ID_1620352_Annot_ID_154365 3000 nt of promoter + ATG
atctcaccgttcttacaaagagacgaaacgcgatgaaagtaagatgtggaagaaggagaatgagcttgttcatcgtggtgtttagaagaaggtttcgatgatactgaaaatggaactttattcgggatagtgttgaaaggaagagaagccattcatgcctctctgataaacgtctctgaagataaaacagagttctttcgaatcctcgtatttaaattattttatttattatctcctcgacttcttttcgtaaaatgttctccaccgttgattcttgtggcaaatacagacacgtgtacggttttcatctgttactcgatacatatttgtaccgatcgcgattcgtatgtgtaccaaccggttttcgatttgatctcggtttagttgaattataacgttgaaaaatatataattcatttattagaatatacttcaaaagtaacgacaaaaaaaaaatacttcaaaagtatataaacaaaaaatttgagataataacagaagaagaaggtgacattttttataggcttttaatatttatctgaaacctatgtatgacctaaaagacaataaaagcattagctaacacaagcatcaaaacatatacgggaatggaagaggaatagtaagccatcgctgaaccggttgtaccgccttcggctcctcctcctcctcctccttggccgccaccgccttgtccccctccgccaatagtaccgtaaggataaggaggagtataaaaataaggatacggaggagaatacatcgtcgaaggtggtggacctggtggttggttgcaacagcctgtcgtcggaacaggagggcagcgagaacgtggcggtgaagactgtgaaggcggtgggggtggtgaatactgtggagacggtggaggagggttaccatatggagagtagcctgtagaggacggtggttgaggcggttggttacatgggtaaggagtgcaaaaaccagcgtttgaatccaaagctgagtttagattgacacagtttaaaagtgatagataaaaggtaataagaggaacagagagagaagcttgaagagacaacatgatgatgacttagagaaaatgatgagtgtttggtctttggttttgagatttataataaaaagagatgaattttttcctcggtttcgtattatctgccgcatggcattacacatgtcgggggtgttggaggatttctgaagaaaacgtttgtgtcttttagctgatgtagacaaatttttgtcatgtaatgacaaattaaaacgcatttgtattactttggaatatatagatatataccgatcggtaccattttcatcaatagatgtcccaaagaagatggattatgagtaacatgagttttaagataattgtgacaagtcgaatgaatcttttgctatgggaaagatgaagaactatgaattgtttcaagtaatcaaataatcaaattttacgttgaagacggggtttacacgatggataatatgtggctccaactaagctgttgcatgctcccgagttgcaattacattcaatcgctctggcccatgtagtgaaggctgacaagagcaaccagaaaaaagttgatgagggtcatttgttagtaaggtgctagccttcacaataaactgcttaattatgataactttaaccctcgctttgaaattaccatcgatgatggctttttggacaagtttggaaaaagtatccaccaaactcatgatttgcttgtgcattcatggtgctgggtgagtttgttttgactagtctgttgtaggattcaactacttttcaaatgatgcacaagctagtgttgaggtgtgactacactttcggacagtattgtatccgaggaaatattaattctgatggtgtgggttgtggtcttgtcgagagtggaatgaggactaacataacccatatttaagtctgcatgctgcatgttttttattaaaaaactgtgtgaggtatgttaatcttgataaataaattgatgatatataacaatacttatttatgaaacttagatatgttataagtttattcaccaaactgaattcaaaatggctttgagtgatgagtttcaaaccggttcgatagaacaagattttaatctaatataagctcatggttgagcatgcaccagaacgtcacatagaatcaatttaaatccatagtaaaccctgtcatatggtttagtattttacaaattacaacccactttatcaaatggtttcaatattcaatgtgttgacatttacctatatattttaaataataacaagacgataaatttacttatttaataactcattgtattggtttaaccaattagatgaatgttgtttacaatgattcaaggataccgaaaccgagttcaagttttgttataagatgatctacaaccgtgagcttgacacaaatattatcagtctaattctgggactaaagagattatggatcacatattcataatttcatgattacataaaaaaagtaaaaataaataaatgatatatagataaaaattggtgaaatgtattaaaagttgcaatgatatcacccacttaatttagctatgatattttaggttaatgtaattaatgtttttcttatatcaaatttttgtttagccaaactaaacaaatttgagaaatataataacatgccataaaataagttttatatgaatccaattaataccctaatttggattttcatttaaatatcacaaactttaggtttatcagggaaacataataaagaaatgttatataaaaatttagcaacacttttaaaatctaaaatctctgatattctgagaaatgtcaaaaaaaatattccagattgcatataataataaaatcataataaaaagaattaaaatatattgatacttcataaatagaagtcactgtccaagtctctgcttttttatacatcgagaggcagagaaggtgttcttcttcttgtccaaaagagaagacaaaacctaa

SEQ ID NO: 1050 - DNA, 3000 bp, Unknown
  misc_feature (1)..( 3000): cDNA_ID_2129894_gDNA_ID_1620352_Annot_ID_154372 3000 nt of promoter + ATG
attttccccctattttgatattccggctctgtgagatgtaattttctatttcgtttattattttttaaaattttatgtaagatgtaattttctttttttctctttggtttttttgttaattttttttctgaacttacgtattatgttttttttttttttaatgttcttgcatttttaagccacaatcaaatatgcagaacacaagtaaaaaaaaatgcagagagttcacttctagatgtccctagctttgtctgaaacccagctataaacaatgtccatccccctgaatcctcaaaaacaagtcatgggtatttcatgactagtccccagctcattcttatcgaaacagagaagttagactttgacgctgattttgaaaactttcaaatatattatatagaagtaatccatcatcagtttcacatttctctcgcctcttttgtgtttttttttcttcacatttgttgtacatatgaatatgatacaaagagttgataaataagaaccttaaaatacagagactcaacaaatatatctgatctgtttatcacaccattatttgatgagttgtgttgtaatatttgatctgatgaagtataataatcctctcagcgtttgtcatgtgagctcagtgtatagttgatgttgtctgatataatctattactccatcttcagtcaagtatttaaccgataaccctcgcgaaatgcattgcctgaaagaagcagaggaatgagcaagagaaatcattttttagtgtatatgaactgttctcgggaaggataaataaatctcacactaccttaatctactcgaactgatttgattaggaacagtattgtcaacgattttgacgttagcctgcgaaagaaatcgagggggcactattcagtaaaccatgtgcacaatcacggactgatacagcagagtcagaacagaaacctggtaatacttacacagttttcgtttaagatttcgtcaccagagatcatattttcaacatcttgtccttctctacggatgcacacaatgccataatctttgcaaatagttcttaacttcaaaaaccaagtgttgaaaaaggagcataactgtgagtaaatttgataaacacatctacgtttatataacaatgctaccttggtttacctgttcagggatccaaacaccgggagtgcagaaagatagcagtaaatccgagccacatagtagcatgactttgagagattctagcattagaataaatttgtgtttgtcatttgcgtagtggctagcacgtatgataaaaacatagcaagcaacactattcagacgacccagcaattactcccaaaatgtaagtgagataaactttgaatagaaagatgctaaaggcgacacaggacacttcttgcagttatcttaccctcgggtacatgtcgatttgttgttaagaaagtcttgacccttgataaaaccgtcaaagttcgttggtagttgctttgagatgcctgtagaaacagcttccacatttttgtaaacaacgcattgttccactaaagagaactgattaaaagcttttcgaggaataagaaagtacctcccacggatcaaccattacaaagtcagagctttgacatgatacattacacatctctaaacgatgttctgcagataaaaggccctacacataatctgatgaaattattagttctaagggaaactaaacagaatagtaaacagaagaactttgggagctaaaaaagaaaaagaagctcttagtttcatcacacataacatgtccattagcataggttcagaaaaaaaagagtcattatggaaagaaactaagattctcaagatgacaaataccttcttcttatatgcatcattaacaggagacatatatcctccaagaacatgaaatccttttgagcgtaattcatctctcgccagctctagcgacaaaaaaaaggaagagaacttatcagtttgatgtaaagaaacatatacatttgaacaaaaggtcacagcaatggacaagaatcaacaattgaaacctctaagttctgcagttcattcttgtcatatgccggttttataaaccaaaatatacaaagctaacacaatcatatactcaagaaacggtttcactcaagaagtaaacaacaaggcatataatcttaagctacttttgactataaaccagtattggattttcccattgaaacgagtcaaaacactgatcattatgcctcaaattgtgaaaactttcggattgatagaatctgaaacgccattgataaacatataaaaaaatgaattatatatctactctggtaaaagaactgaccaaacatgcgtaaatgcatgaaagtaggaggattgaaactcccagttgccacaagcactacacaagttttgtccctgtttcagacaaacaatcgaaaatattcaacacccggacggaattttaataataaacctggtgagaatctcatcatcataagtaaccaagcagatcaaatttacaaaatcagaattttcacaaaaaagacaaatgaagggaatcaaaatcgagaataagcttcaaaatttactcagtgtttgatccataagataatttctcgactggtaacgggacatccattgaactctgatgattgaatctcagtctcttaatggtagctccggcgaatgatcagggacagcgaaaataagacgacgacggcgaaagtattaaaagatagagagaaacgacatcgtatgaaaaaggtttgttaaaacgaaacgttttacagctaacgagaagatagatattagacacaatacgaagccgtttaaaactaaacgcatcgttcaggtagcgagggttaaaaaagctaaaaaagcttcattctatttttttcagtgaaaaacgaaagcgaaaatgaaatctttatccccaaaattttgaaattcaaatccgcgctaacagtctctctctctctctcgctctatctctagagtaggtcgtcggcg

SEQ ID NO: 1051 - DNA, 3000 bp, Unknown
  misc_feature (1)..( 3000): cDNA_ID_2129887_gDNA_ID_1620352_Annot_ID_154370 3000 nt of promoter + ATG
gctttttgacgcttttgcactactacgaagctccaaagctttttgacgtgaccttgatctctgcatcttagcaagtgataatccagggtcaatgcaagtgtctggttcaatttcctcttgacaataaccaagagatgaagatttccgcttacaaccagtagttgagacacatttgggaaccttttccccttggctacatccaggagatgtagcatcaagattagtttcaactctctgattcttggagtgttcgggagatgaacaactttgattctctctgcaatcgattgagacactttctggcaatctctctttctcatgtacatctctaggagatgcaatattaacatcctgctcatgagaatgattcgaaacttgtctgactaagttgtgtgagaggttgtgttgcggttcctcttcaagcaactgctcttctagcgggttatttaccacagaggtcaggtcttgtcttactacattgtcagctagaaacctgacaggccgttggtatgaaaagggacgactgctaggacaaacgatggaaggtcttgatgaaggaaatagaagttctgatataatctcctccttatttaactctgtatacatataaacaaacatcacaataagaatcgcaaacagaaactcttctattcaatcgtaactgaaacagatatacacgcaatgtacgttaatactagccttaacaaaatgctccttaacttatcacagaaaaatcaacatcaaagtgtgattatgaaccctaacaccatttctaatctttcaattccatcttctcacagtaattcgacatcaaatttatggtaatacgctttataaactttcaatccatttcccgtttaagtatcaaacaacttcgcagcatcattactcaatagccactaagactactaatcaattttgctctaattagccaaacaaatctacatttaccatcacggacaagaaattgagcactaaaaatcagatttaacaactaccggaagtttgggaaggtagagacggagaccagagccacgacggaggagatactccggcgagtaggcatttggaagctaaatgctggtcatagagatctacttgttgctgaacctgctcgacgattcgcctcttcctctcaaagatctgaacgaaaagattctcaatcttcacattcgccgtcttccccctcggattctccttgacggaaaacatcgccgacgacctactctagagatagagcgagagagagagagagactgttagcgcggatttgaatttcaaaattttggggataaagatttcattttcgctttcgtttttcactgaaaaaaatagaatgaagcttttttagcttttttaaccctcgctacctgaacgatgcgtttagttttaaacggcttcgtattgtgtctaatatctatcttctcgttagctgtaaaacgtttcgttttaacaaacctttttcatacgatgtcgtttctctctatcttttaatactttcgccgtcgtcgtcttattttcgctgtccctgatcattcgccggagctaccattaagagactgagattcaatcatcagagttcaatggatgtcccgttaccagtcgagaaattatcttatggatcaaacactgagtaaattttgaagcttattctcgattttgattcccttcatttgtcttttttgtgaaaattctgattttgtaaatttgatctgcttggttacttatgatgatgagattctcaccaggtttattattaaaattccgtccgggtgttgaatattttcgattgtttgtctgaaacagggacaaaacttgtgtagtgcttgtggcaactgggagtttcaatcctcctactttcatgcatttacgcatgtttggtcagttcttttaccagagtagatatataattcatttttttatatgtttatcaatggcgtttcagattctatcaatccgaaagttttcacaatttgaggcataatgatcagtgttttgactcgtttcaatgggaaaatccaatactggtttatagtcaaaagtagcttaagattatatgccttgttgtttacttcttgagtgaaaccgtttcttgagtatatgattgtgttagctttgtatattttggtttataaaaccggcatatgacaagaatgaactgcagaacttagaggtttcaattgttgattcttgtccattgctgtgaccttttgttcaaatgtatatgtttctttacatcaaactgataagttctcttccttttttttgtcgctagagctggcgagagatgaattacgctcaaaaggatttcatgttcttggaggatatatgtctcctgttaatgatgcatataagaagaaggtatttgtcatcttgagaatcttagtttctttccataatgactcttttttttctgaacctatgctaatggacatgttatgtgtgatgaaactaagagcttctttttcttttttagctcccaaagttcttctgtttactattctgtttagtttcccttagaactaataatttcatcagattatgtgtagggccttttatctgcagaacatcgtttagagatgtgtaatgtatcatgtcaaagctctgactttgtaatggttgatccgtgggaggtactttcttattcctcgaaaagcttttaatcagttctctttagtggaacaatgcgttgtttacaaaaatgtggaagctgtttctacaggcatctcaaagcaactaccaacgaactttgacggttttatcaagggtcaagactttcttaacaacaaatcgacatgtacccgagggtaagataactgcaagaagtgtcctgtgtcgcctttagcatctttctattcaaagtttatctcacttacattttgggagtaattgctgggtcgtctgaatagtgttgcttgctatgtttttatcatacgtgctagccactacgcaaatgacaaacacaaatttattctaatgctagaatctctcaaagtcatg

SEQ ID NO: 1052 - DNA, 3000 bp, Unknown
  misc_feature (1)..( 3000): cDNA_ID_2129881_gDNA_ID_1620352_Annot_ID_154369 3000 nt of promoter + ATG
tttgtttttttttttttttttagtttcagttgtgagatgtaactctttcatatgtgacttttattttcatttccttgaattttttagccacaagatcaattaagttacaataaaggaaaatcattgtcagttggctttataatattatagcttttacaagaaacaaatattatatcgcaaaattcagcaaaggagataatttaatgaaatttctctgttggagttttgatccttgaattgctattggaattcttgattgctctctccatctcctttgagttatctttgtcttcctatgttttttttggatgatttgacaaagccgtctagtcccaacattcaatttacatagcaaggtttcgattttttcaaaggacatgcaccaccaagccaagaggagagagaactaaaattcttaccgatcacatcacactccatcttgatctgaacaacacgcaatgcctaagattaaaatcacatttcgttacctgaatttccgggaatttctataaaaaaataaatatcgaagagagttcacttactagaaaatataaataatgctttgttcctctaaagagatctctttcatgactagtccacatagctcattttcatcaaaacagagatctctaagcaagtgtaatcaggtgtcttgcttgactaataagcatcgatcgtctccgagtctaatctctttgtccctttgactgttccttttacccattcatatcctcactacgtgttcatatctgcctcttccccacccaaccttcattttttaattaattgtttttcaaattttacgtactttacaaaactaactctttaccaaatcaagataatttaataataacttgaaattgattggagtgggggatagagaaagatatagacacatctgtaataagagagaccatgtgttgttacttgtttttgttgcagttgagtactgacccataactgcaaagtttgttgtccaaacaaatactattattttctaattaaaatatataataaatttaatacattgatatatatataaatatgtatatgtatatatatattttttgttcatgttgaatttaatacagtaaaaggttaattatatgttttccaagtggtacttctttactcttttttttaattggcaataaatcttttcaagtgggagtatattttaaatttttttttttttttcacaatactgattgcaacttttttgtttgacaagttgttaactgttaggaatctcggaattgaagtcatgacatgttctcgttcccagatgggatcggaaaggcttgttccaatcgagagagtgcatttttgaataaaactatataatctgtaatgaaaacaagatccggaagagacggtctcctctataatcaaaataaaatataaaacgattgtaaagctattccaaatcaattacaaacgactttttttacaacaaagaatataaaaagaccaagtttagctgtattctctagttttatattaaatgaccagctaatatatatgtgcaattttttaaagagaaaaaataaatatatatatatatatatgtgtgcaatgggtgagatgaaagggaagaagaatatcactatcaaaaaaaaaaaaaaaaaatccaaattcccattttagcagccatgagttctgtgggtgtatttagtaagaaggaaaaggatggaatataattttgggtattcacattagcacaaacaatagatccaacctcctcaaatttcaggctcaattaaaaacgtagtggtggacaagtaatgatcaagatgagatgttatagtttcataaattaatagtaatattgtgttggttttctaataagtccaacaaatcggaggggacataatttttttgttccagttagaaacaactatatagttgacatatatgttttaaaatttagacttcattactaagaaaggaaagacttataagagtttagacttttagtgatttgagatcaatataataaacgactattctttttataataaagaatttagaaagaccaaaaataattagttgttaagaaaaaaaacttagctgtattgacaagtttttatattaaatggttggctattaggcctgttacggatccggatatccgggatttttgaggtatccggatccggatccgtatccggcggatccgtcatttcagtctctggatccgtatctgccaacctcggatattcgggatcctgaagtctgtgaaaaagtacgagtatccgcggaccggatccgatccggtttttttttatcatcttctttcctcccgaacacaagcaaccgaacttcaccgccaagattctttccagaaaaaacagctccaaatctgcaacgaaagagtgaatccaacgccaaggggaagaagaagagatagaggcagcggttgtttcggtggaggttgaggatgagggtgatttggtggaggaggatgacgatttggtgccatggtggtagagatggtcgtttggtggaggctggtgtcgagaggaatgagtgaggaagataaaaggattaggttttttggaaaatgggccaagatatgggctggaaaatatcataattttaatttttagtatggcccaataaaacccataaacataaaacattgaatattaccggatccggatatccggtcatattttttatgattatccggatccggcggatataaaatattactatccgtatccggaaccgtttcacacggatatccggtttttcggatcggatcccggttccagatacggatacccgcggatcccggatatttgttccagggctattggctatatatgcaagagggagaaggagaagaaagatatcacaaaaaatttccaaatccccattatcgaaaccatgagttccgtgggagtattttgaaaggaggaaattgatggaaaaccatttttggtatacacattaacacaaacagacaacccaaactcctccagtgaatcactggcc

SEQ ID NO: 1053 - DNA, 3000 bp, Unknown
  misc_feature (1)..( 3000): cDNA_ID_2129812_gDNA_ID_1620352_Annot_ID_154348 3000 nt of promoter + ATG
ggacaaccttataccaagcttgtcaggcatagcagatttaaaagccggcacccattcctacacaaaacaatgaggaaaaaaaacacaattaggtgacaaacataagattaaaatagcttccatttccagaaactaaaattaaacagccaatggctgtggaagcaaatatatacctcaaggtttccatatccatcctcgtcctctatatcatcatactggagttttacctgtttccttgatacgtccaggacagtgcatctaaaccaacagcctctaataccgctatcttgacacagaaactctatttttgcatcagtcttaaccactccgttgtaacaaggatgtttctgaacattggttggtgaaggaaatcttttgcccgaggcattaagttttagtctcttacatgaagattcgtaagttgttaacagatgatcagacataattcttgctcgttttttcatgcttctctcagcaccaaccattacattctcaccctcactccattcttcatcttcctctatattcatcgcacagtctacaggaccagcctccatagaacttaagcaagacataatcggttggtccaaatatccacgcaatttactcaaatcaaaaggtttaactttgctgttcctgagttgccgatagcacatgtgtacccttgccaataaagaattcggaaaggaagccacacactcctcataatgctcacgggtcaagacagtggcaggaccatcaacacattctgcactgatgacctgtgaatgaggggtgataaaaacctcttttgggtttgggttcttgagagcaactgcacccttcacttcttttgtgtagtgaaaccacctcactttgaccttttttaggccacgcttatcctcatacatatcttccagatatgcaacgtaccgatcctcccctttgctcaagacaaagacaaaagattgaacctgaaaatccaaaagaagaattacgcctccaagtgagtagtctcatccaagatctttacagatacaaatcacaagaacagtcaacatatatcgaactatgcatgcactgatgccaagtcttcaacttacccctattgttgtcccatttctgcaaaatgatgggtaatgtttgagctgtttaccacacatccaaggagctcctgaccacataatctcccaactgtgaataatcaagtttatgggaagacggacctgtaagagagattttcccatcagtataacaggaaagtaaaatgcagtgacaattgtatgagagcaacaagcagctaaacatcacctcttcacttgcttgagctcgctgagcagtaaatccattgcttggaaattcgggagatccattagattcccctgactcacattttggtgactctgtaaatgacaatataacaagtgctttagaataatcagttataaagttagaagagaccaacataaaggaagaattcattccttctccactcaacagacaatttgtcacatatggtaaaagataaagataaatgcgtactcgaccagtttccttgtgtactctgcttagacagcattgaagtgagccaatccacaacttcccttctcgacctccatttgaagccagaatgaattgaattctcaggaccatgaatgcgcacaaactcctcagagacaacatagaacatgtgcctaacacttctctcagtaccaatgacagctaggatagattcaccggcagaatccttgaggaagtaatgaacaacacggttccctcgctcttgggagacaaaatgctccttccactcgacaaaatgatgatcattctcacacatttttcaaaataaaattgattcggcaagcatcaaacgctccaaaccctcctttacatcagataaaaacactaactactgccagttcaaagtcaaagtcttttgtcctaaatcaagttctaaagcaaccccaacgcaacaatctctatataccaatgacagtggaaacccttaaaaacctttaatctaatgaccaaacaatacccctaaaatcaatcccctgtgccgtggaaatcctaaagcaaatcactctaatgcataactctgatcaacatctttcccagcttcctacaacacagctaaatcgtcgaagtctctgtaaatttccagcttttaagaaatcaaataatccggacgaagaagaagttaggattagagaaagcagataagaacccagtgagcggagagttatgaagatctgtagaaagatcagagactaagccatggaaacactgatctaagctcgagagcgccgccaaacaccaagatacgactttgactgcggtaatcagcttaagcatgacgaagacgaaatgggcatctcaaaattttcagcttagaatagatttataccgattcctctaaggtttgtacagaacaaacaaatgattcaggagaaaaaaaaagtgaactttagaagcttagaatagcggcgagaagacaaaatcgacgatcgatttcggagatggagaagaagaagaaaatgagttctgattaaggtaaacttggagaaaataaggtattcccatggatgatgatctctcttctctctctctctctctctcaaagtcacaggggtttggcaaaagcagctgctttggtgaaggaagaagagagagagaagaagaaattgtgcaattactacgaaatgacgagaatatcaggaagttattgggccttatatgggtctttaatgggccttaaatgaccgtggccgactaaaaaaaaaagtcaacgaaaagtcaaatagatctctgtcttttatttttttgttctctctcgtctctctggctaccgagaaaacagagaacgttaagaatcattgcttttctcgagaaaataatatttttaattgaatcgagaaactcttcaaagttgaattaagaagaatattacctcaattgagatttgagagacacgcatagagagattgattattgcatcgaatcaagcttggtttgttagta

SEQ ID NO: 1054 - DNA, 3000 bp, Unknown
  misc_feature (1)..( 3000): cDNA_ID_2104946_gDNA_ID_1620352_Annot_ID_154351 3000 nt of promoter + ATG
aacaataatatattaaaatgttggatttcctttgtacatttgaaatgaaaaaatcggattacacgatggtgtgatcatgagatctattaaactaaattacattcgtcttttaatggatccaatggaaatatcaatctcaataagattatcttcttccatattcacatcatcaatatcttcttcttgttcttcttcaatcctaattctcagtcgactttgattaatgtttctcattgcctctatagtctctgcttcttcgctcacaagatcaatctcaatgagaccatcatcatcatcatcatcttcataatcgtagccttctccttgggacccctcagccaaacatagtcttgtcttttccttgaagattcgtaacaagaaaacagaagaggagacgaacaagattgccatggttattgtgagagaggagactccttgagagttcaagaaacagaggaaagctacagatgaaattagggttacaagaaaaaacagcagtgacagctgtgaaagaaagcaacaccgagtaaaatgcttttcatcatcagatttttccaccattatagaaactttatttaattcaaagcaaaaacaaagacagagctagttataaagagaagtcgagattgtgtcgttatccattgatgttaatggatctttgagttatgacttattcaaatctttaaaccaaagtttcgatgtttggatcttgatttaagaagagagattgaaaagagacgaatctgagttcttgaaaagtttgagacaagtctgagaaagagagagagagaaatcagaggaagtcagaggaaccaaacaagaaagctttatttgttttctcacacttacataattacacctgcaactaaattttttcgagaaaaggaaaagcattggtttttgcatgtacgtatttgaaaaaataaaacactttgaaaaatctataaaaagctttggaatttggtaaatccatgtgaagcccactaattaaggatgcttgtttttgttaaggaaatattagtatcattaagctttggttgaaaactacttgtaaagttgtactagtttaatctttctctagaagttacccccttcataagtttgtcgtttatttttttggttgtcaactaggattgtcgatctgatttattgaaaatattctcaactgaagtgatcattatttcttcctctgattgtttaaagaaatttagggaattgtcactttatcctttaggaacctacctttgtctcacaaaagactccatttgttttcaatggtaatcatgagatggttaatgatatgatatcaatgatatgatatgatatgatatgatatcatataatactaacaaaagaaattatctaagaaatgatgttattaaatcgtaagattgtgaaacgttgatagcgatgaactgaaaaattgttttaataaaagaacaagagttggcggttaaattgtttgatactcaaatttcgataatcttgaaatattaatagtgtgctttcatttggagatacaacttttactactgttagctgttgtggtaaatatccaaaaaaaaatccgatacgagtgttgttggattggatccaacgatttcgttattatgctttgtgcttccttgaaaaagtaatttgatttcttatatcttaaaagttataataagcaaattttacttaattgtttttcatagtcatagtaactctacactcttgtaactacaaaatgatatggcatactgcatttgtgaaaatatgaaagatatagagacaaagcaataatgttcacaaaaaaaaaaaaagacaaagcaataatataaagggtgatttaaaaatctatacatggaccatcaaataattaagaatctgtacatgaataccatttatttaggtatctcttttcaattaaaatctatatgacaaatatacccctacaaagtgatatggtaaaactctgataattagcagataacgcattatcgagataatattgttagcgaaatatggatggggtttgatgtatggatgaaatgacatggtgtacaaaccaacttaatatgttaataatatatttgacgatataagcaaattttcagttattaaaccaatgtttagatttcaaagacatatatatgcgaagacgataacattattattaaaagataataaaatatttaacatgaataccataaaagttgacttgcgactgaataatcatgtagaaaaaatacgtgcatcagaatagttaatagataacgtattatcgggataatattgttagcaaaatatggataggattttgatatatggatgaaaaaacttagggtacaaacctacttaacatgttaataatacaattgacgatataaacaaattaccagctattgaaccaacgatttgattttaaagattatataattatgggaagatgataacattattattaaaaggtaacaaaatatttaacgtcaaaagcaaatatggtatagagatataagggtattttcatgatagagagaaaagattcgagagtagttttttctaatacttaattttataattttatatgtatatagagtgcaatttccctaatataaacaaaaaaccaaacacatagtactagttttgtttcacaaagcacaacgcaacattttcgtctaggagtttcacgaatgagtagctgacacgtggctgaataccgaccatcgatagtagattacaaaagtatccctaacatctccttctccgccgtgtcaatcgcaaacaatcgaatccggatccgatccgattcgcctcaacaccatcattatttatctgtttcccccttttcccaagctctaacatttagggtttcgcgaaaaatcaatcaggtgaaaaataatcgaattattgtaaaattgatacataaattcacattcaaaagccaaagagctgagaaattattttttgtaaactgttggtccttcggagagtgtccatgaacgttagtcttcaatg

SEQ ID NO: 1055 - DNA, 3000 bp, Unknown
  misc_feature (1)..( 3000): cDNA_ID_2129845_gDNA_ID_1620352_Annot_ID_154359 3000 nt of promoter + ATG
tgaacatactgtttcctaaaccccaatgtattggctccatataagctgtcctctgtaccatcggaccatatggaccatccgaacaactcccgtaaaacaagctttgcccgttcgctatcatcggctctgtcacattcgagaaggaagacacttccgcagtatttgaggtcatctggttattaaaagggaagaaagagagcccgttgtaatccatagtaggcagaggaaacaactgatactgctcaaaacattgccgattgtaaccgcataaaccaagttggtcattagaccaacaactagtgtcaggaaatgtctgattcctattcgtagcctcttggatcttgttttctactgccatgaaaaccgcatagaggtcatttaaagaacactggtcgagctttttgtcccatgtaggatactttgtcgcaatcgtcggtttctccaccttagtgttgtttttctccaagcattcttgcacggtgtatgtcttggtgcagctgcttgacgcagtgtctctgtacttggttaagatttcacggactttgctcccatcctttggccataactcgggctccatgaccatttcgtcccctgctctgctcgggccgtacacaatgacacaagtgtccacaccgcagagtgttgagaactcactggctttcttatacaaacatgctttcctcttcttgtaagtcgttatcctcgttttctcgttcgttatcctcgtcatctttaccatctttcgacccatccagatacctttgcttcaatctaaaaagccataaaagagtaaaacacaacaatagatcataatcttgaaaattgaaatagtaatatcatcatttggatgtaacgatcagctaccaaaacatacagaaacactacaaatttacaaccaaagcactaatactagtaaacattttgttgtcaataaaaaatttgtaactcatatagcttttaggtttacattttaacatttcatagcaatgtaagccttacaaatgtatagggaagaaagattcatattattttattctcaattttttcactaataagcataatccttatcgttttgtcaagcttcctatgcataattccaaatccatatacgattaacacgaatagtaaaacagatgggatattaacataaagtaaatgcagagtgattactagaagaaaaaaagaatgtatataataccttctttaagagctctactttctgaagtttcttgatttaacaatggagttcctctttctgtgtttatataagacacacgcaaaaaaagaatatatgttttttttttttttttttgtcgtaaagaatatatggtttattctcgaatattgtttcctcccctaaattacggtagcaatgctgatattttatttctttccatgttttcgagtagaattaaagaggacgaagctatacaaatctttagtttctatgttcacgcacaagtgataagagttcagttaaaggaaaacattgtaattacagcatgatcaagaaagaagattttgtttgtgatttgtgccaattaattttctcaaatattccttttttgctttaattgaaaactttgttaatattcttacggaaatttggcgccggaggtggctgaggttccgtttgcaagttgcaacaatgttcttattggtcttcatggccactttggtagtttggttgtatagaaattagaaaaaagattaaagtttgttgtcgtaagtttgtcacacttctgtgatgactatttgtactgatactcgatagttcattttaatataatactaggagacatcgacaaataataaatttgtttcataaaattttaaactactagtagctgttggtgttgatcgattgatcggtaattcatagcctttgaaatatacatttaacaatttcaccaatcaccatatgctcatacgcactggtatgtaactaaaaaatgactagaacttgtaaaatgtcccatgcaattattacttagtgcgtattttgaaattttgtttttttatcctttattatctttcacattcgaataaatatcagctatatgtgataaacaaagttttgccacttgatgagtagtactacgagactgaaacgtgacatatcgtggacccatgatttaatttgatcaaactatatgacaatgaagacggaaataataggttaacttaaatatgtgagacatttttcgtatactatttatatgccaaattcactactataattggtaataggcagtgttgatggtggcgagtagcatgggatatgttctaatgggatattttacatgcttatccactaagggacgatatgtttccacgtcagcaaaatggttaattccattttctttgttaaaaaaccttattcaatggatatttaatatcatataaaaaaattaccatctaaaagtacaattagtttgactatatgctattcaagtcctcatagttttattattcaattataagtcagtcataatagaaatttaaacttgtttccatgttacacattaaacaccagtttgaaaaaatcaactctgatttttataataaaataaatgtaatctcaatcatctcctgaacttcaacaagtaaaacgttaattagttttgataatttcactgatttgtttcataaaaacacctatactcctataaataattaaatattgtaggcacgaggtatatagtagagaacgaaagttggggtcaattatagaaatatttaaaacatacgggcaaaaaatagaaaataaaggcaataaaggaaaaagtatagggtcaagaaggaattataaagttgataattttcttgatttaaaaattcagtatatatatcagaaaagccccaaataaattttgggtcgttaaaaagaaaagaaaaagagaaatagaattttgcgtttcaagtactccatctccgtctcttttcctccgcatctaaaaccatctgagaaatatctccgacgaaggagaagaaacgaaa

SEQ ID NO: 1056 - DNA, 3000 bp, Unknown
  misc_feature (1)..( 3000): cDNA_ID_2129856_gDNA_ID_1620352_Annot_ID_154363 3000 nt of promoter + ATG
agagtaaacccacaaaaccccaggaggagaaggaaacaaaaaatagaaaccttgcattgtagaagatgagatgggtcgaagaattcagccatgccgacttgaccaacatcttcaatgaaggataatttctctgcgtaacctaaagacatttaggttttgtcttctcttttggacaagaagaagaacaccttctctgcctctcgatgtataaaaaagcagagacttggacagtgacttctatttatgaagtatcaatatattttaattctttttattatgattttattattatatgcaatctggaatattttttttgacatttctcagaatatcagagattttagattttaaaagtgttgctaaatttttatataacatttctttattatgtttccctgataaacctaaagtttgtgatatttaaatgaaaatccaaattagggtattaattggattcatataaaacttattttatggcatgttattatatttctcaaatttgtttagtttggctaaacaaaaatttgatataagaaaaacattaattacattaacctaaaatatcatagctaaattaagtgggtgatatcattgcaacttttaatacatttcaccaatttttatctatatatcatttatttatttttactttttttatgtaatcatgaaattatgaatatgtgatccataatctctttagtcccagaattagactgataatatttgtgtcaagctcacggttgtagatcatcttataacaaaacttgaactcggtttcggtatccttgaatcattgtaaacaacattcatctaattggttaaaccaatacaatgagttattaaataagtaaatttatcgtcttgttattatttaaaatatataggtaaatgtcaacacattgaatattgaaaccatttgataaagtgggttgtaatttgtaaaatactaaaccatatgacagggtttactatggatttaaattgattctatgtgacgttctggtgcatgctcaaccatgagcttatattagattaaaatcttgttctatcgaaccggtttgaaactcatcactcaaagccattttgaattcagtttggtgaataaacttataacatatctaagtttcataaataagtattgttatatatcatcaatttatttatcaagattaacatacctcacacagttttttaataaaaaacatgcagcatgcagacttaaatatgggttatgttagtcctcattccactctcgacaagaccacaacccacaccatcagaattaatatttcctcggatacaatactgtccgaaagtgtagtcacacctcaacactagcttgtgcatcatttgaaaagtagttgaatcctacaacagactagtcaaaacaaactcacccagcaccatgaatgcacaagcaaatcatgagtttggtggatactttttccaaacttgtccaaaaagccatcatcgatggtaatttcaaagcgagggttaaagttatcataattaagcagtttattgtgaaggctagcaccttactaacaaatgaccctcatcaacttttttctggttgctcttgtcagccttcactacatgggccagagcgattgaatgtaattgcaactcgggagcatgcaacagcttagttggagccacatattatccatcgtgtaaaccccgtcttcaacgtaaaatttgattatttgattacttgaaacaattcatagttcttcatctttcccatagcaaaagattcattcgacttgtcacaattatcttaaaactcatgttactcataatccatcttctttgggacatctattgatgaaaatggtaccgatcggtatatatctatatattccaaagtaatacaaatgcgttttaatttgtcattacatgacaaaaatttgtctacatcagctaaaagacacaaacgttttcttcagaaatcctccaacacccccgacatgtgtaatgccatgcggcagataatacgaaaccgaggaaaaaattcatctctttttattataaatctcaaaaccaaagaccaaacactcatcattttctctaagtcatcatcatgttgtctcttcaagcttctctctctgttcctcttattaccttttatctatcacttttaaactgtgtcaatctaaactcagctttggattcaaacgctggtttttgcactccttacccatgtaaccaaccgcctcaaccaccgtcctctacaggctactctccatatggtaaccctcctccaccgtctccacagtattcaccacccccaccgccttcacagtcttcaccgccacgttctcgctgccctcctgttccgacgacaggctgttgcaaccaaccaccaggtccaccaccttcgacgatgtattctcctccgtatccttatttttatactcctccttatccttacggtactattggcggagggggacaaggcggtggcggccaaggaggaggaggaggaggagccgaaggcggtacaaccggttcagcgatggcttactattcctcttccattcccgtatatgttttgatgcttgtgttagctaatgcttttattgtcttttaggtcatacataggtttcagataaatattaaaagcctataaaaaatgtcaccttcttcttctgttattatctcaaattttttgtttatatacttttgaagtattttttttttgtcgttacttttgaagtatattctaataaatgaattatatatttttcaacgttataattcaactaaaccgagatcaaatcgaaaaccggttggtacacatacgaatcgcgatcggtacaaatatgtatcgagtaacagatgaaaaccgtacacgtgtctgtatttgccacaagaatcaacggtggagaacattttacgaaaagaagtcgaggagataataaataaaataatttaaatacgaggattcgaaagaactctgttttatcttcagagacgtttatcagagaggcatgaatg

SEQ ID NO: 1057 - DNA, 3000 bp, Unknown
  misc_feature (1)..( 3000): cDNA_ID_3060353_gDNA_ID_1620352_Annot_ID_154350 3000 nt of promoter + ATG
ggctccaaataagaagattgtcttagttagaaaatggacttccctctttaatataaatattaaatactttcacctactttctccttgcacaccaagccacaactgttttatacttgtccccacctaagataatgaatgcatgaatgcatggttttcaacaccctgaaaaagtaaaccggtaaaattcatcgtgggagtcaaaattggtagagtttaacatgcttattattaatttgcacacccatttctgttgtatgagtgtaatccacacacaaaaaaattgtttagcaaattgttacacaaaacagagcttaggtaataagaaaattagcaaattgttacagaaaatatattctcctaagttgtctagcctctagtatcccgataccatacaatccacaaaacagaggatggaataaagtgagagaggaaggaacagaacaatacataagaaataaaaagcaacataaaagattgggtgttcttgttagttaattagaagaatgttaaattgtcattataaaatattttttaaagaatgttaaatttctagaaaacttatctttgtgggatgaagagaatattattttcttttaaaaaaagttttgtattgttaaatctaaacatatacatcaaactttaaaaatcaaagcaaaaaaagaatatctctccttttgcatgcttttgacatattgaatttaataggtaattttcttaattaagatgttaaacttatggattcatgatttgaacaaaactgaaaaaagtatatggaagcgttggtgagattcatacctatcaaaatgaacaaaaggatcaccaaccgaatagtaaaaccaactactgtatttatcatggccatttttcttcttctttcttaatttctctctttattaaaaatttgttaattatatcataatcttaactgttttatataaaaagtgttttttcctagaatatacaaggtattccgcaaaaaatgccaataaaaatggttttaaattaaaaagaaagaccaaaactcatataacctcaaaaacatagtatgttatttttagttaatataaatattaaatactttcacctactttctccttgcacaccacaactgttttatacttgtccccacctaagataatgagtgcatgaatgcatgaaccatcattggccgatgcgtttcctggtgcatgtagctcacagccgtcgttctcacattttgttatttatgatcatacttttttttcattaaaaggaaaaaggtttactggtttggtttagaacaagaactactcgttataatcatacttttgtttaattaaaaaaacaaaaacaaataatttctagtacatcttatattacatactatagtttgatgataaaaataaaattcaaatgacgattatcatgtcgaaaagacaaataataattgtcttactgacctacctgcctgcctctatatatatactagtctttggtcgcctttactataaccaaacatcgagcttgccttagagtttgtctcaagcttctccttttttggtattttgtcttaagcttccttgcttctctttcttcttcttctctactctttctctctatttcaaaccttcgttttctttccttttttgtataaaatcttaaaatcaaccaagacaatggaaatgaaattgctctttacatcggctttcacccaaatgttcggctactcgaaccatatggatcaagccagcaactgccaaagcacccgcaacaaaattataaagatgatgaagaaagaagaattcccaagtggattccaagtccctcttcactaccctaaatactccaagtctgattacgaagttatggatgatctccgccttgacttgctcctcaaacaatatggattctcctttgaaggatctcttgaagacaagagggtttttgcaattgaatcatttctctggcctgatcagctttagatggtctatgttggtgttgaatgatcttatatcgctctccacatgcatatcaatgagcctatactcgagtggttgaatgtttttaaaattatgtcaaattaccatgtatatcaatcacttagtaatgttttagaactatgtcaaatactagtgtgtgttatatttctttgtgtgtggggatgttttgaagtatgcaattcttcacatatatatgtatcatatgagtgcattaataacatctttgatgtcatgtataacactaaaaaaatgtgatttatcgacttataaaaatcttaacatattgacattaacataaaacatatagattattgtatgatatagattaaacatgacgtcatgctggatattttggcttattggcttgtacattacttgtgattatgagtgtataatataaaactaattactagatttgcacaaaaaaaaaacagaaggatagaaaactaactagaaaattaagacattacatacattcttctatatgaaaaaaaacatttaaaaaacaaaacaaaacatttttatactaagatactaatgaaaaatcctatcaagaaaatgaagaagatcataaaaacaaaattatcggatttgaagagaataaattttgaccaaaaaaaaagaagataattaaaataaaataaaaacaagaattggccaactgtgagaacatcatcaatgaagaccaattgcgagatccgacaacaccgcttcttttgatttcgatcttactttcctgggtatgtctcaattcttcttcctccttcagttcgtgttctgtgtctgattgattactctcacaaaactcatcttttcattgtctaaaggtctaatctttagctataactcaaaatctgtatctaagttctgacaagtttctgttacgaaattcaaattttttgatacatatgttcatttctcagaacaggagatgtcaattttggcgatggttttcgtaacataaacatgagatttgattgttctgtgcagatctcatagttaatctggtttgagtctagaa

SEQ ID NO: 1058 - DNA, 3000 bp, Unknown
  misc_feature (1)..( 3000): cDNA_ID_2129808_gDNA_ID_1620352_Annot_ID_154347 3000 nt of promoter + ATG
ccagcgcgcaacctacatagagaacaaacaatacacatcaatcaatggtccaaaaagttaaaattctatcgagttctatctgtaaagttccaataatgggtgaggtgagcttaccgatccattggcccgtggagggacggataaggcaagaacatatcccggctccaatggcagcaaatactaaggacgcgccacatcgtactgtgatacccacaactttgtttccgagatccttagcttgctgtgatatctcgactttctcctcttcttcttcttcctcgggtttaacattcgggaacacacatctgtagatttcaatgcctacttgaactacccatgatgctgcgattcccaggaagtgacctgcataaacacagccaaagacagaacatgcatataggcttcaggagaactaaacaatgtctgatctggaaaaagaaggagcatttgatgggagggtcacgaagagtagagaaaccaaaatgttttattatacctctaagagttgtttggctgactttaaagatatatacatgtgtcggcaaccctctctgagccttgcgtaaagccgactgaggcacatctgcataatatatttatgttctccgctctattagttcatcgagctaaatatgtctactaactttttttacaacgcaagtttgttgtggaagcaaaagtaatggaagatgatgttaccctttagaagtttccatgccatacgctgtgagacataactcagagccagcctttcaaggactctccgagtggtcacaactgtggtctggatcataacaccgaaattagcagtttaaaccatgacatcatgaagcaactacagatggtaagaaccttaaatgcatactaacctcacgggcaatttgctttgctgactttttaagaggaacaatcaagtctgtgtggcggttttcttctgcagcattgtttaggaaatcatcatcatcctctgaagccgttttaggctccaaaagaggcaaataaaacatcaaaagggatctcactgtagtcattgcaagtgccctgaactcaaaggccgagagaactggttttggctggatattgtattccttggacctagaaatatacgcaaggggttgacgctgcaaaacatccgcagacattttccgtatagcaccaaggtaatcatcatctattgcagcagcagcatcacaatacgcaactctaggctcaaaagaactgtaaacataaataatctgagtcaatgtcgtagcacaaccaatcatgccaattagttctctatgaagtggtaatcaccgagagtatcaaaaagacacatgaatgcagaaacctatcaagagatctatatagaatagaaacagagcttgtaaaactcaaaacgccctgaacatcaaaaaccatatctaaaactattcatcgataattgtaatctcaccacaattaaactatacttcaaattggattgcaaaatatgatctttactagtaactgatataaatctgcaacctttcttattcaattgagcaatagaagatgatcaattctgaatttctaaaccctaatcagaaacaaaatcagaaacctagtaatcaatccaataactcaatccaccacgatccagtgaaagtcaaaacaaatccaaatccactacagagagagagaatacatacccgaagagaaacctagacgcaaaaggagcagaggcggcagcagaaacagcggcggcggaggcggaatagaaggaagatgagtggagagtgttcttagattgagatttcttcagtagatctaaaactaaagctattcccgccattactaacaaaccaagcttgattcgatgcaataatcaatctctctatgcgtgtctctcaaatctcaattgaggtaatattcttcttaattcaactttgaagagtttctcgattcaattaaaaatattattttctcgagaaaagcaatgattcttaacgttctctgttttctcggtagccagagagacgagagagaacaaaaaaataaaagacagagatctatttgacttttcgttgacttttttttttagtcggccacggtcatttaaggcccattaaagacccatataaggcccaataacttcctgatattctcgtcatttcgtagtaattgcacaatttcttcttctctctctcttcttccttcaccaaagcagctgcttttgccaaacccctgtgactttgagagagagagagagagagaagagagatcatcatccatgggaataccttattttctccaagtttaccttaatcagaactcattttcttcttcttctccatctccgaaatcgatcgtcgattttgtcttctcgccgctattctaagcttctaaagttcactttttttttctcctgaatcatttgtttgttctgtacaaaccttagaggaatcggtataaatctattctaagctgaaaattttgagatgcccatttcgtcttcgtcatgcttaagctgattaccgcagtcaaagtcgtatcttggtgtttggcggcgctctcgagcttagatcagtgtttccatggcttagtctctgatctttctacagatcttcataactctccgctcactgggttcttatctgctttctctaatcctaacttcttcttcgtccggattatttgatttcttaaaagctggaaatttacagagacttcgacgatttagctgtgttgtaggaagctgggaaagatgttgatcagagttatgcattagagtgatttgctttaggatttccacggcacaggggattgattttaggggtattgtttggtcattagattaaaggtttttaagggtttccactgtcattggtatatagagattgttgcgttggggttgctttagaacttgatttaggacaaaagactttgactttgaactggcagtagttagtgtttttatctgatgtaaaggagggtttggagcgtttgatgcttgccgaatcaattttattttgaaaaatg

SEQ ID NO: 1059 - DNA, 3000 bp, Unknown
  misc_feature (1)..( 3000): cDNA_ID_2129749_gDNA_ID_1620353_Annot_ID_154387 3000 nt of promoter + ATG
taatgtatatgactaaaataaatctaaaattttaatcattggaaactcattttggtgttcaaagaaatatttagtaacaagtaaatcatagttaatcagaatgtcaagttaaaattagaatcaggaatatgacagcatttttctttgacgacaaatgtaacaaaaatccaaaaaactgaagaaaaaataaactgccgacagaatttgttccctcataactcacacatctttgtctttcgctaatcgctacaatcaatttgattaattggaaaaagttttctttaacaaagccatgaaagccgctatttgatagattctcaaaacaggtgcaaaagatttgattaattgactcgagatgatgtatgatacacatatttggtgaatgcaatagtcattatatatcacatttaaagtatcaattttattaaagaaaagatatgcgtaaatagcattggctgttgtaggacaagagacaaaagtcacaacattaggcatcaaatcttttggaattaccaataagcaattccctaggttggtccactactaatcgtatattttggtttatataaagattttttttcttgtttttttggagttaccaataagcattcctgccttattatggcccattaagaatttttgttaatagtttgacaaaaaaaaaaaaaaaaaaagaatttttgttaatactataaatcctactttgttcttacgaatattttatcgtatgcaacaagccatgcattatcatcaacaagaaaatctaaactagtaaaccccaccagaaatggctaccgacttatttcccaagaaaacaaacttatcccaaacagaagaaatagaacaatacgttatattttccaaaagcttaagggtaaacaattttttaaaacattatgattcttccgtttatttcgctatacaactatagtcttcacgctaattactctagcttcatttacttcaactgttcctcatcgacgtgacccattttcaccaacttaccgtccaagtttcaaactcaaaaacatttgttctcaaacatataaaatgtacaaatttgcttgactgcatttaatatcgaaactcagaagaatgagaaaaggggtcctacactgtggtctttgcatgtaatctctgaaacctctttaaagtctttggttttggttgttagtgggtcccacttttcacgcagtctctgcctttgaccaaaagtaacctatcattacatttttttaatttacacatattaataggccacaacaaaaggtgttccttcattaatttctcatttgtcattgacacatccaaatctttcaaaatccaacggttcatgatttctttagaaagctcccaaatagttcctttgcacataattaattttctttttcacttcaattaaactattcaacagatttattccctttttgaatggtggaaccatacaataacttgactaagcacaaaccacttacagtatgatttatgtgctcctcctccccacatggtatacacatatgatatacgtaatatgtagtgaaagagaaacgacacgtaaacaatgcatacgtcccaatgtctatttgagagcgaatagcttttgtatactctttttgggtatttgcaaaaagattgagactcaacacagagatgccttatgtattttatttattcacatgatcacatctttatagattctctatccttatattcaaccattcattcacgttttttaattttttttaaaaaattacatttttttaatttacatttttaataggccacaacaaaaggtgttccttcattaatttctcatttgtcattgacacatccaaatctttcaaaatccaacggttcatgatttctttagaaagctcccaaatagttcctttgcacataattaattttctttttcacttcaattaaactattcaacagatttattccctttttgaatggtggaaccatacaataacttgactaagcacaaaccacttacagtatgatttatgtgctcctcctccccacatggtatacacatatgatatacgtaatatgtagtgaaagagaaacgacacgtaaacaatgcatacgtcccaatgtctatttgagagcgaatagcttttgtatactctttttgggtatttgcaaaaagattgagactcaacacagagatgccttatgtattttatttattcacatgatcacatctttatagattctctatccttatattcaaccattcattcacgtatacgtgtgtatatgtattctcatttatatgcatcaatctgagtatatgccaaaaagaaaattaaataattaccttcctttaagacataaatcctcacccgattgcctcgaatccattactttttttttttttaatacgtgggatttcaaattcttaatgttaaaaattcagtggtgaaaatatgctactacatttttaatatgcattgtttttgttttgaacaccgttacttattttatttacagatttaactctctctaaaaatacttgtctttcctaaagcaaagaagcaaagaatcgtgtcctcttacacaatcacaggctttttgcaatttttttttttgcaagtatcatttcttttcttggcttcgaattcagctccctcttcttcttctttattcactttctttcccctttttcttttatttcattataaataaatctgatccgatacatatatggttccttcttctttatgtgcaagaacaacacatggtttaaagcttcgaatctctccctttgcttcgtcatatatctaaatcaccccactcaagatttcaaattccctatatctttgtttttataaattctttctaattttattgtcacatataattgaagcctaataaatcacaccacactgtcttactctgtttttgtttcttctctactctgttttttttttttcccttcaacattgaagataaacttatcttttctctctcaaagactgaaactttatcaaa

SEQ ID NO: 1060 - DNA, 3000 bp, Unknown
  misc_feature (1)..( 3000): cDNA_ID_2129769_gDNA_ID_1620353_Annot_ID_154392 3000 nt of promoter + ATG
gaagcgagcttgcgcagttgtaagagaggtgttggggttaacggttgagaaaaggaccttgattgatcatttgacacatttcaggaaggagttttctttaccaaataagttaagagacttgattgtgagacatccagagctattctatgtgagtataaaaggcatgagagactctgtgtttctcgttgaagcatacaatgacaatggtgatcttctagataaagatgagagattggtgataagagaacgtttgatagatcttattcaagaaggaaagagaattagacgtgaacgaagaagaaaaggcgccacacttggtgataaaagcgtggaagagaaaaggaaagatgatgaaacaattgatgattatgatagtgatctggatgatgaatatgaagatgggtttgagaatttgtttgactcagaagatttaggtgtggaatatcatttcgacgaagaagatgatgatgatgaggcaggggttaatggtgaaagtgtagagtattggagtagaaagctttcgtcttcaggtagtagcagtgatgaagcaaatagtgctgtggaatcatggtgatggaaaatgttaaatagatcgttttgatatttatactcagaaaattgtacgcaattacacaataacataatgtttatgtcgttaatcttattctcattggctttagagctgtgtgtattgatgaaatagttcgggataatggtaatattgaatgggcttacgaaagaatatgaggccttttaactaaacgagcccatttaagcattgaaagaagtcgaaagtcccacatcgcttagaacaaaataagaagttgcgtttatatacaggtagagtcgaagtagtgattgtcccttcggggacatccgataaaattggaacgatacagagaagattagcatggcccctgcgcaaggatgacacgcataaatcgagaaatggtccaaattttttttgaaaattttcccggttagttaatcggtatgggtagtaaaccgacgtgtcggatctttgtcatactcattagtcattaccgaatctagttggtcagagggtttctggataataccttgtaagaacctgaagaagaggttttttgataggcatcattcttatgactatccgagaaggaatcattttgatgaagaagatgacgatgacaaggcatgagcagtgatattggagtagaaaactttcttcttctcctggtagtaagagtgatgaagcaaaaagtgttgtgaaatcatgttaagagagtagaaaaaccatcaatgttttgatatttttgtatattcgaaaattgttgcaattacacaagaacacactgtttctgtttggtatcttattctcatttgcttcagagaagcgaatttagcatacaaaactgtgcgcgttcccttctttattttctcaactgttgttcgagtctctcaatggctgcaccaacaccactcgtgacctcaccgtggtggcctgtgtcaacgttattgccttcgtttgctttcttcatgagcttcagttgtacccaccctgtagaatcaatgcaagtatcacttagttctagccaactttccaatcctccctgatgcttctctatcattctctaaatatggtaatgacttgtaagacttatttatgtaaataaattaccaagagggaagcacactgtggctccaagaactgaaccaagcaacacattccgcgcacgccaagcaagagaccccggcactgccacattttgattagaggtaaaaatatgttaggacacagaaaagttaacatcctgaatctaataagccacaagtccaaaggaggatgcagagagtttgggatgtatcagtactgattaggccaaaaactgcagcagtagctgaaccagctccaaccacattgaaaacatcatgcactcctcgggtctcagctaaaaagttttgtagactaaagaaggaagcagtgaacattccaagacgcatccctccaatgagggagccacgagttactcggatgaaccttttctccattgcatctcgcatcaacctgtgttgttcacgcttatcctgtgtactacccatcttcaacatcacttctgcatctttgctctgtttcaaaccacacacacactgattttaacacaggaaataatattcagctaaaagtcttaaactttgatatcttatgagttcagtctagtaccagaagtcactaagttacaccaaggtagtggaatcgaaacacaaatctcaaggacaagtaacgagcttgaatctgaaattgaaagcagacataccacagaagcagaagcttctttgctccctccatatagcaatcctgcaaatactccaacaacagttgctgttccccagttgggatttccagctaatcttgaagaattctgttttatataacataaaaagcaatcacaccacaagtaaactatgaaccaatcacttaaaaaccctaacttttatgtagattcttgaaatgataatcataaagaacacatattttgaaaagctttgcttctaacaatgatcttatcacagggaaaatgaatataaatacaatttcaagtaagtgatcccgattcgaatgatcttattctatgcatttgaacaatacaaccctaaaccggcttgtcgcttaaggaaaatcgttgagagggaacataaatctcacccctgggattgtttcttcgggtttttctaccgcttccatagatgactgatcaaacactatcgccgtaatctccttctccgccgtagtctctttctccttcagtccaactaaaggtagaagacgaccagaacggtttaattaatcatcggcgatctatcttaaccgatcaaattttcctagaccggttaaatttgtcataaccggtcgcatagaccaatttatgttttcttatgcggaacgtcttcgtattcctttaaaacgctttattttagccgccggggaaaaaattggtgacaagagcagagagagtcgcc

SEQ ID NO: 1061 - DNA, 3000 bp, Unknown
  misc_feature (1)..( 3000): cDNA_ID_2990683_gDNA_ID_1620354_Annot_ID_154404 3000 nt of promoter + ATG
gacactgtgaaaatcagatgtccagtagtaattagagattatcctcgcgcttaccaggcaccaagaaacttccataacaaaaacaaatgcaaaaaaatgtatacctctcttctagggacgttatttgctctttgacaactgaaagaatgatcgcctcatctgacttcgcctgcgatgaagcttgctttttttcactcactgcaacacacaagggtaatttcagtaagaaaatgactcgggaaaatgaggcgatgtcttcaggatcatatagcttgtttaccaaagaaaaaatgctttaaagttagaggtgcaaacttaggatgtctcaattagttcatgacttcatgtagacattaacacaggcaaaatgaatttgtacaagataaaaaacgcttttatcctcaccttctactttttcttgaagcctggattcacctccaagatatgaacgttcatccgtttctaagtttagacgttgacggtctgcaaatttctctagcaagcggccgattaggttatgtgcaaccaagcttgtctcatcagaaatttcttggattgctaggtactggtttttatttcttcttcgtggcttctgctcaccatgatcatcagactttatgttttcaacagaaaacaatgaccgagagctaaactgattatctacttccatctcaatatccctctcaaccttgactcgggttttgctcatagctatgtcatgtctatcactgataactattgatttattggacgtgggagtgacatagagagatctaggatagactcttgtaatactctctggcaggtctcttacaaccaccctattgacagaagagctgaaatcatgctggtttgtttcatgtgtagaatcagtcgggtccaaaaccaagcattctgcaccactttcttcatgatccgaatcagaggactccattgcatcgtcttgagtgtctttgacttcaagctttatgtttcggcatctactctcttctttattacctaatttctcgttatcaaataaattacaattctcatcatcatcatcatcatcatcatcatcatcatcattatcatcactgtcttctagatcctccatataagcatcaccgaagtcctgatcgagttcataatttggaatacattggcaaaatatttgcttcacttgagcactcacatttaatatacactctgtctcctcctcaattgcttcccttggacataccttatgctctacattccccgtcctgctgttgaccaatgaaagagcttccattaaagactttggaatggtgtccagatcactgcactcaaacagatattcaatcaacgtttttctgaccgctgatcttaagctgtcattagaaacttcagcttctgggtctaaacaaagatgcaatcttttcagctcacgaaacctaaccttacggagtaaccatactgccttcactatctcgttctgcaggttctttgtttctggtgagaaccgaaaaaaatctgtggcagcagcagttttgtagccaggacttagcttaagtgataaatctactactgacaacgctttagccaattgctcctgcagtttatcccctgcagaaagttctgagagcatcttctcgctagcttgcctcacttggttaatcagatcacttcgacgctgaccacgtctactatttttcaattgaggtatcattcttgaacctttaagtttccttttcattgcacgtagggtctgagtagacaaactatctagctcattaagtaccttcattgcagcatcacgatgggaatgaagagtaggtgttctccccaaattcatcctgcaatcttcccggaaatttgcgggatcactaagaacttgatggagctgattaataatctcttctttaccaataccttctttattctttccgaagtctctcctgaccgaatctctgataatctctttcattttcaatcgagtcttgtcaaaggaagtagagcctcctgtgagtatcattgcaataagataaagacctttattcgtcaaagaatcaagctttctaacaagttcaagatcgcagaactttaactccttctgttgaacatcattgcatactacttgttgattcttgcaaaatccaaatgcctcttctacacgcgactttatcgtctcgtagaatatctagaaacacaaaagagatctcattgaagaaaactctcaacatttatctaaagagaacgtaagtaagagagacatacatcatcttccctaagcaaagattcagggacgaatctgtttcacaacgaaaacaaagaagaagagttcatagtcatataatcaatcagctaaaccaaatggaaactaagtaatgaactcactcagtctttcccggagtatggtccttggtggagtcagacatatcacaacccaaaagccacctacaaggtttgaaagtcacagacaaaacaaaagtctgaaactttttttggagaaatattaaaggttgaaactttcacaaagccctaataagcagagagattgattcgaactcaaagcaatcgtttcctatatctaagttacaattatagtccaaattcacacacacacccatataaaaccaaaaggagagaagtggaagaagaagaaaccttcttttgagacgaatttgctcatcttgatccttaatctgtgaaagtatcgaaccaaaatcagtcttgaagaaaactgaattattatccattgccatcttcttcaaggaattggaatcgactctcctttgaattgatatcgattttggtctgtttagtttgtcttgttcacttgttctcgtaacttaaaccgggttcgaagaatttttattaaatttttgagtaaaccggcttattaggtcaatacaaaaaagcccaatggacttttaagtttatggcccaaaatataacaaacgtatccgttctacttctgaaactaacctaaaacgcagagtgtgttgaagacgacggagacggcgacggcgagaagca

SEQ ID NO: 1062 - DNA, 3000 bp, Unknown
  misc_feature (1)..( 3000): cDNA_ID_2045461_gDNA_ID_1620354_Annot_ID_154422 3000 nt of promoter + ATG
ttatcaatgaacttgagaaataaagtttgtcatgacagagtgatatacatatagaaatttctggtcatgatacgtatggaaacaagacaagaaaggatggtgttcactgttaatggactcctatggggtacactacagctcgcgatgcatcaagtagaaaactggagattagagaagtgggtagaaaaagcagaggacgcaaacggaaccttagagaagaccctatcgatatgcgctgccaagaagatgatggttcatggtacccctcgaaccatagtgactttggttggatcttgcatagatataactcttctatgctgtgcctaagactactagtagatgcactactatgggtaatggatcgtgctctattaactttcatcttgtttcttaaaatataacccaagatcgaacattgtattatacatttgctgtttctgtgataattgatttgatacattagactgatattacgacaatctgaagagttctcacatttgtacctttttgtgatataaacatatacagtgggaacgctgaaactaatgactcttgagaatctgatctttaaacatgttcatgagaagaatcaatgagtggttcgttcgattcctcaccagtttccggagattttgagactttcttctctgggtataacacatagtgttgaaacatgaagaggatgtcgaaaaatattgatatctgttaaaaacaatttgagacgtttattagagacagagagagaattgaaccaaaaaaaaaactccatcaattttcttacaagtgagagaagagtctttcccatgttcccatagaaattcttccaagaatctggaagaaccaaaggaaatagatagttttagttttctttcaaaatgttattatcagagaaaacaaaagctattgatgtgatagagaagagattgttactttggtcaatagattgtataaccatttgcagatagttagcaagtcctccagtaaaatcgagaagaatattcccgatgctccacccgactgtgctcttcctagtgaagttcatctttgcctgtgaagcaaacacataaaatctgagtaatgctgattcaatcaataatgaaaaaaattaaggtttggaatcttttctgacctgtgggatgtacttgacgcatgtcatgaagacctgaatcgaactataacaatgaacaaataaaccattatcatcaaaactgttagattaccactaaaagaattggttcagaaggctttgcgcaacaacttacttgaagattgaaatgagccatagccaagagtgtgtaggtaatgctatgaagaaacagatagctgcaaatccccacacaacaaccacaatacctatagcaagtctggatactttttgaggtccacgctgagagcaaatcactagaaatcatcaggaaaaaaagaacacttgtatgggataaagagacaaaggcaagcctaagaaacttgattactcacttcatagataaagatctggaacagtgtaacagctgtcattacaactgcatggatcgagaatgcaacatcatttgcagccacaggtatcatctgaaataagcaacaattataacaaaacgactcaaaaaaaattaaaccagctcgaacaatctaaagcgttttttttttgctgaaacttagaaaggaacaaacttttatcttcaattttgacttcattagctaataagtaaaggtaaacttgtaaccatgaagataagagccaacaagaaccatcttagaatccaaacaaaactcatttctagattccacaatcaaattcattaaatgcttaatgcttcaatgaataacagagagaaagaggaaacaaacctctttatcgccataagtgtcaaagtactgcttttgaataacaggactaaagtagaggcagacattgtagatcatatacgacgagtgctttgtcaaattcaacatcacgaagtcgaagttcaatccaacaacactttcccaaacacaaccaagatttcatcaatttcaatttcaactacagatatagaaacaaaatctcaagaacaaaaggtagattagattaccttctcctacggaaattcaaaatcagctgtgggtaaaagctaattgaccacgaagcaaacgcgatccatccaacgatttcgtacgagatctccagcggaatcgaattccacgacgccattttcctcgatctcgatcgtctgttcgatttctccaaattttgttctcgacgttgacggagatttttgaagagccttaaaaagagctaaaagcagaaaatattattggggagtgaaataaaacagtttcaaaaaattatgggtctcatgatgaagatgatgacgtgtcatgatctgggagagtctagtgatataagattccacgatcttagcgtgatgggtgaagcaggtgattttaatgagccttatctctgaatctggcgctctttatggttacgttctttctttaaagttttgaaaccggcggctaaaacgatgccgttttgagttaagtttcagcatttttgactcggatcatttttttctcgggactcggatcacttaattaacaaaacttttggatttagagtaataaaatttacttatttgggtaagaatactttagtttatttaatttacggatgaaacaatacatatcacataatgaattggtgtaagtgtaactcttgaaaattatagaaaagtttacaaactaaatttagccaatttttttaaaaaagattgtctatataacccaaatgatatttgtcaaaaaattctttacaaatattatattacagagctgattacaatgagatagaataaaattgtaattataatcacaattatcaaaacaccttcattgtagtagaggttaactatcactccgggttattgcgacgtcgtttaggcttggatctgacgatctatgtgatctaaaaccctaagcaaggaggtccccattttcgtcaccggagagggaggattaatg

SEQ ID NO: 1063 - DNA, 3000 bp, Unknown
  misc_feature (1)..( 3000): cDNA_ID_2045428_gDNA_ID_1620354_Annot_ID_154430 3000 nt of promoter + ATG
tttcagttcaggagaattttgaagcaaaagacactaatggctcaaaccaatttacatcaaagagacatattttgcactctataagctgtgagaagttaatggcgtggcaacacggaatatgcaatgaacacaacaacacgtaagtaactgttggaaatgtaaatcataacaataaataaataaagtataaataaaagtgaggtgaaaagtaccgttgcaacgcttagacgtatctcgagatatctgactgaggaaagagatctcataaatttgtcatcagggtaactataaacgtagataactgctttatcaaagctaggtttgttctcaatcgagcacgagtttgtagaataatctgcgatgaagaatttctttaaaatcttagaatctatggccaaagatcttccaatatcttcctcgtcaagtacttttgctttccgataaaaatatattaaagtctctaaagatggaacttttacactaaactttgtcacattgtcttgctcatgttgcaacacatacaaatattcgagaataggacaactcgataagagcctaacaacataatcatcatctttgtataccacaaagacaaggagaagacgtttgagaggtgggaggcataccggagaagaaacatctacaaaaaccttgttggaaagatggagatatatacacaagcgtttcacatgtataaaggcttttgggcaagctagtaggttctgcggaccacatgagctggaacgctagtttacgaaccctgcgatcaaccgcatttccaatccactttcccacgttagcattaacaggacaatgtggaccgagttttatagtcaatctttctaatataggtgccttgtggagtcgcaatgactcgttaagaaaccactaaatagactgttgtcgtcgctcactttctccaaataaacggtctagatttttttttttggtgaccaaaatctttgatatctatgtacttcagctacggcaccatcgtccaaataaactgccatctttttgacaaaatcatggtagccactgcagcctttgttggaaccaataacaaaatccgcacgagcaaatcgtccggcaatgcactgatcctatcttcacctccttcatctctccgatagcttatggctcttttcttcacaaattgtggggcactagatattaatttttgtcccaaccatatcaagccgagtataatcaaaagcgttcctaacatatttgtctcgatgaaaactagaacaatactttagggtttcattattttctgcttgtattagacggcatggtaactaggtatgattctctttccttgtttcgtattgtttaccatttttttttaaaatttttattttatattttcagtttcatctagatatggtttgattgatataggaactattattttgatttttgcggcgattaatcttctaacgaaagacgctggtaaatgataattgattttatatagaaaggtatgtggttgaattgtttctagagcttaatattttaaaagaatctatgatttcaagtgaattatattttttaaacatagaaatattaaatagaattttcgtttttgttagtctggtataaataggaagatgcacgataatttaaatttaagcaatgttcctacaaatgtgtttgctttggttcaaatttaaggataatagatagattagcatataaaatactacacaaagttataaaagtcgaccgttggaccgataatgcaaatttaataacaacaaaacgcgtacagtgtctattttaagtccaccaggttccgttgtaccaatacaaaattatatctccatataacaattggcagtattagtaaatccaatagaccaataccatctcacatgaataatcaattttctcaagcattgccccaaaattagaatctttcaaataacccaactattaaaagttaacaaagtatacatttttttggtcttcttacgaatttataaaactgttaacaatgtttcaagttgtattattttataatatgctctaagttaactgggacaaatttgcttccacggttgtttccggtttgatttctacttttttactttataaaacacacaataaaaccagatatggcggaacatttgtgacgtggcttttgtgatttgttcacaatgccgtaggcgcatattagcattagcatcgcgtcttcatttgaaaatgcctgtggttaactgacgtgtcgtcgggataaagtccaaagtattttacaaattgagtattctagtctttcaagctcacgttttaccccctattgctcttgtttatgatattacgatccgtatttgtttgaatatcttgtaaatttccttttcggtaattttttggtttagatttaaaaattaatagaattatagaatataaaccaaaaaattaccgaaaagattaccgaaattaccgaatttgttttatagattataaaccaaaaaataaattatagattatagatggtttataatctataattattgaaaatttgtttttaaaataaaataatatatttgttagtgtagttgtctacgattacgatgtttgcgtccaaccaccccaaaaacaaaatcattcaaatgaatttccattacatattattatttttatttttaaatatatctaaattacaattggaaaattaagatctaaacgttttttgttagtgttaaaacaaactatcatatcattgattcttacaatctaatactattcaaaaaaatatattctctttttcatttatctcatttgctttgtctttttacgcatataaattttgatgtcaagttgggatcttcaaaaaaaacttaagggcaatttctgtaaatttataatatggagggattaaaatttaaaaagtcgccggaaacaacaaaattcgatcgagattcaattaaaaggggaaaaaaatcgaaaaggaaacaaaaaaaccattgaagaagatcggaggcgacgacggtgatg

SEQ ID NO: 1064 - DNA, 3000 bp, Unknown
  misc_feature (1)..( 3000): cDNA_ID_3060419_gDNA_ID_1620354_Annot_ID_154428 3000 nt of promoter + ATG
tctttgattgtttttggtgtgagcgaagatgggaagatcgaattctcaatgcccatctcattggattctcctctgcttcttcatctcttctcagttttggggattctcacttcccacttcgataattcaacaaaatctcgaggtgaaatttttagggtttttcagcaatttcaactgtaaatttcgtgtagaagaatgtctgtatcactttagggtttgtaatcgatttggcttacttgggatttacttagaattctagattttgttcaaattttgaagctttgtggttgttgttctacagggttttaaagatcctgaagacggttttcatgagattcattgttcaagagaacgtagcagagttgcttggaaaatcattcaagaggtatgaattgaaagcagtggtttttattattttttatgcaaatctgtagagttttctcattgatctttgttgttgctgtgaagtatctcatgccgtatgtggaaaaggagcggtatcagttaccgagtacttgtagagttcatcgagacaatgacatttatagagaacaagaagagcacaaattgcgttcagatattaatgagtggcgttgtggattctgcaaaaaggctttttatgaagagaagtatctcgataagcatttcgattcgcgccattacaatttacttaatgcggtatatactgatgcattattgttaaaatgatccatctttctgtgacaattcatactgttttggggtctattagcgattcataacttatgtgcttttgaatccagagtcatggtaaatgtctgtcggatctttgtggagcgttgcattgtgatcttgttgtagacacagctcggcttaagtccaagtgtaatcctgcagctgctgcaaaaaaccggcacttatgtgaggtacatatttttttagttttgattcggtcaatatcatatgacaagtttggactctaatactcaaagaaaccttgtagcttctgagaattgcaaagaacatttcactgaaagatttgaacacttctgaacatattgtcttcgttctgtttcttgtgttcccgtgcttatctgctctggtgtggttgcattgcagagtttggctaatagttgttttccggtaaataaaggttcatcagccaaccgtcttcacggtattagaaccttcctgaattttactatcttatttcaacagtttttgcttgtattgatccataaagattcaccactacttttggggtttaaactttacaattgtagacttcttcgtggggggttttaatgatccatagagattcaccacccttttttgggggttttaacttttaaaactgcagatttcttcttgcgtcagttctgcgatgcacatacatgttcaggaggatcaaagcccttatctcaaaaaccaaaggtaacataataaaccctttttttgtaaatgatattatatcatatcatatctcatttaatctcagtcatatgttttgcagaagaggagtatagtgtacattattttctccatcatcgttttggtagtgcttcttctctattacagctttgtctatttgttccgaaggtaacaacaacattaaaatactgtttcagatttccttacaactctaaaaccgaaaaaggccctcatgaactcattgttcttacgttttactaatctgtagaggattaaagagaagatctcaagatttgaagcgtattagacacaatggtctgaagaagaaacccttctaaccatatcaagctttagctttaatggcggctgagagagagtacattttttttctttgcaagatgattacaattaggatcagattagtgcattttgcaacatcccttacaattatatcactacttacaccaatattgttacttagaattcaatagtgtttactgcaactagagcggtacaatcgcatttaacatttctaaaacatttcaaaggttcaacttaatttcatttttcatatttgttagtatcattcttaattatttggtttagacttttgagtcttgatcaaccatgattatctcgatcattttatcaattgggccgtttgatgaaaggccttttgggccaaattacaaaacagatatctttggaagaaccaaaacgacaacgtgggatagacgttagagatgacgtgaagaaaaaaaaggagataagtggaacctactttttcccagtataagtccaatatcactcaaagtcaggacactaatcgaatcatagcctcgtctctttcaatctcaacttcaacgataaacaaaaaaacaaagtggataaattcaaagcacttaaaataggtaaataaataatgacgtgaaatataacaagcaaggtatcctaacttttcttttgctttttttcttcttttgggcaaatctcatacatgttcctgcatattttaaacactcttcgaatgttttatcgaaaaattaaaaacattcttaattaggatgaaaattactacgacagatcacactatacggtactataacgtggataattactacatagtattgtattattgagcttgtataagtatttgtgacaataataccaaagagttttagatattttattggtttttctaaggaaatacagatagataaacctgtcgaaccggttgatttagcacaataagcggtcatgaaacgtcttctacatcaaagttcgtaaatttccatgaaacgtctttgagcaccgaggaagaaagtttaaaattcctaaagaaacacacaaattaaaaaaggcaaaacctaaaccccatatttatttgtctttttttctttatcagagaattttaaaaaggtaaaaatagattatattctattccttcagaaaatttttatcgtcctaaaatcttcgtagcctgcaacaaagaaagactaagaaagaactaaaatattttgcttcgtctaattacttttttcctttggatttaattctcagccatcgccgccgttttcggcggtgtaaaaa

SEQ ID NO: 1065 - DNA, 3000 bp, Unknown
  misc_feature (1)..( 3000): cDNA_ID_3060411_gDNA_ID_1620354_Annot_ID_154421 3000 nt of promoter + ATG
ttttcttttatggatgatcttcgaacatctactgcgaaccgtcactattatgaaataaggtcttcagaaaatttcagtaaattgtgtgtattgattacttaacagtgctttcttacagttttcacttatatttctcaggttacttcaaattccaggtgctgtgattgttgcggttctcggaattcttgttgatttcccagtgatttcactcttagcattgtgtaaaagcccgtacatgttgttcaaagggtggcaccgtttgtttcatgatctcattggacgtgaaggtcctttcttggaaacaatgtgtgtcccaatcgctggccttgtgatcttactctggcctttagctgttgttggagcagttttaggatccgtggtctctagtgtcttccttggtgcttatggcggtgtagtctcatatcaggttattaaacaatgacttttttttttgaggaaaatgtgaatgctgatgatactgaattggtttctcttgtcataacacaggagtcatcgttcttcttcggtctctgctatgttgttgcttctgtttctatttacgatgagtatagcaacgatgttcttgatatgcctgaaggttcttgctttcccaggtttgtctccattggcttatctagcaatctttacctctctctctttcttttcattctaaaacagtggttttatggttttgtaacaggccaatatatcgaagaaacgaagagggcgctagtacggcattttctggtggtctttcaagaccgaactccttcaagacaactccatcaagaggaggatcaaacaaaggcccaatgattgacctgaaaccgcttgatgtactcactagtcacactcttcttttggttatctttgtatttaaacctgaagcctattcttttgatctttgcagcttttggaggctctatttgtggaatgtaggcggcacggagagattatggtaacgaaagggattataaattcaaaagacattgaagaagctaaatctagcaaaggcagtcaagtgatcagctttggcttacctgcttattctcttcttcacgagcttttacgctctatcaaatctaactccaccggtttattactcggtatgtttcaacagttttctgtcaattttcataaccgcattatctagtaactatttgaacatcatcaagaaacaaacaaaaccgtttctgtgtttttgtttaggtgacggtgtaacggagataactaccagaaaccgcccaaaagatgcgttttttgattggtttctgaatccgtttttgatccttaaagaccagatcgaagctgcaaacctatccgaggaagaagaagagtatcttggtaaattggtattactctttggagattcagagagacttaaaagctccattgttgaatctgaatctcctcctctaactgaactcagaaaagccgaacttgatgcctttgctcgcaggtaaaaaaggcaaaaaaaaaaacacacacaatcttgttacggctttctacttcggattctaagatgtgtttttggttttggttaggcttcaaggattaaccaaatcagtatcaagatatccaacattcagaagacattttgtggaactagtcaagaaactatcaaatgatctagacaataaacataaccgttttgaaggcggttcgagatcagttccacgtcccgggaaaacggtgtctcggattttcagccaaaaatcgttcaagaaaaagacaagtagcaatgggtcagatcaagattcaccaaacagagggttaagagacattgatattgtgtaagtaaatgttatgcgaccagaattagaccgaaacttcgtctgcttttagctctgtaatgataaatttatacagattccaagtgaatatgaaactgtttcatttatctaacaaatgttttacattcagcttttgcttgatgatgtgttgtttctcagaaacagcagaaccgtttcttctgcaatagaaatagcaagcttttagtttttctttcactttagacctcatttgatctaaaacataacaaacataggctgatgttttcgttagtcataaaatcttgagcaattgggattagaaatgttaccgtaggttcatcttgagatttgttattgtcacggcgttgtgaggcggcacgaccacttgcgtttgtctttttgtcgtctcgagctttagcgaatataaccgtaaatccttcggctgatgctggatcgttcacgtcccattctccaaattttggtaatggtcgatcttgttgttgtcgttgttgattattctgaaagtttccaatcacaaaaatgtttgatttctattataatccaacgaaaacacacatgaaaatgctattttttgtatcaaatttgtgaaacaaatgagaaagaaatgagaaagatcttaccgatgccattcaaagattgtgtaaaagatgcaaacagaacatgagatgatctttcttcaaacaacaagaaaacttgtttgtcttctcttttagtttttgttttcttaaaagaatttgattacgtttaaagaattagaatttgagaacagattagcgttttctgaaagtttaaatataggttaacgttttaattattgttgaaacttgaaaacagaaaacaccaatcttttgtagcgaaacggaacgctttttctcgtaccgtcttttgttttcgagtgaacttcatcgtatcaaaactcgccacgtgatctacacacttctcgaggcgaacacgcgcatttcagaacttatccattaatctctgtgattaacctataagccggtatttataaacggtcacgattttccaagttttttaatcaacggtcgttattacgtagacgaagctaagcctcacatctacaaatacgtatacatacatttttacataataattaattaataattacaggttattaacaaattaatcatttttaatagactattaaaaaaacaatttcatttcatttgctctcttctccgagaaa

SEQ ID NO: 1066 - DNA, 3000 bp, Unknown
  misc_feature (1)..( 3000): cDNA_ID_2045517_gDNA_ID_1620354_Annot_ID_154406 3000 nt of promoter + ATG
ctatcgagacgacaccgaagaatcaaaacgagaaaaagaatcaaagagataccaaaaaccaacaacatggaggttcttcagctccatcgaaacgacctaaaccttccaatttcctcgatgcggttcgttcgttatctctctctttctatcgagtacatttgattgaagtttatggagattttgatcaattcatacgaaaaatcgcagcttagagagagattatctggtgggcaatttaggatgctcaatgagaaactctacacttgctcgtaagttctaatttcattctttccgatgatcttccttcagttttcacagtgcttaattcaaaaatctctgctttctcagtggaaaagaagctttagactactttaaagaagatccacaaatgtttgatatggtaaacatacattaactcgagaacaagaacttatgttgttgattcttttagttgaattgtaaaattgattctgttttgttattagtatcatacagggtatcaacaacaaatgtcaaattggcctgagcttcctgttaactccattattaattggctattgtctaatagctcttctttagttgtggctgattttggctgtggtgagaatttcttatcctgtattgctatatcttactttttgcctgctgaaattgtatcactctatcgacactaatattgtctcaggtgatgcaaggattgctaaaagtgtgaagaacaaagttttctcctttgatcttgtctcaaagaacccctctgttattgcctgcgatatgtcaaatgtacgttgaatctttactccattcatgttaatttcatgatttctttgttccctcagacttaactggtatttttggggtttactttgtagacttcacttgagtcttcatcagtggatgttgcagttttctgtctttcattaatgggaacaaactattctagttatatcaaagaagcacatcgagttcttcgtccaaggtacagctttgtttacttgccaatctcttcttgttcatgggattttgtcatgattctgaataatacttcctatggttttattgtattccacagtggtatgcttcttatagcggaagtaaagagcaggtttgatccaaacaatggaggagcagacccaaaagactttgtgaaagccgtttgtgatcttggatttacttcggttttaaaggtgcaatcttttcttcttctttttttcatttccactataagaaagaaactcatttggttctttgagcaggacttctccaataagatgttcatcttattccatttcaagaaaaaggttagtgaaacatacttcctttcaggtttgttattagtctcgtagcttagatctacactttgtttagcaataatccttcttttaatcgtgtggttatataggagcagatgaattcaaatcagaagataataaagtggcctgagttaaaagcttgtttatacaaacgtcgatgatgagtttacaatggaagattactcagaatactatttttgttctccactgttgtatcatttaggcacattgattgtcctcaaaatctcataaatttgcaccctataaacttttgtaagagaaaagcaatcacaaagatttttcaagtgtttagatacagattttcagatttttgtcaacatagtgttcaggtaaagtgagatttaggccgtgaatcatgaatggtgtggtgacgcattcccctaccctctgcaactgcattttttaagttttaactagtcattcaagtttctaccaaaatttaagttcaaagtgtaaagtaattataacaagtatagcctaattcgaattacaaagatcacaacacaccctcatttgtaaccatgaatcccttacggctttacctttcactattctaaaagatcgctcgtaatcatcttgttgttacacaatacaacattcagtctctcactttctattctggcctctgggaaaccaaaaccacattgattgaaaatctctaaacttttgcaaaacacttctttcatttatggagagatgcataagcaaaaaaatcccttacctctacaaagttagaccaaatgttaagttagaccaaatgtttttcttgttttgttacagatgatatgatctcacttcacttataaaagtacaaaaaggactgatcttgtagtaaaaaggttcacctttctcaccccaccgacattattaatttcttttgtttttgttttctggtccacgatctttaaattcatgcacatttttttgtccttttgtcaattaataaaaacagtgttgttcgttaaagattgataaaagattttgtttccttcttcctactatcgtcttgtttattaaaaaaaaaaagacaaatatttttgtttcactgctcctatcttcacattccaggagacttcctttcaaaattttcttaattataattattcacaagtttgactttttctgttcaaatttggtttaagtcggaattgtaaatcgatttacagttctataaattttgccgaccaaaaaaggcaaaacaaaacagagaaagagaaggataaagagacatgagatttcctgtcactttacttacgcggacatagcaaacatctttttgatcattcagagttttttttgtcctattaccacttcaaatccaaaaacaaaagtttataaatttatttccctcaaagtaccacttaatcatcgactttttgaccatttctccatctgggttttattatcttcagttctttgtgtcacaactccagtttctttttgtattttgttgtttttttcacaaattgagattgttgtttcctataaggttttgttttattctatttatggaagtctcttgatttcgcttttataacctcaaaaagcatctttcttgatagcaccaagtatgatttgatcatcaaaagggtttggatttgacaggtctctattttaggtttgtttttggttagaagttaaaaccaaaataaaatcttaacttttggaa

SEQ ID NO: 1067 - DNA, 3000 bp, Unknown
  misc_feature (1)..( 3000): cDNA_ID_2045471_gDNA_ID_1620354_Annot_ID_154419 3000 nt of promoter + ATG
gaatcacgcgataggtcacaaaaaatattaagcagagtacaagagttactaatgcaagcacgttatgcatgactaactattgtatgtaaaagaataaaatctgcttatatgtaaaagagattatttggtacttgtttagttgtttaagtcgtcgtgagcatatagcatcgtttagtctattataatttaattgtaactgcggaaaaattaaaagtaaaagagatataaataaagttatcaaaacttatcaagtagttagtgggttctttatttgtcaacacacgaaaaatcaaatttgcttggaatggttgatattagattaaaatctctaaaaatactcaaaagtaattccaaatatgaaacatagaacactaacgtccgatgtcaaccacttaacactaaaacaaagttgattaaataagctgaggtctcacgttaagtaatttaacaatggcataggaaataaagagtacacaacataagctatttctcattgcacaaataactttgaatgtattctattaaatatcgtttggaacacaaggttgattctcggacaatttccaaaaaatttgctcatgtgatcttgctcttttctcgctataccagttcatggtaatgtttctattagatagtgactagtcggcgtagtagtttgaagtttcaacaaattataagtttagacataggcccaatcttctctcgctaccagttcatggtaatgtttcaacaaattatatataagtttgatttgaagtttgttgtcttcaagtttttgttccgtactgattgggccaatgtctaaagtacactaggccgtccaaaagagtctgaaattttattataacttagacacatttcatatgggcttcgtatcttggagaatcatgagttgatcgtgatgccgtcgaaatttgaagactttggccggctttctccatcaatttggtcggacttttatatttgagagttaagtttactttgtctttataattttttttttcgtaaactatatcatttctgcttgtctatgtaatttatgacaagttgatttcaacaagaaacaaaagttaaaagttgaaaactatgatattatatatgtaaattttttcagttcttttgtttttatttaattaattttcatttctcaatttcaaattcttcatatgtatttttcctttttaatgactttaataatatatttattcccattttaaaagcgtgtctcatatgttgtttattacatttaaaataaacaattgttaataatcgtttttcttattatatatattttaattagattataagacaaataatcttatcctataaccttcaaaaaatcaaattatattatattattcaaaaaaaaaaaaatcttatacaaaaaccttcaagtcaatcgagttttatatgttggacttataagacaaataattttataacaacattcatgataccatgttaagttttatatgcttctacttaaaactaattgattataagtaaaattaacaaatcatttatacacttgtattattataggtccatcacactcctcatgtatgatttcaaacaaagtgatttttgatgagctggaggggttaaacaattttaattaaaaaatatataaaaaatactaaactttgtttgaccagtcgtaccaagttgaaccatggtctaccagttaatccaatttcaaattatgtttttgtttcaagaaaaaataatactccatctgttcttttttgtttgattgtttataaaaaaaaattgtttctaaaagattgattttttaagttttccatgtaatatttattggttagtattggtgaattgtaattttcaagaaaaatagttaattatcattggtttagaggtatagaaaactgtaaaacactaaaaataatatatttataatcaatatttaatatatttttttaatatgtatgttttttctaaacaatcaaacaaaaaagaacaaatggagtaattcagaaaccatagaagagggagcacctgtcttcgcttttgattgcttttatatttctttttcccttctttacttccgattaggttagaatgcatagagccatagattattagtcttatcacttatattatttatttttgtatataatatttacttttataaataattataaatcttatactattaaattttataaacagatttattgtaatattttccaatgataccatttaatatatagtgatgtttcatataaagttcattttaaaaatgaaaattatgtgtttagcaaaggtggcaatagcttttagaaaataaagtagaaaataatgggtttgccaactgccacataaaaaaaaaacctctcttttaatatatacttaaatgtaataaacaataagataatgataatgtgattctttaactgtcgcttagtgtcgacgttagaaaaaaagaaacactaaaaatgttcggttcatgtcgttttctccaattcctttatctcgtgcttctcttctcaatacgaggaggaggatgtgttggcccatgcgttaaacagcagcacaaaaaccgatcaccaagaaacacacccgatttatttagcagcacacgaaattgaaataatatgtaaattaaaaaatatactcttaatttattcagttttaaatgtattttttggtttagggtttatagacggtttcttaaccgtcaaatctaatgtgtgtgtgacatattcttctctctctctctctcgaatctttcgtgttgtttgctgttcaaaattgaaattttaaatattaaaaaaaaagaagaaaacttgttctgcttcttgtcgtgtccgtcacagtttgaatttctctctctctttctctcttcctcataaaaatctctgctttaccttttcttttcaaagggtttcattttgattctagggttgttctaaatgcgacattttgactgatgggtctttgttgaatttgaagagagcaaaagagaaagagattgttcta

SEQ ID NO: 1068 - DNA, 3000 bp, Unknown
  misc_feature (1)..( 3000): cDNA_ID_3060440_gDNA_ID_1620354_Annot_ID_154415 3000 nt of promoter + ATG
cgtataatcaaaacattagcacacaaatcttcacctaaaacccaatttcttagatcaacaacatcagttcatcaaattctatgccctgagggtaaatagaatcccagagaaagcctcatgcaccaagattttgaccataacaccgcattcaattttgatgtgggacactatacatccatcaatttcacaagcatcgatgaaacaatttcacagtgaggttcagatacacaaaagaaatcgaatctaccacgaaaacaaaggagaaagatagaaatcgtttagtatataagcatcgacatatgtaaattagggttaggtacaagaaaacgagacgagccacgagacgagcgatttcaaaaccaacattgtcaaaaagatcttgttctataaatagagaagtaaaggaaaggagcgagaaggacgctcaccgactatgaaatcggagaagtcgccggagattagaatcgcaccaccgggtaaaaaggaacagttaacactgcgatgaagtagaggaaacaacgattctaacggaacgggaatcgtcatcttctagaattttgatgatctttatcatacctacgaatttagactgcttgccgttttgatggctagcaataaatgaatgtatgccgtttctttaagtagacacgcactgacgcacttcacactcacacgtggtccatttaggccgttatatgcagtacatgtttttttttttttttttcatttttggtttagtcacagtacatttatgttatacccattttgatatttgtttactttatttcaaaatacatagtttgcattattcattttgtttcacatcacataaatttaatgtatagaatttatttttaattagttgcattaaaaaataatgtggaagaaagccattgttttacagaatccattctaaattaagtcctcaaaaaaactcaatatgtaatcaggtttctaattcagaatatttcaaatagtatgtgtaaaacatgtaaaagatatttccactgttttgtattttaattttgtaagttttctttatttggtaattgattgttaatatatagtaaaatgattaattagatacttcatttgaataattcaacttttaaatagatgaatacaatattgaatatacaacatgagttcgatccaaacccaccatatattaacaatcaattacccaataaacagttgaatagaaaaaaagagaaaagaaaaagtaacatctaccatatatatcattaaatcagattaatttttctctcttcgcttgtaatacgatattatttattgacaggaaagtgaatgttgaattggaatgtggaagcaaatttctcgtatgtgttttgtcaacatgttcgaaaaacttatgtgcatatggtgactacagaaaggggaggacgtgtttctctgcacatggttaacggtgacgaagctcatgctttagctgaagtggtggctccaaagctttgagatgtaggtcgtgatcatatgaaaataaatcgtgaaaaatgtattattgtgatgtaagattcttaaattcattttttttttcttttttgtcatcagattttatttacacctcaaaagagtcaattctgaggaaaattgtttacataagtgatataaagcggttcaatacgaatttttcgtgtcaatttgtgcctttacatttgcagttcgagaaattaaagataaagaaaatcttatgaattcttccttatcggtcttgaattcctccaaataagttgaaaacgctggccattcggttggggaaaacaccatcttcaccaggtctgaacagtctgtaaaaaatgctacttcttggttgtcggcaccaatcatacacttcatcgcccagaagtaaagctgttacttctgttaaattcggtttaattatgtgttaatcggatttaatcggttttaatgatctatataattatatataggttgcggtaattatttctctttaaattcttttactagtttttggcctgaattcagattgcttaagatatacttatctaacattgttaatatgaaaactaatgaatgtactcattccttgttaggtaacactttcatatatttgtatcttttgttttcgtggtgtggtaggagaataagcaacaacatttttgctagacatattcaagatttcatagaatattgaacaaaaatggttaaaagatgtaagtctacttcattcattctcacttattttattttttccccagaaaataaaaaatacatcataaattatttaacgtatttaatgaatgcgatcagcaatatcaattaagctttgaactagcggtaatagaaaatatctctttaggttgaacccgacctatgcaaatttggtggaactggtgaaaacagtggaaacatcttaaaccatccgaaattaaaagaatatagtattacaataattaatgatgaactataatattaaagaattaaaaaaaaaggtaaacaaaaaaatgaaaataagaaaaaaataaacaaaacataagcaaaacgtaattaaaaaaatagcaaacaaatgaagaaaaataattataagttcaaattcaagatcttaaaaaaaaatagatgattaattaattttaaggaatttaaattttaaaattttagatttattattttaggtttagtttttagggtttaaggattatttttttagggtttactatttagttttgaaggtttaaagttcaatacagtattaaacttgtggtattttcagaaaaaaaaacacacaaattttttaaggtattattggaacaaaaactcattaaaatggtatttatgagaatggccctgtcattaatgataacaattgttttgaaatttaattaaatcgtattatttgatcaatcgtatttttgggacaaacgtggtttacctcttctctctccttctgaagtcgccatctgaaaactcttttctcccaccgacgccggcctcacgccgtgtggtcggaaatttcttttg

SEQ ID NO: 1069 - DNA, 2076 bp, Unknown
  misc_feature (1)..( 2076): cDNA_ID_2129994_gDNA_ID_1620355_Annot_ID_154448 3000 nt of promoter + ATG
gatctgcaagttttctctatatataacttactgttttgtcactgtttctagtggtttgttcatgtctatatcctcttgtcttgtgtgctattggtttatcaatgttgagctcatcactataaatccttaagctgctctttaatcttattggaacaaaactttccggtgaagctgcaagtactttctagtttaatcttatatgttgcttgctgttacatatgggatatgaattcattgatgactatcgatttgtgaaagtatactgtcttctttataatatacttgtttctgcaagatatgttgctatgctcatcatgttgtttgttgtatgtgtctatatggcttacatacttggttcattctctgtgtgcagttggtgatttgaaccatttgatatctgccactatgtctggtgtgacttgctgtctgaggttccctggtcaactcaactctgacctccgtaagcttgctgtgaatctcatcccattccctcgtcttcacttcttcatggttggttttgctcctctcacctcaagaggttcacagcagtaccgctccctcacagtccctgagctcacccagcaaatgtgggactccaagaacatgatgtgtgctgcagacccaaggcacggacgctacctcacagcctctgccatgttccgtggcaagatgagcacaaaggaagttgacgagcagatgctgaatgttcagaacaagaactcgtcctactttgtggagtggatccccaacaacgtgaaatcaacagtctgtgatatcccacctactggtctgaagatggcttccactttcattggaaactcaacatcgatccaagagatgttcaggcgagtgagtgagcagttcacagctatgttcaggaggaaggctttcttgcattggtacacaggtgagggaatggacgagatggagttcacagaagcagagagcaacatgaacgatcttgtgtcagagtaccagcaataccaagatgcaacggctgatgaagaaggtgactacgaggatgaggaagaaggtgaataccaacaggaagaagagtactgagagtaatttagttataaaaaccgcttgaaaaaatcaatttagtcgtttgctactttttttcttaaaaaaaaaaatgagaacctcaactaccagttgcaggtttatttctatgcttgtatttgacttatctggatgatgtttatgtactttgtttttaaatttggttcggtctttagtttgaatcttcgtttaagctattattgactgtattgttcctaatctcgttaaagactttgggcttatgattgactaacctttgggcttatgattgactaacctttgggctttggatttcttcatttatttttaagagctcggcccattttcgtggtgactaaattacactcttcgagataaaacagataagaaatttacttttgatgtaataaatattgttgctacgaagtattttacttttggaaataaatagggacgacattagtgttaatactcttgtaaattttgtcagattacacattattttacagatctctcagacaaagtaaatacaaaaacgacacagtttcgtaactttcactcgcgtctcaagtacaatctctaaattactcgctttctgtgaaagacacgtgtattttgtgacttaaataacagcgagtagattttagaaccatagtcgcgagtgtttttataggcacagatatatttgaattatgtctcctcgcaacgggtcgctctctctctctcctctgcaccagtctccaagggtacagattttgaaaaaccactcctttcacttagctcgaaaagaagagggaaaaacaaaataataaaaccaaaaaaatgataaattaaagaattctttttaggaaaaacaaaagtaaagatttttcatcatgagtcttcctcctcttactcatacggtcatacccaatcactactaacctctctccattctcgaattaggtcactctatttgggttgaaaaaatctcatattttcgtctttggaaccttaagaactttctcttttggaatcggtggaatcagtgaaatg

SEQ ID NO: 1070 - DNA, 3000 bp, Unknown
  misc_feature (1)..( 3000): cDNA_ID_3060490_gDNA_ID_1620355_Annot_ID_154458 3000 nt of promoter + ATG
gagaaccgcactactactcttgattatcagagaagacgaatcagataaacagtgtgagagagagagatgatgataagaaaggaatctggatttgaatggtacccaacagatttttgtcattttttaaagatttcgctgagcatttagtaacaaggacctttttattaaggtaacgacaacttgtaagtggtaaataatccagtcttactatgttcccattttctatttgatttctttagagtattaaacagcagaatctgtatcatcaattatatagtttgtcaaatataattattattagaaatatgcattacaagggattaatggttaaggatttctctcttacaaaataaaaaagaaaaagtttatggtattcgttcgtattatgaatttttgatatgaatatcttaaattgaatatgttttgactaacatgttgtatgctgtctttttcaaaaataaaacatgttacatgttttttttttcttcttctcttttttttttttttttataaagtacatgttatatgctgtaacaattataatccaaatgtcaaacttagtttagatctttgacaagtatataatatacttttctttttaaaaattatgtattgaatatttttcactatcattcttttttttttgtcaacatttttcactatcattcttatttctttgatatgttcctcaatgttcaatttgtaaatttaaatttcaaaagccatgtaactttaaccaacttgaattttttacgtatataattctctatatctctaattagagtcatgttaggttcgattgtttaaataaaattagtcttcttgtagactattagatcatccgttcaaaaagattattgttgtttgaatggtgctctcttttctttcttcggaaaggaataaaatttatcccataaaaagaaaagaaaaagaaaaaagataatttactttatttaagtgtgattaagctgttatgattgactatcacattacatagtgttttcgtggggatacagagatcaatagataaatgataatggtaagataatggtatgttggtattggtagatgagtcagtaaatcatttactactgctaatggatcatctgaggacaagtgttgtacgttaagtgacacatggcaaaacagtgaaagagacgttaaacaagtgttacttgctgcatccactcaaattccatcccaagtcatgcatgcaactttttctttaaacatcggaaatcggagcctgaattaatgcgttaactaatggaaacaaaaaccataattacggtgtagccatctctccaattccgattccatttcaagttaaccttatcgatatggaggatagcaactctcacccgcaaaatcaaacatcaaaaagaaaaagctctcacccgcaaaagaagcaacgtatggagaatgaaacacgatcggctaagttgttggatcttgatgttcttgactgtccggtttgcttcgagccgctcactattcctacctttcaggttatgttttgaacttgcatgcattttattttgtttcatgtgacattttgatttcgcttttgttaatttattttattgaatacggctttgattgtatctcgtttggtatattatgcgtttcagtgtgatgatggacatatagtttgcaatttttgctttgccaaagtgagtaacaagtgccctggtcctgggtgtgatttacccattggtaataagcgatgcttcgcaatggagagggttctcgaatcagcctttgttccatgtcaaaatactgagtttggctgcacaaaaagtgtctcttatgaaaaagtgtcaagtcacgaaaaggaatgcaactactctcaatgctcttgccctaacctcgaatgcaattacactggctcatataacatcatctacggtcactttatgcgtcgccatctttacaatagtacgatcgtttcctccaaatggggatattccactgttgatgttctaataaacatcaaagaaaaggtttcagttctctgggaatctcgtcagaaacttttgtttgtagttcagtgtttcaaggagcgacatggtgtttatgttactgttagacgcatcgcaccacctgcttcagaattcaagaagttctcgtatcgtctttcgtatagtatcgacggacataatgttacttacgaatcaccagaagtaaagaggcttcttgaagtgaattctcaaatccctgatgacagtttcatgtttgtccctaactgtttactgcatggtgaaatgttggagttgaagcttggcatcaagaagttgaaacaaacgtaactagatctagtttggtttggggttacgaggcgttctgttttgttgtgtttgttttaattctctgtttaagaacctttgtacttttgtagtagcccactcttgaatttattgatgttgttgttttgagttagttgtataatccaaaagctttctggtttggttcccggttcggttttgtacatagtaggatttttaataaagcctgctaatgaggttcagcaagttaccattgctcaggaaactgttatggaggatcctccaacgtctctgtttaagaattcagtaccaattcgagaggatcaaattcagaacgctatcacaaattccattcgctaatcttagaattgggcataaattctggaataatgggctcatttggtattagcgtccatacacattgtaggcccaataaaataatagaccaagaaaaaactaaaaaccggacaacgccgttatctcttcttcgtgtgaccaccacacatacatacataccactcaccgtaccaaaaagattagaccaacaaaaaaaaaaaaaaaaggaccagctcagatgagtctggagtttccaagtttaaaacctctctacctcgatttgagcaaatcctgatttactctcatcctcatcatctctcatcatcgagattcatagtctcttttgccgcttggattcttccaaggttagtgagctgct

SEQ ID NO: 1071 - DNA, 3000 bp, Unknown
  misc_feature (1)..( 3000): cDNA_ID_1010577_gDNA_ID_1620355_Annot_ID_154461 3000 nt of promoter + ATG
gatcgtgaggtcttcttctcttggcgtcctctcttcatggtgtcagttttctatttcattaaacttgaacgaagaaaaacacatatatatttttggtttttgacattttttgggggtttatgacatttgtttttttggatattttctatatattggcaatacaaaagagtttataagctaagcagcccagtttcatgtcccattaggttttagatctcaagtcttaaccgacctacatttaaagggaaaacattaagaaacaatgagagattaatttagtattttcgattgatgcgcctcacactgaaacctgaggcttgtgtgttctgtttctcttcatcttgattcaattcgtttgcagtttcgtagcttgatgagaaaggaatattaagtgattcatatatagcaaagtgtttacatagtaaacctaaaaagagagtaaaactaaaatctcttctctttattcatcaatacaagttgctattaacaaagtttttggttacagcacatattcacttgctttgtattattgtatatactatacaagatgctctacacaacatttactatgacatgaatatgagacaacaaactctttatacataatgaagatgtagtaatagtaaatgtaattatgtttgagaaagagaaagagagagagagagagagacagaggtattaatgtgagtgaagagccgggtgtttctcatgcatggggtacgagcggagtcaacggcttcatggctcaaatttgaaaccacgtgtcatgcgtttgttactctacccagattctgctgattcacagactcactattaaaatccactttttcttttttctctgttcataaagcagaaaccaaaaataatccaaatatcaaaaaaccaaaaacagaacctagaaaccacaccaaaaaaaaaaaagctatttcatcaaacaaacaaaactcacatcacaaatcagaaacaaacaaaaaagaaacgcagtactaaagaaaaaaattataaacaagaatcatcgaaaagaagaatcgaaatcatcaacatattttgtttctcttcttcttttatttttataaaatataaattagttctttgataaaatctgtagaagataaagaattcttctttagaaacaaagaaaaatgacggacccccacaccgcccggacgatcgtcggaatcgttggtaagtcctccacaatttactcaaacataaagtttaattcaatcaacaacaaaaacatttgctcatgtctttgtttgtctgttatatgtttaggaaacgtgatttctttcggcttgttctgcgctccaatgtaagcacacatgatgattaaatctttttttgttttgttgcatgcaatgacatatgtgaaaattgtgcagaccaacgatggtgaagatatggaagatgaaatcggtctccgagtttaagccagatccatacgtagctacggttttaaactgcatgatgtggacattttacggacttcctttcgtccagcccgacagtctcctcgtcatcaccattaatggaactggtcttttcatggaactcgtttacgtcaccatcttctttgtcttcgctacctcccctgtccgcgtaagcctttaaaacctctaatttcaacacgaatgataaaaatatgtatatgcattctaaattattcaatttatataaacttttcagacataggtttgatagcctttaaaccaattgaaaattagtgaattagtggttgatgtttgttttagtttgttacttcaaatgtagatcgatatagattttgatatgtgaagttatgatatatatatatgtgtacagagaaagatcacaatagctatggttatcgaggtaatattcatggcggtggtgatcttctgcacaatgtattttttgcatacaacaaagcagagatcaatgcttattgggatcttgtgcattgttttcaacgtcatcatgtatgctgctcctctcaccgtcatggtatgatgcctcttctttctaaactaatcacggaaatgcaaaaattggatactacactatcaacttttttcttttgttctctttatctcgtgaatttccatttaatgagtttagttataatgtggaacagaaacttgtgataaagacaaagagcgtgaaatacatgccgttcttcctatcattagccaacttcatgaacggtgtcgtttgggtcatttatgcatgtcttaaatttgacccttatattttggtaaaccctcatatatatctttattgtttggaactcaaatccctacatctcaaaaaggactaattatcttccatgcatgaaaacagattccaaatggtcttggatcgctatcaggaataatccagcttataatatacataacttactataaaacaactaactggaacgatgacgatgaagataaagaaaagcgctattcgaatgctggaatcgaacttggccaggcttgatagtttcagctatttcatcgtctacggtgcttcatcgataggttaagatagaatcagaagtgaggtgaagttcttattactattattttgtgtaagcctatgtagaaaaaaaatgaacaagtggaacccttaagttatgaagtttcttgtgtatgaagaaatgggttttcagtttttttttttggaaatgattgtaactttcgcaagttgaatctatgtacgttgttacaattttagttttaatcgaagtttattagattacttttataacattttcttttttggaaactgtaaggaaagaaacaaatttgtcctcttaagagcagagtaataaacagagtttctctcttgttttaggttttttttttggtcctgaccggttaagaatatttccgagaaagttaccggtttagctgattcgattttaaaaacgaacccataatctaaaccggaatgtgcgattcacaattgtggttttgtaaccttaaaacacggaggaccagagataccgtttgagatgacgattgaattatg

SEQ ID NO: 1072 - DNA, 3000 bp, Unknown
  misc_feature (1)..( 3000): cDNA_ID_3594244_gDNA_ID_1620355_Annot_ID_154467 3000 nt of promoter + ATG
ggaattatgtgggggaaaaagtaaagaatggcacatgaagagagttttgcgtaattcccaaaagtaaagccagaaagatttttctcccaccccatgtgcttactctccccagtccccactttttcttaattaaattcatatttcttccatttttatttttcggcttttaatttcttagcatacttttaaaaaaaaaatattgtcacactttttaggccgattttgactgagttacacaggtcaataatgctcccaattcggcggactatagttattttagtggacatttgtgttaactaattttgtggcaaaaagaaactcggaacaaattaaaccataactgatttagactaaattatataatgtaatggccattatgtattaactaaagacaaaagtaatactacgatctacgataatacaaaaaaaaaattcagaatatcgcgtcattatcaacttgacaccaacttgtgagtctcccaaactcaatgattatgtggtcattatcggtggtgtttttaaaaaatactatgaaaactcgctctcactaatatcaagtggcttacacacttgattgactaatcaatagtttatcactactactataatgtttcaggctagattttccatcacgtgccaaaaaattccttcaaacaatttagcaagctaaccatcaaatttaattacgaatttttttctttcatatccacgtggcggatattcaaacttaattatgtgtaacatatgaatgacgtaaataatctatgcacatctcgttttactgttgtgtgttgctttaaaggctatcatggataacgtgtgtatatgaccttcgagaaaattttgaagagatccattcaacaaaacatgcatgacattttgaatatatcccaattattaaagactcaataattttcagaagtatattttgggtataaacaggtaaccgtacgtgttgctacacttgctattgtccatctataatgtgaaaaatatcaatttaaacattactgtttttatgtagtttttagttcatgtagtatttgattatctggagaagaagaaaaaaagatgataaataaaaaaattgtcggcaatagaaaactgagtttaggtcaaaatagttatgtactatagttattaccgacgtaaacactgataaattgaaaacgatgcatcactggtttttgacaaaatgtcgaattagaacaaacatgactcagtgtattagaaagtcaaaatatacacatttcctcttgaatagtagtattagcttgataactttgtttatcttaatgaaatcgtattaaagaagtttagtgccgagattaaatctcgagtcctatcactctatcaggcactagaatatataatgtcccactaaattcgataacaaattatctttaaagttaaagtatctttataattgtttttatatatggatcacgggactacaagaaaaaaagtagacgtgacaattatcttttctgtgtttttttctcgttatctctagttttgtttgatgcgtatgtatataatttggacaatactataataaagtatgcttaataagattctccaatcgtttttatattattcttaatataaaatcaaaagagattgatgatttcaaatgatgcctacaaagaataacatccgtgtcgttaatagaattcacaaggaatttatatattctaatgtacattcgacttgaaatcaaaatcatatggacattaaacaaaaaaaaaaaaactagaaaaggattaaaaagagtaaagtaaaattttgatggttcgaaattagaccaaagcgtatgaaacatcatcttttgagtaccatatattttgcaacttcaactaattaagagtgtagtataagctgggagttttggaactcaaacatcataatccattccatcatctctaaacttgggaaaaaatcccacagctaccgtattatatttgggaaatcgtataaaccaaaataagaaagttgttaattttttttaactataattaacccgacacttagaaatgtgtatcaaaaaagtaatgcaagaattatcattgacaagtttcaacaacagaattattgaaagatttactttatttgaacaaatctcactattaactttgtttttgtcaagcctctagagataggttaaaactttaacaaactttacttaacaagaaaagactatgacttttcaaaatgcaataaaaatactttaaagaagaaaagattcctctcgtctcttcctttgttcacatcactttcatctttattttctttattaattaatcatttattactcctctttcaaaaacaaacattttttatttataaaaaattcatacggcgctaatttcaccaccgctcttcctaattgattcttcaaaatccatgattactattgacccccaaacaaaaataatataaatctgatactatttggttagctttaagcatataattctcatctataactccaatcaccaaatcaagaaccgcctttagttaataaattgttcattaattttgctaacaacaatatttgtccacattacacgttccattcataaaaaaattgactccaatattaattgtatttttttacacctcgagttttgcagaaaaataaataaaagctcacatttttattttctccctctctctctctctgtgtctgtgtatgtgtggctttaccttttgtacctaaacctctcacactctctctctctggcttgctgtttactctcatcgtctcctttacttcattcgtcttcttcctctctttcccacaagctcccattgatgtgagtttcttatcacttttctttttccgatttgtcaattccttttttgcactgatttgtgcttcgcttacacattgctagtagattccccgatctgggttttttcttattcgtgttcatcatactaaagtttggtgcttttttgtgtttgtgtagatagagagagagatttaaggaaggaatc

SEQ ID NO: 1073 - DNA, 3000 bp, Unknown
  misc_feature (1)..( 3000): cDNA_ID_3409111_gDNA_ID_1620355_Annot_ID_154471 3000 nt of promoter + ATG
cctgtccttgtggatttcggctctgtctgttctgccacaagaccatttgcgatggagatgggcgttgtccaggctgcaggaaaccctatgaacggaatatggtcaaggctgagactagtattcaaggtggtggtctaacaattcggttggctcgttcgtctagcatgttttgcaagttttaaaaggagaggtgcggttttctcaaccatgttgtcttttggaactcgagaacttaagctctgttttctatgtcatctatggttctaagtctgaaacactgtggtgatgatgtagaatgtgatgtgtgaatacataaaaggtggtacagaaaatgattcaaatacatttagatagtttcaataatgaatgctatgttctcttttctaattccatatgtttggtctgcatttattccttgtcaaacattattgaaggtttaagagttattttgttgctatggtgaatcctcttgacaagttactcatgaaccaaagcttgttttttagaatcaccattcaccagagatcaactctcattacttcaaattcttttaggaaacttctgattgtttatgattagctaacaaaatcatttattcacataaagtgaggcttcttaacaacttctattaagccagcttacaaatctcttgtaaggaaaaaagctatgacccctctaatgaatataatatataatatagcttttgctcatctctataccatttacattactactatatgaataaacccactgaattcaatcagcgaaaaaggccataggggttggaaaattgtataggtcattaagctggcgagaatcatcagtgtaggctcaagtgcattgagtcttgaagcttctgtatatgaaaaggctttttctaagatccagtcacggaatttgcatcggagagctcagatctttgcgcgtttgagctgcgagtgaacagggtagacattctctgtttctagctctctcttctgaatactctttgtgaaagacaaatcttcaaccttcattagagaatctcttaatctttttacatccgagagttttaccggcttcagtaagaaatcttcagccccttcttcaagacatctgaatgacaaaataataatcacaagaaaatcagtttgagtaaactccaatttcaataaagttgatgatagctttggatcaataagttttttttttgttgtatatgtagcaaacaatcataaaatggccagttcgtaattgagttggccattgtgtgtaacacaaatacatattcctttttattttatttggtctagaggtttcctaatattgtatgcaaagtgaaaaagcatgtgaggtggctttcacaataccctaccaaatattaggcaagcaagatcatgtacttattttattgtaatatcacatcaccagaaatagaatcaaatcccaaagtaaagattttgctggttagaaacatctttatacacaaaatcatcttgggacccattaaagatcaccaaatctcaacatttgtttaattatgcaatatccaccaccaaaaatggtttaaggaaattaacttttaaccatatgagcaggaactttactttgtgatctaatccctttttgttttatctaattctttttttgatcatctaagacaaagatattcaccaaatttactatagtttgacttaagattatgatgaagttttatacctatcaatacgaggcaaaatgttctcggaggacataattaccaccggtacttctctaaaagctgaggattcctgtggaaaatcacgtaaaaaaggattagataaacataaaactcaaattccattgactaattatatcattatatgtttgtttgcttactttgatcttcttcaagagttcatatccagtcataccgggcattgagtaatcagtcataattaaattaaccttcaaatcctgaagcacaaatcacgatttaacatattgcttgagagctacggcaaaattttgttttctcttggaaattgttttatacctcaaaaccgactgatttttcctcaacatccaaaccaaggtattggagagctcttgttgcactatcaacaacagtaactgaacaaccaaaacagagctttttactcagataacttgcccgaattcagagactgatttttcaaaatatgagtaataattacctttgcaagaagatactctgagcaaacgctcgatgaatttacgatcaacgtgactgtcgtcgacggcaagaacatgaagaggatccggtgatccaaactttgaagaatggttgagaatctccatcttcctcggtagcataacttcagccattgatcaacgaatgttggaggatttggaagaaaaaggaagagaaagatatgatgtgaaaccatggtggcagtggttgggccatttatataagtagaaagaaagaaagaaagaaataaaagagggaaaaaatatgaatgaaatcgagagattttgcatatctttaagattttgtcaatttgctttcaaaatctttattttatattttatataaataatagttcggtggatttttattattaaataagttaaaacaaaaaaccgaaataaagtcaaaccaatcggttcaagtttagtcaaaacgaagaacaaaccagaaaatttggaatgggatgcaagatttaaccgacccaaaccgatattcaataacttgtagaattctttttttatttttaaattatttgtgtgtgtttgtagttttttttggtaaaagtgtgtttgtagttgaattgtggaagttcacgcatttaacttctacacttcaatacttcatctacgtagaagttcactttgaggttttgacttaagctcaagacagaaaaatgtgaaatcaagaaatcataaactaatactaaaacattacacgcatccttaatctacaattagtaaaacctctttagattaccaccttttcattcaccaaaaatataacaaattaatactaaaggcccggcccat

SEQ ID NO: 1074 - DNA, 3000 bp, Unknown
  misc_feature (1)..( 3000): cDNA_ID_3060454_gDNA_ID_1620355_Annot_ID_154469 3000 nt of promoter + ATG
tattattcttacttcatttttggttgtcattttccttattttaatttccacaaaaagctcatcattgcttaagaaaaatatgatttataaagttgctttttatttagttgacaaaaaaaaaatttgtttgtttattattctgcaactattgatctttacgtattgaattgaaaatttgaatgtttaaattatataactacaaatgtgtttttgatcatttttatattataaattataaacagctgctacattctataatttgttagttgtagtatttacttaaaacaatacaactatactaggagaaaaatgaacacagaacataaagtaggaaattggatgaaagtattatctaaattgtggtccaatagtttgtggatactttaactttagatgtatgaagactatagacttttcctagagatttatatataggtggtgtatatatacactgatttacacatattaagttatgtgtatatctaaaaaagatagtgactaatttctgaagtagagatttactatgaatttcttcagaggttgaacctaagctaaatgatatagcatgaacaagaatttaaatgttaataaatagattcgtagtatcaaaggcttaaagatttaactattatttttgcttggaatctacttttcgtgaaagattccagccaagcaaacacttggggctctgtacggacactctaaaacataataatcatttaagcaattacgatcattattctatctcttctttcttgtttgtttgttaaatgttaaaccatttatcgaataatggagatacatatataaataaaacctcttccacaccactttttttttttccatagaaacgaaaaatagttgatgatgacaaaatgaaataataacatgaaaacttatacttatagttattgtatagaaataaaatgatgagtatatataatgagtagagaaactattaaatcagtatagacccctcacctacgctttactctttcactcctctctctcctgctttgctccgccgtgagaggagaaacaaatggggaattgtcaagcggcggaggcggcaacgacggtgatacaacaaccagacggtaaatcggttagattttactgtacagtaaacgcgagcgaagtgattaagtcccatcccggtcaccacgtggctctcctcctctcttccgccgtacctcacggtggctctctccgcgtcactcgtataaagcttcttcgtccttctgataacctcttgctcggtcatgtttatagactcatctcctccgaaggtatataatatattaatcacaattcacacagaacatgtttcagttttaaattcaggaaagaacagaaccctaacttatagggttttcttcaatttgtttcttctgcttcacgtttgattacaatcatcatatacgaagtgtataaaatttacaaatcagaactaaaagctttaattttcaggattcttatcaatttatttgttctgcttcactttttgatgttaagtcagtctttcttttttgtgttctattaatagaggtgatgaaaggaataagagccaagaaatctggaaagatgaagaagattcatggagagttttctgttgcagaagaagagattaacccactaaccctaagatctgaatctgcttctgacaaagacactcaggtattattatcacatactacaattgctctgtatcagatgtttcagttttagttctctgattgaaacgatagagtgttacaaaagaataatagagttggttttgatttacagagaaggatacatgaaaagcagagaggaatgatgaacacaggaggagctaccaataaagttagagcttggcagccttctcttcaaagcatctcagaatctacaagctaaaacacttcaatccatatttttctatctttttttcttacttttgactcttttttttatcatttcatttctctttgtattgttgtttttcccaatcaaatttgtaaaggaagaagacccatttgattgtggttgaagaagaagaaacttttgtcattttttaactttaataataataactgaagaaagaaagatccaaaggattattttcattttctagatttctagattttcttttacgttttcaataaatagttatgtcatagatcaagttttacaactttttttacgtacttaaaagattgataaaattgtacttgttgttgttgaccattgaaacatttccctttattcactaaaactagcttttgcaacctttttattcaactgtattggtttgttgtatgtttttattattcaactctatttaattattcatgtagcttaacatatcaataataactaacatgccataaattccgaagaagaaaaattgttataaaagaactatatgcacctaacaaaaaaccaacaaaaccatagtattttctttttgggttacataaaaatatctttgtatgaagaagaagaaagaatcattacacagctttcactcacaagattacaagtttgcaaattgcatataaggaaactcccaaaaaatatcatcaaagatcttttcagaacacaaaaaaaaaaaggtaaaagtatatctcttttgccatagttagactcaaaaatacgacatcgtttacctcacacgtgcacactcaccgacttacagaagaacccacacgtacgttgagggtactttagtcatttagcatcgaacgaaattgtctgagcggagaagaggagtttccgttatccctttatatattatctctctcacctttcttctctttttctttgatttttattaaatcaacaaaaatagaaaaaaaaacataaaaataaaaataaaaaatcttcacgtttcttctctctctctctctctctctctcgagccaccaaatctgaattagggtttttgagaatattcatcttttgatttcaaattcttcacccactgtgtaatttcactcgtcaggattcatctgcggaatc

SEQ ID NO: 1075 - DNA, 3000 bp, Unknown
  misc_feature (1)..( 3000): cDNA_ID_2130043_gDNA_ID_1620355_Annot_ID_154462 3000 nt of promoter + ATG
gacgtcggcgaaatcgccggagctttacctgagtaaaccgggacagaagcgaatcgggtcgagaagcttcgtaatccacctagtccgacgtattcatcctcctcgtcgtcgtcatcgaagttcaaagagtaactcaaaggatcgtattgaaacttctcgcttgcgtcccaatcgcggccgcgtcgtggatcgcgattgaatcgacgaatgaaagtcttccaccgtggaccagcaacgatttctgaccactctcggatcttcaaggatgctcggatccaccaacgtggctcgtcgccgtggtcgccgctgtgattactgtcatcgacggttcgaattcgtccccaggaggagtaaccaacggcggtggagcttcttgatcggcggaagctggggaaacaacagcaacgttgatcgtaccgggtatcaggatctcgggttgggtccgactgcgaaagttccatgggccgaaactcagagaagttttttcttgggtcaaaagactcgtgatgataatataacttgattcaagttttagctgtaaaggattatgattggtcctatttattatatgcacacttgacacttgtaatataaattaagaaattgttattttttctatgttattatatgcacacttgacacttttacgaatcatggctgtaaatattaaaaccttagaaactcaattatcgatcaacacgattgagaatcataaaaagtgttaaacaatttcttaggctggtgaaaacgagtcttagaaaaaataaatatcttgagctagaatccgttataagatagttactttcctaacaatgtttttaggaatacacttgataaaacaaaattgatatttattataaaaactactattcactaagggaacgagttgaacaaatgtgatccggcgggtacaacaaactaacatttcggatcatagtacgaggggtacaaagattgagcagatgtcactgtctttggcattatcacaatctcaccattaggactgacaccagcgatgcaatacctaatttctcaaatatcatcatcttagaccattcttgttgctcaatatgatcttccataatccacatctctgcactagctttggtgtaacgtatgcatcctaattttccttggtagtttaccaaagtcaattcatcgaaactcacttcactgagctgctgattcatctgcagagttatgggcatctgaatacgatcaaagctttcgtgtctaacgtcgaacctcactagctcatagaattcgggatcatcccagctttctacatgtgctatgtaatagataaactctttgatacataaaccactactcctagcttctggagagtgattccaaatgccttggatgtcaaggctcctccattgctgcttcattggacctcccactaatgtgaaaacttgtttctcaactggatcatatccgaacaatccatcacacgagttgctccatctatcgtgttttacctccggtaataaaatcgttttcctattggtatgtttatagatcgagcttgaccaacaacagaagagtcctcgaaaattattgatacttaaaatcccaacttcgcccatggtttaatgtataattactgtctttgtctgggtatatgaatgatatatcattagtaggataagtagagggcgagaataatgaccgagtcatgatcaagagggtgatacgagatgaccacagcttcgatacacattggaacctcacaagtgacttaacagggagtctcgagagtatatcggttattacatcgaaagggatatgtataccgtttgaattttctctctcggagatttcgttctgacgttgttgtcgtcgttttggagatcgtgaggtcttcttctcttggcgtcctctcttcatggtgtcagttttctatttcattaaacttgaacgaagaaaaacacatatatatttttggtttttgacattttttgggggtttatgacatttgtttttttggatattttctatatattggcaatacaaaagagtttataagctaagcagcccagtttcatgtcccattaggttttagatctcaagtcttaaccgacctacatttaaagggaaaacattaagaaacaatgagagattaatttagtattttcgattgatgcgcctcacactgaaacctgaggcttgtgtgttctgtttctcttcatcttgattcaattcgtttgcagtttcgtagcttgatgagaaaggaatattaagtgattcatatatagcaaagtgtttacatagtaaacctaaaaagagagtaaaactaaaatctcttctctttattcatcaatacaagttgctattaacaaagtttttggttacagcacatattcacttgctttgtattattgtatatactatacaagatgctctacacaacatttactatgacatgaatatgagacaacaaactctttatacataatgaagatgtagtaatagtaaatgtaattatgtttgagaaagagaaagagagagagagagagagacagaggtattaatgtgagtgaagagccgggtgtttctcatgcatggggtacgagcggagtcaacggcttcatggctcaaatttgaaaccacgtgtcatgcgtttgttactctacccagattctgctgattcacagactcactattaaaatccactttttcttttttctctgttcataaagcagaaaccaaaaataatccaaatatcaaaaaaccaaaaacagaacctagaaaccacaccaaaaaaaaaaaagctatttcatcaaacaaacaaaactcacatcacaaatcagaaacaaacaaaaaagaaacgcagtactaaagaaaaaaattataaacaagaatcatcgaaaagaagaatcgaaatcatcaacatattttgtttctcttcttcttttatttttataaaatataaattagttctttgataaaatctgtagaagataaagaattcttctttagaaacaaagaaaaatg

SEQ ID NO: 1076 - DNA, 3000 bp, Unknown
  misc_feature (1)..( 3000): cDNA_ID_2130032_gDNA_ID_1620355_Annot_ID_154459 3000 nt of promoter + ATG
aaggatttcatgaaattcatgaaaggttacaaatcttatgttattcactcattaattttaaaaattctaatgaaatctactgttattgtattaatgattttaaaaatctatattaaaatctactgttattgaaaacagtttgtggatttaatttagtacccctaaataagtaaaaaagaaaatgatatgaaactagaaatcaacttatattgatatcagttaaggaattaaaaaagaaagttgaatactgtatgatttaaaaaagtatatctacttctaatagaaatacaaatatcaaatcttagagtcttaagttgatcagatttttagaagataaatataacagtttggaaaatataataaaaataagataagtaaaatttaggtggtaacaaaaacagggaatctcgggatatatattaattaccaaaattaaagatcatatgttaaatacttgccttacaaatttgtctcatatgtataaagaatctacttatttaatagctttaacttatttgttcatcatataagagcttaaatttgttacagtactaaatctagtttaaaccctaactgatgacgagagaaacaaggatgatctccgatctgccagaggatttgatagaagagatactatatagggttccggtagcatctctgagaagcttacgagctacttgcaaacggtggtaccatcaagctttattcaaagatccgagattcatcaaaaaatacaatgataattaaaacagcaagacagtatcatgctctcatgctggttgatcatagagtatgtccaatgagcacctttctcgctagacttgagaaaaacatatacatatctaaagatgggcatggcctaatatctccccattctaatcaaccagtcgatttatctgaagcctttcactgcgatggcatattgctatgcccttttaagaagaacatgatgattgtggtttggaacccgttttctgggcaaacaagatggatacagctgcaaaataaagacaacatcggagcctttgctctcggatacgacaagaatgaattgtgtcgtagctacaaatcttgaggtttgtgtgtatacacgagaagttggctccggaaaggatggaaatgtatgagtttacctctaattcatggaggaatcttgatgtgatcattcccgatcaggcctacttaaaatgtgatggtcatgcgtgtgcgtctttaagtggaaatacttattgggtgtcatggattgaaaaaggagacaacgacgactactcactactcagttttgatttttcaacagaaaggtttcaacgtttgtgtgctcactttcatcatcaaccatgccgtgttgatactattgctctctcggttgttagagaagaacatctttccttgttttatcagagtaggcagacactaaaggtggaaatatgggtgaccgttgagattgagaccacatttgtctcgtggagcaagttcttaacattagatttagtttctccttgtttatcgagatcaatgagcttctatattcttgatgaggagaagaaaattgttgtgtgttgtgatgaaagcgaaaatttctactactccaaattggtatggattgctagagaaggacaagaatatagaccatctcccgataagtcagttttctgtggcatacaagcagcgcattttcaatgttaccgttgtataccaaggttgtttggttatgttccaaaagattagcattgtggtttcttttgcttgctttgtcatgtccttggatgaaatgatatctgtttttttttgttttttggtgtctttagtattggtggcttttatactttcttagacttttccttcaagtcttggtaaataataattatatgctctactcatttcaaacaaaggccccgattgtttctttgcatttgcctaaatcgaaaagtaatttatataagaagtaaaaagaaagtgttgtgacgatggattaatttgaagaaaaaaaaatatggtaagacataaagaaaagaaaataggagtgggtgggttgctttgtgctttaaagttttaaacaaagaagaaaaggcaaaaaaatgcttttgatatatttaaaatattttaattcgtctccaaaaaaaaacagtttcttaatctaaagatagaagacatttgattcaaaagggaatgcccaaaaaactacaagattgaaaacaaatataattgatagagatcaatgatgctttactttagcttcgtctaggtttatatattattcccgtattctttatttgtttttcttatactacctttaacttttgtgctaatttattttcgagaattggctaatgttttcggtttgtaaaatatgcaaaaaaaaaaaaaaaaatggaatcattaaaagagttgaaaatagatttcagaatcattaaaaaaaagtaatctacttcaaaatttctaaacaaaaatatttttgtgactaaagaaaatatacggaatcgcataattgtttctcctatgtgtatatttagtaagttgatatacttctttagtaatatggaatctttgtagatggtaagaagatcaaataaaatcaaacaaacacatgcacaaaaaattcataaacaccttatgattgcgtcataaattaacgcgatgcaaaatcgttagttgattacatcttggtgcacaagaacatgcgtcacactgaatcatctgattgcgttataaactaacgtgttgcaacatcattggtttaaagacatataggtgcaggtacacatagacatgcgtcacactagatcattttggggttttaattctccacgaagaaatgttaaagtggggtctcttctattgccgggaaaacaaaagagagaagaagaaattaaagtttctttttctccttcactttctcacacacactgagaccataacaaacacacacacaaaaaagctcggcaaaaaaaaatcaaattccgggaagaagacgccggagaaaatcgaatcaaatagatg

SEQ ID NO: 1077 - DNA, 3000 bp, Unknown
  misc_feature (1)..( 3000): cDNA_ID_2130020_gDNA_ID_1620355_Annot_ID_154456 3000 nt of promoter + ATG
aagagactatgaatctcgatgatgagagatgatgaggatgagagtaaatcaggatttgctcaaatcgaggtagagaggttttaaacttggaaactccagactcatctgagctggtccttttttttttttttttgttggtctaatctttttggtacggtgagtggtatgtatgtatgtgtggtggtcacacgaagaagagataacggcgttgtccggtttttagttttttcttggtctattattttattgggcctacaatgtgtatggacgctaataccaaatgagcccattattccagaatttatgcccaattctaagattagcgaatggaatttgtgatagcgttctgaatttgatcctctcgaattggtactgaattcttaaacagagacgttggaggatcctccataacagtttcctgagcaatggtaacttgctgaacctcattagcaggctttattaaaaatcctactatgtacaaaaccgaaccgggaaccaaaccagaaagcttttggattatacaactaactcaaaacaacaacatcaataaattcaagagtgggctactacaaaagtacaaaggttcttaaacagagaattaaaacaaacacaacaaaacagaacgcctcgtaaccccaaaccaaactagatctagttacgtttgtttcaacttcttgatgccaagcttcaactccaacatttcaccatgcagtaaacagttagggacaaacatgaaactgtcatcagggatttgagaattcacttcaagaagcctctttacttctggtgattcgtaagtaacattatgtccgtcgatactatacgaaagacgatacgagaacttcttgaattctgaagcaggtggtgcgatgcgtctaacagtaacataaacaccatgtcgctccttgaaacactgaactacaaacaaaagtttctgacgagattcccagagaactgaaaccttttctttgatgtttattagaacatcaacagtggaatatccccatttggaggaaacgatcgtactattgtaaagatggcgacgcataaagtgaccgtagatgatgttatatgagccagtgtaattgcattcgaggttagggcaagagcattgagagtagttgcattccttttcgtgacttgacactttttcataagagacactttttgtgcagccaaactcagtattttgacatggaacaaaggctgattcgagaaccctctccattgcgaagcatcgcttattaccaatgggtaaatcacacccaggaccagggcacttgttactcactttggcaaagcaaaaattgcaaactatatgtccatcatcacactgaaacgcataatataccaaacgagatacaatcaaagccgtattcaataaaataaattaacaaaagcgaaatcaaaatgtcacatgaaacaaaataaaatgcatgcaagttcaaaacataacctgaaaggtaggaatagtgagcggctcgaagcaaaccggacagtcaagaacatcaagatccaacaacttagccgatcgtgtttcattctccatacgttgcttcttttgcgggtgagagctttttctttttgatgtttgattttgcgggtgagagttgctatcctccatatcgataaggttaacttgaaatggaatcggaattggagagatggctacaccgtaattatggtttttgtttccattagttaacgcattaattcaggctccgatttccgatgtttaaagaaaaagttgcatgcatgacttgggatggaatttgagtggatgcagcaagtaacacttgtttaacgtctctttcactgttttgccatgtgtcacttaacgtacaacacttgtcctcagatgatccattagcagtagtaaatgatttactgactcatctaccaataccaacataccattatcttaccattatcatttatctattgatctctgtatccccacgaaaacactatgtaatgtgatagtcaatcataacagcttaatcacacttaaataaagtaaattatcttttttctttttcttttctttttatgggataaattttattcctttccgaagaaagaaaagagagcaccattcaaacaacaataatctttttgaacggatgatctaatagtctacaagaagactaattttatttaaacaatcgaacctaacatgactctaattagagatatagagaattatatacgtaaaaaattcaagttggttaaagttacatggcttttgaaatttaaatttacaaattgaacattgaggaacatatcaaagaaataagaatgatagtgaaaaatgttgacaaaaaaaaaagaatgatagtgaaaaatattcaatacataatttttaaaaagaaaagtatattatatacttgtcaaagatctaaactaagtttgacatttggattataattgttacagcatataacatgtactttataaaaaaaaaaaaaaaagagaagaagaaaaaaaaaacatgtaacatgttttatttttgaaaaagacagcatacaacatgttagtcaaaacatattcaatttaagatattcatatcaaaaattcataatacgaacgaataccataaactttttcttttttattttgtaagagagaaatccttaaccattaatcccttgtaatgcatatttctaataataattatatttgacaaactatataattgatgatacagattctgctgtttaatactctaaagaaatcaaatagaaaatgggaacatagtaagactggattatttaccacttacaagttgtcgttaccttaataaaaaggtccttgttactaaatgctcagcgaaatctttaaaaaatgacaaaaatctgttgggtaccattcaaatccagattcctttcttatcatcatctctctctctcacactgtttatctgattcgtcttctctgataatcaagagtagtagtgcggttctctggaaaatattcgatttttaaaagactctgatgatg

SEQ ID NO: 1078 - DNA, 3000 bp, Unknown
  misc_feature (1)..( 3000): cDNA_ID_3060498_gDNA_ID_1620355_Annot_ID_154449 3000 nt of promoter + ATG
agtaaagaagtacacagaagtcaagaaacaaaaggatccatccgaaacaagtataacatttgcataaaagagaaaaactagttttcttttcttcctgcttatcatttttctaaattccgtttcttcatttgtctttaaaaaaaggtaaaaagctgattactttccatggtgatcttccatactcttcaactgagctgattgagaagctagagtctcttgacgaggaagacattgtgggttcgggaggatttggcacggtttatcgaatggttatgaacgatcttggaacctttgcggttaaaaagatagataggagtcgacaaggatcagaccgagtttttgagcgagaagtagagattttaggtagtgtcaaacacatcaatctagtgaacctacgtggatactgccgtttaccatcttcaagacttctcatctatgattatctaaccttaggaagcttagacgatcttcttcacggtaaatacagttatacatagtttatcttcattttggtctgtgatgcgtcatattaatctattttttggtttctttatctatcaagaacgagctcaagaagacggtttgttgaactggaatgctcggttgaaaattgcgctaggttccgcgaggggtcttgcttatctacaccatgattgtagtcccaaaattgttcaccgtgacataaaatcgagcaatattctactcaatgataaactagaacctcgagtctcggactttggtcttgcaaagcttcttgttgacgaagatgctcatgttaccaccgtggtagctggcacctttggctatcttgctccaggttctcttctttgctaacttcttttttgaatcttggacaataatttttaaagtttctaactctttgatgaatcttggaaacagagtatctgcaaaatgggagagcgacggagaagtctgatgtgtacagctttggagttcttctccttgagctcgttaccggaaaaagaccaacagacccgatattcgttaaaagaggcttgaacgtcgtcggatgggtaagaagacacctcaaatcttgtctccgagaagaaacgttctgtttttacttcctaagatttgggttctaataaagtgttatttctctcagatgaacactgtgttgaaagagaatcgattagaggatgtaatagacaagagatgcaccgatgtcgacgaagagtctgttgaggcattgctcgagatagctgagagatgtacagatgctaacccggagaacaggccggctatgaaccaggtggctcagttgcttgagcaagaagtcatgtcaccttcttctggtatcgattactacgatgattctcattctgattactgttagggacttatgcacggctaaaagtaaccaggagatcattagcctgcgacggttttgttgttgttgctgctgcgttatgaatgttgtgatttaggagcgagggatttgtttgtatattagatatgaaggtggagtcaagattattgagcgtgcactgttcttgtgcactttatatttttgcaacaaaatgatcgatgttattgcgtatgcattgtactatgactctttcaaagggaagacacacatacgaattatcgatgttaatgtcgttaggcttctttcttacgttttgtagcgtacattgcttagctctactaaagctggtcctatgttttacaaacctgaaagtagaagactctcaatgcacaaacgttgctacaaaactttcatctttctgaataattagctatttttatttatgaaagtgttatttctctataaatcttataatttggaaactgatattaaaaaaaaaacatcttctttttatagttacaaacaagtttttttttttttttttttctgtcaaagacttgagagttgataaaaaaaagagttgataatttcttgatttttcttctggaacattttaatattatcttctgaataatcaaatgacctttcgtttaatggaagagacttcgaccatcatcaaaaccccatccacctcttaaaaggccaacgcttttctgccctatgtgctttgctagtttcctacacgtacgtatatatctataaaatcatttttcatatatatatggtttaatgcatccatagtttatacatattttatatttaaaccctaccctatacgatacactatatacatatatcgtatagtagtaattgattatataaaattttacatagatgtacaagagcattgatatcgatagaagttagaaccttttgaagatattcgtaactcttgaaaaattcgattcttagtgacatagtgagcaataactacagattatggagattaatttgaattttagtctattttccctcttataaaagaacaattaccaaggaaatcctaattctgaattaatcatttacaaagttgtagtatatatataaaaaaaaagttgtagtatatagtattaacaaactaacacaatttttttcaactttgatagtaacctttttcaaaccaatatatattagtgttttaaagtacgccattatcttgtataatatgcatggtgtattgatagtattttatatgtatgtaaaatgaaaactaaaaggcgactactagcataaaaaataaatgatgaaatttaacaaattttgtaattttaaaggcaatatactattgtaccgtgaaaaaatatataggtaaaattttcaaaatatttgtgttgaccaaataaatggcaagatcataatattttgcataattttctatattttaaagccgattttcattgctaaaatatattgtataagtatatgctaatacacatatttgcgtgtgtgtatataaataaaaacatgcatacatgtatcatttgtctgtctcctattggctaagaaaacagagagaatcggtatttttagcctttgctaagatattttgatcaaaaatcccacttttgagcggtcttatctttattctccacctcaaaggaccatttctc

SEQ ID NO: 1079 - DNA, 3000 bp, Unknown
  misc_feature (1)..( 3000): cDNA_ID_2130009_gDNA_ID_1620355_Annot_ID_154453 3000 nt of promoter + ATG
ataaaatatattggtttgatatatatcgataaaccattacagaatagttgaaagatataaaacagttccttaaaaatattggaccattttgttctagtcgtattttagtttgatgttttatcgattggtcacaataaaaacggcaagaattactaatgagtaatcactaatgaaatgatcacacccattctaagacatagatctctagttttctaaaccagttcatttaaatttgttgcggattccactgaacatattttaaatataacaagacaccaaatctgaagtttagtttgaagatcaatgaatcgacgactacaattaaactaatataatctgattgaatacactttatattatgatgactcgagtctctcaatcagtagtgtgaacacatatcgctttatggaaaattcgagcaagtagatctcaaggcaaaccaaacattcctacaatatccacctaaaacttataaacccaaattaacaaatccatctatatatataaaaaggtatacaagactccacacgttaatgtataacacgttaaaagaccacaacactttcttgtgtctaaaacaaagaaacatacaacccttatccaaatttagaatttattatacacacacacacacatctaagtaacctaaaataaactttaataagtagacacataattgatatatcgtgtgtacacttgaatttgccaaatcatattgttaggtgaaacaattcaacattatgatgaggaagaataaaatttgaacaagtttattacaataaaccgaataaaaccagtaatctcctccattccaataatcaaataaccaaaacttatacattatctattttataaaccgagacattaaaaatattcgaaaataaattatttactttctcgccaacactcaagattttctcggaaactaaataaaagtaaaaaaggaaaagaaaaaaagtaggaaaaagaaagaaaccgaagcccacccaaagtccgcgtcttctgagagccacgtcaccatcaaaaaggacgtaaatgacgacttagcccattcacatttttcaatattccaatcatatcctttctatacggcacatacgtctgtcgttttgtctcttccctttcccttccttcttcctctccgtccacctttgacggcggttcctcttcttctctttgatcggagaccgtctcgtcgttcttcttaaccggcgccggaaagacgagcttatcgtttccttcactactgcttctaacgtacagaagattccggagcttccaacgtttcgaaaacccagctgaatggcttttgattttgctgtgtgacggagaagacgaaagtctttgaagatcatcatctccggaattcgattgtttaggtttccatacacagtacgtctccggaggaacaccagtaagatcctcttcagcttccgacgaagaattcgaagccggatctcgatcctcgctcatcagtttcctcaacgccggtctacgacgacgaggaggaagagtagtaatcttactcgtcggttgagattccaccggagcatttccaccgtacggattcaacggacggatctgaccgttacagaaaatctcgtcggcggtagcgagaggctgagaacacgtgttgcttggacagtcgaaagcgaagtcggaatcattatcgtcgtcgcggtggggagaagaatcggattgtgtttggtcgtgatctctgaattcttcgacgactcgagcggcgattgcagcgaggtcaacggcggaggagaagctgccaaaactcggagagttagaggagaaggagagtaaccgactcgtctgcatttgagagaaagttgtttcttcttgctctgttttctgaaactgaaacgtttttgagagagaagattgtacgcttcgaaatttgggtcccggggaatatttatatgggaaatataaagtctttgtattttcttcattgacggagaagaaacaaattgaaatgattacattagtggggcattaattgttatttattcaggagccaaaatctaacttaattatcatgattctaacaaggagcgtaatgaacataaaccactaacgacgtcaaatgaaattaaataaaccaccaacgtttaaacttaaccacttgttgagaataataaaagaagataagtctctccactttttcaaataaatcggtatcggtcttggtatttttatttataaagagagtataccatgaaaaattgtttaattatcttctttgatgtcacgtttaatcagacaatcacatcacgacgtaataaaacttatccatttggttattttcttctgtatattgaatattcaaacgttaatgatgtcacaaaaatgacgtacgtaataggttacgaaaatgtggtaaggattaaacaaaagaattctccgttaattccatgtactgatgttcatttaccgtgttaatattgttgttgtgtcagctcaaattttaacatgttaatcagtgttaacacgcataaaggaagcatgtgttaatatgttatcctatgtaaattattttaaataattcttataaaaagtatatttttgtcaacatatatacaacatagtgaaaaaagaaaaatatacaacatagtgctttggtgaccactatttttttgttcttctgactttagaatggaagtctaaatgtccttcaacttttagttgggcctttggctcacattatcggcccttaagaatagaagtctaaatatccttcaacttttagttgggcctttggctcacattatgggactgtataaatgggcctccgccataattagttgcatgtttcatagtggtaaattattcagatcaaactcaagcacagttcgaagttttcagcttctctcagaaacattagtttttcttcttctgttcatcaatttcatcacataaaccctaatttagattttagggttcatctgaaaactcttgcaatatttacaagctattaaatcatcaacaatg

SEQ ID NO: 1080 - DNA, 3000 bp, Unknown
  misc_feature (1)..( 3000): cDNA_ID_2106191_gDNA_ID_1620355_Annot_ID_154451 3000 nt of promoter + ATG
acctttttaagaagaagaaaaataccctgcctaaaaccaggtcattggaaatagacttcagacgcacgaggattttctcaaaaatttctcaaaaaatattgaatgttgatagaaaaaacacaaaaattccttccatttttagcattatatttgtttcaatatgtatataaataaatgaaaactctatcttttcctcttttttttttcttcttcaaactgtgtaacagactaacaggtgtattcacacaaaacagtcgtatttttttttaatatacatcaaatactgatataaaaatttacatagaagctctagtatgaatatctaaccttttaattaaaccgcactattttgttgaacacacagggcttgatggtactgacggtccaagcccacgagcactctaccgagccatggtctcgtgtatttctatttgtgggtctatatttagtagctcttggtgtcggaggaataaaaggctcgttgccaccgcacggagcggaacagttcgacgaagaaacatcgagtgggaggagacaaagatctttcttctttaactacttcatatttagcctctcgtgcggtgccttgatagccgtcacggtcgtggtctggctcgaagacaacaaaggctggtcttatggcttcggtgtctccacagccgcgatcctgatctcggtcccggttttcttggccggttctcgcgtttatcgcctcaaggttcctagtggaagtccaatcacgactctgttcaaagtgttaaccgctgctttatacgctaaatataagaaaagaagaacttcaagaattgttgtaacgtgtcacacaagaaatgattgtgatgacagcgtaaccaaacaaaactgtgacggagatgatggatttctcggatctttcctaggtgaagttgtgagagagcgtgaatcactaccacgtccactccgttgtacggaagagcaagtcaaagatgtgaagatagtcatcaagatcctacctattttcatgtctaccattatgcttaactgttgtctagctcagctctcgacgttttccgttcaacaagcttccacaatgaacacaaagctcgggtcctttactgtcccacccgcggcattaccagtttttccagtggtcttcatgatgatcttagctccgacctataaccacctcctcctccctctagcgagaaaatcaacaaaaaccgaaaccggcataacccaccttcaacgcatcggaacagggctagtcctttccatagtcgcaatggcggtggcagccttagtggaaacaaaacgcaagcacgtcgttgttagttgctgctcaaacaacaactcatcttcttattcttcttcgccgcttcctataacgtttctttgggtggctattcaatatgtgtttctcggatcagccgatctattcactctagccggtatgatggagtttttcttcaccgaagctccttctaccatgcgttcccttgcaacctcgctctcatgggcgtctcttgcgatgggatattactttagctctgttctcgtctcggctgttaatttcgtaacaggcttaaaccatcacaatccatggcttttgggggagaatctaaatcagtaccatctcgagagattctactggctcatgtgtgtgcttagtgggattaatttcttgcattatctcttttgggctagtcgttatgtgtaccggtcgaaccaagggtaaatcctaagcacatacattggtggtatcagactatcaattgtaatgagtgagcttattgtagggtaatttgttgtctgttaatgatccgattagaagaagtcaagggattagtttcttggagaataagttactatgatgctagattggtttttaattttacggctagggttataagttgaactagcacaaatcctatgctcttcaggaatatgtcatttaataaaattataaagacattattatttttatttttatttaatactccatgaaaattaattgtaacgttagaaattaatggttgtatttgctgcgtttatcaaataaataatagcaagtgcatctgtaaatcacaattcacaaccgcttttttacttttaaagttttaaccactgcccaaaacaaatcaatctcataagatgttatggtggcaagtagtccttttttcatgtaacgtacgtaaaagattgacaagttgtaatttgtaacttgtaatgaagcttggtttggataactactgactaaataaaaatcaaccgagtattcttttccgatgtatttgtggaataaaatcttcgacttttatcaatcaaaactgactcaacaactcatcccttacttttaaaattctccaaatttagaccctataatgtttatatttatcacagatataacagaaaacagtttttctttttcttttttttgtagaaacaaataattattcctgaatctaaaatagaacaataatgaaatttatcatatttcgtcaagagttcctggttttttttaaccaattaaaatttatattgagtatattgtgtaaataacaaataaacttaagggtaacaattcgaaatagtcgaaagctagggaggtctttcttgtatataaaaccgtctctgcccactgaaatatcaacttagctcataagcatatctaatcggagctcggagaaatttcggtaaaaccctaatcatcatcttctccttttgatcaatcttatcttcacatgaaaaatctctgttcaaagacatagctttgttctggaattccaaattttggggttgattttgtattttctgggtacgcgagattagatcgagatagaaaaaaaaagagcgatcttttctcattaattccggttcgacatggctagtttcagcttaaatttacaagctttgagttcagtatttgttcttatgctcatgatcttcagaattttctcaataaaaaatttgattttttgttgttgttgttgttgatgggattaggttgtgaagagaagaaag

SEQ ID NO: 1081 - DNA, 3000 bp, Unknown
  misc_feature (1)..( 3000): cDNA_ID_2024889_gDNA_ID_1620356_Annot_ID_154489 3000 nt of promoter + ATG
taataatatttcccacacatattttttggattattgaatcaattcttgatttagatttccttacactactctaaagtcttataaactttaaagcataatgtaataaaactaacgaaacacaatacaaaatgggaaagatatcagtaaaaagatatacacatataaaacatttttttgatcgatacacattaaatttttgtaaaagaaaaacgctatttatagcaatacattaacgtcgacataaaaatctttgattataagaaaaaaagaaaagaaaaaaaaaaactttgattatatacacgtctctctctctctctcacagaaaaaaatgaaaaaagaagcattagttcccaaactcacatctgaattgcctccgtttacactaaaagaccatccgaagtttgtcgtcttagtggtcatcttgttctgtatcgctttcttcattgctatgaccttttgcgggtatgaacaagataaagaaaaagaaaactatgtcccaaatattacaataccttctatggatttcacggtccttaatataaccgagactcatcttagtgtaaaatgggatttattgttaaggatccctagagatcttcctggttggtatatgtgtctcaaaggagattttcagctttccataatatacagaggtgttaccattgctacttcatccatagagaggttaaactttttttctattctattgtctatattttagaatttttaataatttattcagcttatttgttcacatatttttgtgttattccttatcatgattgatcagttacagtctgataccacggtgggctcagctgattagggtttcatcgattgcttctgaaggagacatggagggtgtgattataaaagatattatgaaggatatcaaggaaaaaggtgaaataaggttccgatcgcgattgcttcttccggattgtagatatgggacaagtggaaagatgaactatgcgtgtgatgaagccatgttaaggttcgagcctggctctcaaaggaatgcaactttgtttggagaccaccctatttgccgctatcttcgctaagtacttttcatcaatagtttgttctttagtttgtcaaatgatggactttctaaattcttttgcgttttgatatggacttgctttacctaaattaaattcctataaattaattaatggaatatatttcttctagatgttaagtgttgaacattcttaattctctctctttacgaacaatagatatgttctagagcaatatcatggagttgtacgtggtgttatgatgatttctacacgaggcatttatccttgacggacaagttgcaattattttcctccatgatattcaatttttgggatggtattttcattctccacaaatgttgcatctatgagatcaatatgcatgcaagatctctaattaatggtgtggtgcatggtctgccctcccaaaggtggatctttatcttttgtgttgtgatagtaaatttgtatatatatatctagtgtttaaaaatttgctaagcatggggtgatccaatacctacctattaaaaacgtttaatccgaacatagctacacacggaccgaatgttcttttttggagttttttataattttattaagattttgggacatttagatctctttaaattaatatttactaaattaaagagagtagttaagatccttaccaataaacgagagagatgttaagatccgtctcatcaaaaaaagagaaagattttaagatccaagtcaggtcacttttttctttggtattaatctcacaactcaattctcaactcaactcaggtcaccaagatttaacacttataattttacactttgttttcttaatcattatatactatcctaagcatatatatgaatctttcaccataagttataccatttatatatgctaatattttctaaataaaccttacaaatttgttggcgctaacaaccattgtttaattttgcttggggtggctctagttatattatatagaccttaattttgcaggaggtatgtaacacctcatattgcttcagcttagcaattcatatatagccaagacgtgtggacttctcacccaaagtttcctagtttaaatgtgaatgcctctaaacaaaagttcttgctttcgatgtctaaacttagatgtgttaccgaataaagccagatttacctcctttgaccttactatatagccagctcgctgcctccgcaactctcaaaatgacactcgcgatcatattagttgtttccaacaaattgaaaaataaaacatttcactcaaacaaaaaaagatctaaacagccgaaaaaacaagtccaatatcaaaatctgttatagcaaaaaaaaagaaggtagagtattttggtaagaaagaactctaaatgcctctacgatataatattaataagtatgttaccaaacaacttaatattagtgcaaaaaaccctttagtttgtcataaacagcaaaatctgccactataagttgttttcatgaggtcaagttgatgagagtatatgattctctgaagctcatgtcaaaagaatagaaccaatgttcttcagtcttgtccacacggtaatgcttcaaatgaacttgtctatagagaatcttccagcgtgagagattcttagtgttggtggattgacataacagaaacatacctaacattggaaaatgctaaaaactttgagtgaatgaatgaatgtatcaatcatgaattagagattccattttttatggcctaaatcaatgtttctcacttgtaaaagttgtctttttgacaactaatcatattctaattctttttctctgccctttatggaaaagctttgtgactatttctttatttatttctgtccaaatttgatgatctgtaagaatctctttattgggattgcaatttcaaacaaactttacatcttcttcttctctctgcttttgccttcacgacgagtagagagagcc

SEQ ID NO: 1082 - DNA, 3000 bp, Unknown
  misc_feature (1)..( 3000): cDNA_ID_2045557_gDNA_ID_1620356_Annot_ID_154509 3000 nt of promoter + ATG
aactttaaaggtacaagaatcattaaattcaaggatgacggaaccgagcgatcacgttggaactgtcttttcaggcaagggattaacatgaagttttttactgaggttgaagcgtaccgtccagatttaaagcatcctctatgtggtaaacgatatgaattaagtgctagaatggatgcaatatattttaaaatggatgaacgtcctccacaacctctaaacaaatggcgttcataatttgatatattttacctaaaaaccatattttttatgcaattctgttccagcttatgacctcctaattaagccagcataagaataaattttataaattgtgtatttctttttaataaatagcacatttcagagtttcttaccagtctctctactctctttttattagtttctattttcttaatggtgagtctcttatttttctcttagttttctatgagcaaaccaacatagatgctcttagtgatctatgactgtattttttatatttatattatatgaattttcttcatgaaacaatattatctcttgagcctcttgtatttaattaatttccatagtatatgagtttggttgtatcttatgcacaattcattacattttttttttaatcttgctattcttctctaggaggacataacatgcttgcatggatctctaatataggtcaaattgccaaaagaccactctatcaaataagagatcattgtagtacgttagagtcgaattccacaaaactctctagtttacacaatagactaatagttttgaattaaactaaacataaataactgacaattaaaaatagcaaaaaaatcaaaatttaagatgtaaatctggtggaggaatagttaggcttaagaatttctcaggaaatatcagaattgtagatctagcaattaattaaaaattattatcgaaccgttctagaactcaaatcacaaaactataatcaaccaactctcatatgtattgattatttgtgcatagtagtaggaattctaacttgtctgtaaatccgtaaaactaaacacgcattaacgaatgggtttgatatgctcacaaagtatctaagccaactctcgtatttatttagctacttttgcccatctaaaatagttccggtaataagcgtacttttgtgtttaaccttttattatatgagttacattctaggtgatcaatcgagaactagtgataaaatcaaatctaggtgaagaattctattggtttttcctaacagtttatcgatctaacaatttaatcccttttgagaatttataaacctaacaagcaaactactgagacatgatcatgaaaacacaaaacatgatttgaatataaagcttaaagaaatcgagaagagattagactttagaagatcttctctcaagggtgctcccacatgattcccacatgattttacctccagaattaaacttagaaaagtaaactttacctcccacatggttttagtcatgtctaacaacattgtagagactatgaatggtgtcatatagaaagcgaaaatatttagatagtcatatattttcatttaaatattatatatgcatgatacgtattgagatatactaacaaaatatttaaatctaatctcttcgtaaataattgttagagatttcttacaactactttaatgttgtaccatgtaagttccagtaaatattattgtgtacacatataggaaaaaacttatgtgatttatgtatttttagaatataactgtttggagcgctcatgtacgtgtacgtgtatctcaatattattatatagtttaagggtctagattagaatactatctagtctccaccaataatattgtgtaacataatattcattaaaaataaataacaattatataaaaagaataacatttaaacagaaatatcatataaatcgtactaaatatatagaatttggctaactagccgtatgcaccattatagataccaaacattgcacatattcttaaaagaaccggaaatggtgtaacaatccatacttcgaattcctctaacatatgtgatcaaatgacagtcaaattaaccaatgtttgtaatgtaagaattcgtatatattacacgtatatactaccgaaacaatggtacatataatcataattccgttgctactcgtttgagtaaagtatcataattcatttctctttactctcgtttttttggttttgtttccattttttttaataacataatgacacaaaaatttagaaccgtatcgaacgagaactgttcaattcagaagacaaatcggtccaaaaaagccttaatagctaattgatgagaagcccaaatgactttgtcaaaacatggttcagaaagtcaattttaccccatatgtaaatatttcttataaaattattaaactttggacttgtcaaaaccatgaccataagtttggactttgccaaaacctatttaacatcctcttcaattttaaacaattatccagctctataaaagatcttccacgatcataattttgaaaccacttgagatgaatatcaatttctatgaattttttttctttcatagttcgacgccatgtgttcttattataaggtttaaatggcctccaaaaactttttattcaaaataatcccacaatcataatttttaaattcacttacggaagaattcctcacatcgtctcctttttgtctttcttcttatgttgaacatttcaacctttttcctttgtgtaatctaaaaaccattgtaaagttcgtttcttttgctttctgaatccaaaggctgcatttcttgttttcaaagtcagaatttggtaaggctgtcactagtaactcttaaatttcatttctaagtatcatcaactccctcagttgttagcattgaatacgtttcgttcgtaaatcttttttttttttgtgtgtgttggtttagatttggtgcttttgcagcgaattggactctgtagtatatgatg

SEQ ID NO: 1083 - DNA, 2409 bp, Unknown
  misc_feature (1)..( 2409): cDNA_ID_3060510_gDNA_ID_1620356_Annot_ID_154516 3000 nt of promoter + ATG
cttcaagtttatttcgtgtcattctcatccacgaatgcgaaggtgaaggagctaaagcaaagaagaccctacagattccaaatcttgatggcgtggataagctagtgatatgccacgtggacgtagaagcccaaaaggctgatatctcttatcatcttcctaatctctctttatacaactttactctctctgtatcttcttctaaatttgttcacagagtcttgacgaagcaagaatctttacttggagattagtgagagagaaatatgttgaagagatcaaagatctgatatctgagagagataatgggagaaatgacggcgaggtcttcggttttatcgtcggggatgttcagaagttaccaccggccggtgacgacggaggtgagatcactattacggtcgagagtgatgtgccaagtgtcatccgtaaaacccgccacgtattcatcgagactctccacagatattcctctcaacgagtctcctcaggttctacttctcttcactttactacgcatcgatgtttttatttttttttggtgggtttaattgagatttcgaccatcttgtggaatttttcaggctttgttcgatgagtatttagaggataaatcaagagtattcgaagcaatgtttccagataagcccagaagtcataggcttaacgaggtactatcgaagttatagttaactagatatagagtaaaataagtcttcaaaaatgggcatttggtctagtggtatgattctcgcttagggtgcgagaggtcccgagttcaattctcggaatgcccctatttttgttttgtccttctttttatttacttgcttttttaatttgaatgaatcgaatttgtgtataggaagaatggagaattcagatgttaccaataaacttcctcttccttactgtgtggcctgtggtagatatgaggttaagatgcaaatccaacggtcaagattatccgccagatgtacctttagatataaccaaagttcttgagctcaacatggtaatcattcaacacacacacgtctctttctttgtttctttgagcttcaaacttgttactaggagtaggcacgaagttgatattaccgtgttagtatttgtgatttgctacgtttgtaacggatatttatggttattcagatgagatggaagcttcaagggcttgaccgagtaatggaaccagctgatttcagtttggaagtcaaaggagcattgtaccctgaccgaagaggaaagcacacaaggctcagaggtcaactagagatgaacataagctttgttcttcctccggttcttgagttggtacctgaagatgttcgaagaaacttggccaatgcggttagaaaactgttacataaagctctatttaccacatcccatgattgtacatgatctctgtgttttttcatttgaatcttttacaggttttgaccggtttagtggagaatatgaagcataaggttaatgggagcttgctttctgattatagcaggttcaagaatgaaagaaaattacaaagataatcgagtaaactctatctttgttgcctctgtttgaccatgtatagttctcaatccgttcatatatcagtaagaagctacttgtaagttatttaattgatatagtcaagttaagaaatcatttagtttttcagttggcgcaaattttccaaattctttggtttagctgaaaataaagttatatattgttttgattattcttataatttcttagtttagtattgtgtgttatgttaaaaatataataatttgaaatttaaattattttgttaattgcactaatctttgatctagtgtgaaaccaaatttaaaaccagagtggcctaactaaaacttttaagcattgggtttatttggtcttttatcggatttagttcgaaaatcagttaaaccaagctctatgtaaaaacagatgtatgaacttttaatctgaaggtacattttcgcctcgaaatggttaaaccagattggactatgtagacaaaaattgatgtgaaatttgagtgagatgaaaaaatcaggcctaagctttgtcaaccctctgtctgaaagtgagggttttagttcctttcaactttgaatgatgttgtgtcagtctcatccacgaccgaatgcgtaaaagactgagtaagcaaatatagatttcaagactttgataacatgtaacgtcttgtaattacgccacgtggacgtaaaagaccaaataaaccaatattccaaatctctaccgtgacggttttattcactgtctctttctcaatcttccacaaaagtctcaacgtatagagagaaaccaagacgcaatcttttagtatagatagattgagagataaagatatgtgggaaagatcaaagatccaatcttggtgaaatg

SEQ ID NO: 1084 - DNA, 3000 bp, Unknown
  misc_feature (1)..( 3000): cDNA_ID_2045549_gDNA_ID_1620356_Annot_ID_154513 3000 nt of promoter + ATG
aattaatttttaaaatccttgtaaatatttatttgcggcaaatagatttacaagggattttaaaagggttttaaaagatttacaagagattttaaaaaggtttaaaaagatttataaaagcttttaaaagagttaacttaaaatctattttggcgggaaatatttttttgaaattttttgccgggaaatttttggcgggaaatttattttggaatattttatgcaaaaaaatattaatatttcattttgttaacttaaaacaatttccaaataagggtaaaatggtcattaaaaatttaaagagcgtaaaaataaaaatggataaaacaaaagggtagagttgaaaaggggcatcatgaaaagggcattagaaagaatttttcttattggttaaaacatatactctaaaccgtttattatactttttatcattcaaacatttgtactgtaccacttatttttcattgactacacatatttctcatactgcgttttttcttaacaaatcgcactatactactaaatccatttgatctgcattgccaaatccattcctcccattggaagtctatatttacaataaagatacacgataaatgagaccaccattaatggttctacatccatacgtgctcactaatcactttgtgtgtgctctatttcctgaatttgttacgtgtgattagactaccggaaggaacagaagattgcattagtcgaaagaattttgctcttcttattttatcgcttagtagcatgtttcactttgtggatatcaaacttctgacttttattgaagctagctaccactactttcaataaactggttaatctcaattaaacaattattggtgacggttgcagtttcttggaagctgccactctcaataaactaatagaaattgttgtcttgacttttaattttttgatacagtaccattaaaacttaagaaacttaaaaaagactcacatataccaagaatccgaatccaacccgaacccaaaaatattttgggtatttttggttattttttcatttttactaaaataaccgaaccgacccgaacccgaaccgaaaccgaaccgaatttttagaatacccgaatggttctcaacctcctacccgaatagacccgatacccgaaaaaaaagaaccgaacccgaatgggtacccgaatgcccacgcctaactcaaactaacaaaagcaccaatcgctcatttccaaaacccattaaaacaagtgtagtatcacaagtcaatgaaatgtctaagttgaataagcaaagagaccaaaactcatttataactcagttagtctaaacttgaaaccagtaattgttaccttaatatcacaaaacctgtttctagtccagtatttgaagcttgcaacttctcagaaagcaaccatgtcaatccctgcaacaaaagaaagatggaaccgattcaagtcttagtgttttgcaaagggtttcatttcttaaacccaataaataaacacttctttcgtcaagaacaagctaaccaaactataaatcagaaagtacaaaaaccttctagcaacaattcaaaattcaaagacctcaattcaaaattcgaagagaagagcacaaagtaaaccaaattcttagaaccacttcaattttagctaagctaacggaaacccagaaacataaggatcgaaatacaagagaagagtccagagaagataacagaaacccagaaacataaggatcgaaatagaagagaaagtccagagaagaaaacaaacctaaagacgtcgataaacagtgaagcttgatgaacagaggagcttgacgaacagaggaagctagatgaacagaggaaggtgttgaacagaggaagctcgtcgggcaaatcgccgagagatcggagaaggagaacaaagtcgagagaagaagctgcgtcaaacgcaagtgttttagggttatgtttttttgtgattttcaaaaatattcaggacattctgatcattttctatgtcgatcgcaatttaacgctgaattaaaatagcgtcaacaccctaagtatatttcttttttttctgaccaacaaagtcttctgatctattttactgatttcaacatcaaaaaattatttgaaaacactccgcccccacccacccaattctacctttaccggagtatttttaacgtacggttgaaaaagaaaagaaacaaaaaaacccggcccatctgtatacactcaatagacccatgattcttacaaccttcaacaaaatctaagcccaattcacggcccatctcaaagcttccgctttcatctttcacaacttcgatcatctctctcagagaacacatccgatgcttctccgatcgccattcacagagccaattgcagagaacaaggatccacgtttgatgtgtttcttctgattcacgacaacaaagatctgattctcaattgagttttgaaatcaagctctcatcactctaccacatcggctcgagccttcaccattgtctcttacactaagagcttattcttcgttcaccatttctctattactgttgtctctcatagtagaagctgagcaaaatttggatctctttcgatcccgatctcttctacaaaactccgccatttttgtagtacctctctcgtgatctgcagcaaggtacactgaacttgtctcgatccacttcctcttacgctttccgttttcaaaatctccctctagaactgtgattagctcttaagttttcgtggtttttgctattcctctaatgaacttagttagatctgaatttgtgttacttaagtttagttttagtcactgaaaattctgaaccatggatgttacatagatcgtataagttactgtatatatccgaatttggtgaaatgaaaaagtaagaggaatctctaatctgaatcctgttattgaaaaagctttgactatttgcagcttgcatgcttggagtgtgttcttgtgattgagccaagaagttggggcgagt

SEQ ID NO: 1085 - DNA, 3000 bp, Unknown
  misc_feature (1)..( 3000): cDNA_ID_2045603_gDNA_ID_1620356_Annot_ID_154497 3000 nt of promoter + ATG
actccataactagtggatcccattagaagctcaggagctcgataccacaaagtcacaacacggctcgtcaattgatttttattcgaaggtgtcaccacatttgctagcccaaagtctccaagctttaaaacacctttgttattcaccaaaatgtttgatgccttaatgtctctatgtattactcctcgcatatgacaatgctctagtccccatagtagttgcttcatgtaacattttatcttgtatgacaagaattaaaagagagaaaaaaaaactcaaaaactctatccaatgtcataagaaaaaagacatgaatttcgcagtttttgtacctgtggctcggtgaatctgatgtcgggattagaggataaaccggcaagatcatgttccatatactcaaaaacaaggtaaatgctgctggatgctcgtgacgtgactatgccctcaagtttcatgatgtttggatggttgagtttccgtaaaatcaaaatctctcttgccataaacctaatgctctctggttgaagattatcaaactttaccttcttcaatgccaccatctttcccgtttctacttcacgtgctcgaaacacgctactatatgttccttgtccaatctaaacacccaaaaaaaattcatcaacacaacacaaaacaaaaaatatcatgtcttttgggtaacttccttgacaagaaaccatatattttaccttctccaacttctggaacgcctctgcctttagaggaacccaaccatggacagcctcagccgcagcagaacaaagccaagctggccaaccagcagccgcctgctcagcctctatattcctatgagacgatccaaggctcacaccaatcctcaaatcagaaccgcccaatctccttgattttcttgaacgcttgctattgtgacttgcctccaaagaatgatcaataagaactcgatgttgctggctcgtggagagcaagccaggttcagggagcggtgagtcaccctggtccgttaaacatgaaacattcttggagctgatgcaacccatttgtttatagataaacaaaaactgtttccggatttggaaacgggtctaatatgggggaattagccccacattaggccaaaagattaaatgggattgcagacaaaagacacaaagaagacgatgatgaaaaaaaaggagggaaagaggaaaccaaaaaaaaaagttcacatgacaaaatgactaaaagtaaaaggaaacattttttttttcttgtgttgaatcttcttgtgaaagagaggtaagggaagctgcaaaaacacaaccgcaaaaacagcaagagagagaataatgggacaaaaattgggtagtaatctttttttcctcttgtctttgcaaaaaagagagagagaaaggaaaagacatatttagctttgtcacctgtctaacagagaaagagagaagacccaaccgacaagttaaaaagctaagaaacaattaaggtggattagttagttaatctatcccaagttgttcagatgtcttaacaaaaatcatagtttttacaaaagacctaataatatcttctatgtacgaaacaacagacggtggggtttaagactaaagcttattaaagttgtgtaatgataattgttggtcaggtgcattgcttttaagggtcttttcagtcaaaaggaaactttaatttttacaaattcagcagcaactttaaatttccattgttttgttagtttttagttttttacacataagtaaatttcacatatataccttataggagaagaaaacatttgatagtttataactttatatccataaatcaatatcaatatagagttaccaccacacaaacatttctgacagtacaaaaacatacttgattgaaactttttgtgctctcattggttgtaatgtcttttcacataatggtttgttaaaccaaccttgttgatacttttctggatttaatcttttgctttaacatcgtctttaacatttcagcagttagatatcgataacctcaacaaattcccatatcgatcatcatatgctacaaagtcccgttaccaccaaatatctgcaatagaaaaacagaagcataaattctcaacaactttgcccaaagaaataaaaaaatgtcacacctaacgtcctaacataactgattgattaatcaagaaatatacatccataatcgaagttagggtttctcaaatacgaaatgaaccaatacatcttctaaatgtattagctacacggaatccataggcgctaaaaaaagttcaatatagttcaagaaattggtttgtggaacagtggaaggcaaggaagcgagcaagtgatcaaagaaacaattaatggagggaaaacaaacgcttggagcatctagtgagagattgtttttggtaacatattttatactatttttgtttatagaatacaaagatacaacgaagagatacagaagaccgaaatctacgaaataaacaaaaatacgaaaaagaccacaaataaaaatgaaatcaacgaaaaaaatcaccatttgacggaagaaaacacaaataagtcatcggatccgaggctagtcctcaatatctcgaatcaagtggtgcttacagcttttccgagtaaacttccaattaaagagaaagaacttggttaaacaagtttaacattttcctaaggtagtaaggtagttacatcttagttacactacgtgccgctctttgtctatatctaaatctgagacagcgtgtagttctcgtaatatgagtacaaatggtgtgtgaagtcaagtgttactatttgatataccaatcaaaatcaaatcagattattattccttaaattacaatttcactcacaatgacgtgtaacgtcgacgttgtcggtggacacaaagctccataaagacactattactgtattattatcttcgaaatatctatctcttcgtcgtcgaacccaaaaagattctccgtcttagattccgatcacgatg

SEQ ID NO: 1086 - DNA, 1111 bp, Unknown
  misc_feature (1)..( 1111): cDNA_ID_3060601_gDNA_ID_1620357_Annot_ID_154523 3000 nt of promoter + ATG
gatcaaaaccttgatgatacccaacccagatagcaatcgattgataaagaagcaaacgacggttcaaaggaccacaacaataataatatctgtaagggtcaagataagaaatgacctccaaaccaaaacaagccttaaagaaaagatttaaaatagttcagaagaacaaaaccaagaagctcttttaaaaatattggccaactccaacaactaatggaagcaagacacataaagattaatcaatatataatgtgtttagcatcactatcttgttcaggtttttctgctaaacaaatcctctatatatgaattcatcattctccactagcaaatactttattcacttcgtcactttgatgagaattacataataaaattttatttttttagcaatgtacctattactagcaaattcatagcaaattttaaaatctcatatgaaaattcttctaacaaaagactgatcctaacaatttgacaaaaaataataattgaacctagatcattcatacacttcgacgagttgagaaatctgcccttgttatgagatttgacataccttggactcgcaatacgcgatattttgcgaagacgaacccagatcgaagaaacaccaaattagattgtgttgcaaatgttaggagtctaagttttgcatcacattctaatttgatgttcttcgatcgaccagaaaaaaataaaagcttttcccggtgacctgagccagcaacgtctccgttaatcttcttcttctgaagaccaaatgtttctttacgaataatcgtgtcgttcgtctctaaagcaagaaaagttagacggcaagtagaagccaattaaacggcacactgttttaatctctaatcatcaaacaggaggtagtagtaatacttttcgacacgtggttgtgattacgactccgtttacgtttgaccagttgacctcgtcgttgatttttttttttggtgaacgggaaaaaaaaacacaacttttcaatttttctgattccaaaaatttcaaatcccatcgaagggggaaacgaaaaagtctcacttagaattgtcacaattcaatagtgaacagtgaggagaagaagaagactggagaaaaaatg

SEQ ID NO: 1087 - DNA, 3000 bp, Unknown
  misc_feature (1)..( 3000): cDNA_ID_2129953_gDNA_ID_1620357_Annot_ID_154535 3000 nt of promoter + ATG
ctatgcaacattaactttatttcgtcttccaaaataactaaaagtacatttctataattcaggttttgatagcataagagacttatattctataattctgtatacctaattttttgtacggatgatttaagatgatgtaagataaacttgaatatcagttatatactacatatacacgttttcttcttaattgtgatgcaaaatgtgaatcattgtctataaaacaactttgcactttccttcaataccattaaccacagaaactgggtaattcaatcccattagaaacagacaagagacatacatgcacacacatgttgtttcaagtatactggtttgaatatattttgtcattacttcaaaaaaatttttaattttagtcgattataccattcatacatgcatgaaaaatttgtggttgtaaaaacaatatattttgttttcatttttgtggtatttttaatttcaaatttattgatcaacaaagcagattatatattgttaactagactcatatttatttgagaagtagttgattatatttaacttagtatatataataaacgtatgtgattagagagcaatgatttggcatcatttgtatgctcttagtgctgtaatttgtcgtaagatttgttttaagcatatggtagtatatattaattattgttacatatctttttcatttgactctttaattgtttttataactgaaaagccgcctctaaaagatgaagatggcgtgtaaagtgatacattttgttagtagtttttgaaggaaacaacaaaaaatatgcaaagtggaattaacccgtaattagccttttgttacaactcaatctccatccatgtgctgccttctaaagcaactacacacgaatattctatagatatgcatctctatttctgtgcatgatactattttcaacgaaacgatcatcatagttatataatgagtcgtgactatgatggatgattaagtttaagtgatgcggtaaaagatactttagtaaaggaagatggtgcgattagaaacaaatgagaaaatttaacaaaaaaatgattgttgatattttaataggttatatagtaaaagtagttaaaacagtgtaaagtaaaagttattaatatatttataaaacgcattatacaatttaacaaaagagttatacactacattgcttcttgtcaattaataggtagctagcaagcaaaccatcccaaattttacatgtggtgaaatttgtcattacaaaaaaaaatgattttggagtgatattttgtcgttcagttagttatatatctttgcaacataatagtaatgaaataataactattttttgaacaaatttaattattaatattaaaaattggttaacataattattgataatattacgacataatttttaaattttacgtaaagtgatatatagttcttacatattcataactgctgcttattggtcactaatgatagctaagtttaaaaggaatagtaaaaaaaaattaatttatacaaaataattaaactgattcaaaatggtttttaattggtcggaaaatccaaactaaatcattgcaaatctgaagttatcaaagacggaattgtaactaagataaattgatgaagcgttccccgttatgtagacatttgtaattgtaaccaagtaagcaggttgttttatttgaaaaagaaagtgtttggttgatcacttttacctttcaattactataagatgacttttacttttcaattactataagtctataagatgataacaaaaagtaaagttatgcttgaaaaagacagagtcggtttgcgttagagactaaggaatctaatttaatatggaaagttacctgcgaaatcacatgcccatgagatgatagattctacaaagaaaagattcgtttttcaacaagaatactcatatccttcccaagaatttgacttcacagtccaaagaagagatccatgtattcgaacactaaatgtcaaaatcatctagtatagggcatggttttgtgtaaaattaagcagtcaattcatacggtaaataaacttgtaagatgattttgatcgttcgcgcttcttgagacatgtgttttgcggtacatttgcatgttaaaaaaaaaaaaaaaagagtgtctttcacaagatttaatcacccaatgtgtgtgatatagctataaactgcatgacttcaatttaccacacaagtatggctacattttctctcatccttgatttcttggaccacacacacaattatatagccgtatatattaaatacgttagacctattgtccataattaagtagtttcaattacaatagaaacaaacaaaatttgagaaaaggatttggaggaattgataaccgggagtagcaggtcgtcatgtcaaaccctaccaaactaaaacttactaaaagactaaaaccgaccaaaaagaagaaaccttcaaagagaaaaataaacgttttagacatgagaaaattagaaaaccgaaatatccggttaccagtcaaagaaagcttttcttttaaagttattatatttctccactgaattttattttttaaatgacagaaaacttaactaaataaaaaaagtaaaaatctggtaattcttttttaaaatatttggatttgtaagaaatgttaccatatgagttgctttttcccgggaaaggatttaacgaccaaaagactaaacccaaacgtcgctataaatagagagagatccatctttctccacacccgtcaaacccatcttcttcttctccatcgtccacctttaaaatcttatttttaccccaaaccaaaaaaaaaaacacttttcctttccttcacaaaagatatttcgagacaacaaaagagtctcgattttttcttcttttacgaggaatgctcgttgaaccccccctagatcttctgatttagaatcgagggttttcgtctgattctcgaagtcttttctttattggtaagaaaatg

SEQ ID NO: 1088 - DNA, 3000 bp, Unknown
  misc_feature (1)..( 3000): cDNA_ID_3060570_gDNA_ID_1620357_Annot_ID_154539 3000 nt of promoter + ATG
agtctaacaagcatatacaggtttacacaaattatatgtatcacatattgcaagatactacatgacagcaaaattctggaattataagaaacagaagcagaggccaacctcttaggttgcttgtgcgtgtcaaaacttctcaccagattcaggatgaactgacacatcccttgatcagtctggtcataaaacaacttatacagcaagatgcggacagtaaaagcttccttagagtcttcaggtagcaatttgatcaccagatctagtaagcaaagctgcattggaaaaaccacgtgaacaatgaacaccatgagtatactagtttctggataaaatgcagaaggaaatgactatcatttctccatttctccatctcataaaccaatgatacttgcatatgtctaaagaaaaagatgagctacaaaaaccatttaaaaagcaaataggcggcagaagaacagtcttagggaactagccagtaagagattaaagcatgcatattgcataccatggttttcacaagagagcttgctgcagatagaaacttaaaatctttagtttctttcagaccatcaaatgcacagcgccattttgaaatgacaagcaaaaacattctgtcgttaattgttgctgcaatcggcgcacaaatgtcactcttggaaaagtttactccagccttctggttggtagtgagttcagaggtttcctctgtttctattgctggctgaaaaaaaagccagacaatcataaaattaccgagattcagccttgtcgaaatgaaggaaaaataaatgcatagcaacttagaccaatgagagacaaaaccaaagtagctcaattactcacactagaagccgaagacttgtgaaactgaaaagaggtgatggactgagcaacttggaagaaagtaacaatgtcgctattttgaatggagggatgctccttttcaatatcttcacataatgactgcatcagaactaagagatatggtacgctggcatcagcatcagcatcaggatacttaaaaccaagtataaacaaaagaggttgttatattgtgtcatctaccattatatccgcctgacataaactgattgatgaaatcatgcagcaacttcaaaactttgtcatttgtcacagacattggtccatgttcccagacaatcttttcggtggctccacgaccttgctgaggcttaagcattgtgctttccgtagtagaaggtattccctttagtacagctttagtgccatcctatcaaaaatctcattcaagttacataactatttacataaacctaaaattttaagcatcattgcgagaaacaataccatggtaacccgggtgaatgtcccaccaaattgtgaatgacgctgattcatattattgagtcttgcaagctttcttttaacttcctcctccttcattaatgtcttcaaactatctacagaagcttgtttcccctgatccaactgcaaaacaaaacatgatgatcgacgtcagcatcaataccaacaatctcaggaatcatattgatccagttgaatcattaaccttctcaggagcctttgcaacgagctccatgtcttgacccaagagaatataatgataaatctcaagcagaagtaagttgtcatgcctcaacaaactattgaaaccctcaatagtctgagttatcacaagaactatatccatcacattctcacgagacagaacttcgagaaactgatccctcaacgacaaaaagtaacaagtagactctccagctttctgaatcggagatacatcatgaatagcaagtaaattcctgaataaagtaagcacaagctgaaccaatttccaatcttcctcattgaatacatctctgtaaagcataaataatatcagtaagaaagaaaaaatcgttttgcattacttaacacaacaatgagtttcgaacttacaattctaagttctcaagaggagcttcaagcaaagacacaatcactgcaacaatattactaaaagtaattgcagatttcaatccccatagatactctaactgctgaggaatatcatctgaagaaggctctataggcattgtaagaaacaccaacactttaactgaacaaaaacagatcacaatctcatcagaaaaattacaaagcatcacacttttatttaagggcaacagagcaaactcagtacctgcatttaaaactaagttatgttcatcttggtaatgctcaatgatcggaatcaaatctttagagactatattccacgcacagacttgtttgaaaacttctctgctctcaggatcgtcgcgtctcagaaatctcagtaaatctttcaaattgtcgagacagtactcgcttttcgagtacccaattcttcttctgtcttcgtcttcctcgggaagacccagatcgctgcagattactgataatccttccaaatctatcttcttcttcgttgagattctctcctccacatccattttcttccgcggaatacaaaaatgaaataaaaaatctcaatgaaattaagaagagatttttagcgaatcaaaacgtaaacttcgagaaatcagaattcgaaaaggctcagcttctctgtatcatcactaatctcaagtgattagggctcttgtgagcgcgaatagctccagacagtttcccgccatttcgcaatcctcaaaagttacaagtcaaactaaaacaccgagatttggcccacatggtctaaatgggcttataaattggtccaaaagtacgagtttaaacgccgtcgttttgggttgtgtcttattttgtttttttctaaaaattaatttaattttccaactacttaatgatttgtcatgcttcttcgatacgaactaagcacttcttctccgccttcgtaagttccgccgaaaagaaccaaatccttcactactctgtctcagctttcgacctctctcttctcattcctttgcaacttctcacttctcgaattccttctcttcaaaatcagaa

SEQ ID NO: 1089 - DNA, 3000 bp, Unknown
  misc_feature (1)..( 3000): cDNA_ID_2129965_gDNA_ID_1620357_Annot_ID_154538 3000 nt of promoter + ATG
tccaagtgtgtttgacatcatggttgcatggtatgcaaacatctcactcatatggttctgtagtagcaaaaaaatgttcttgttattttggattagataacaaatagactcaatggtgcagagtttcaagacaaggaaatcaggcgtggcttaccttgaaggcttgaccaagattaggtggcatttcaccgctagtaatggttgcttctgttcgcaatgcaacagtgtgcatcactccagcagctttcaatgggaacctgatatcaagtaaagttgagattcatgcatataataaacattcaatgccattataagctaaatcaatagagtacatgaaaagatactgccacttactttccgtgagcagtttctcctgaaagcattaccgcatcagcaccttctctaacagcgatagcaatgtctgagacctctgcccgggttggagttggatgaactatcatactctcaagcatgttagtcgcaacaataacagcttttcccatactacggcacaggttaatgatctcctcctgtataacaaattaaaatcaagagtttcaacttcaacaagttctaaatctccttctctgggttatcttaaaaatgagaggcaagtactaacctgaagaatggggacttcttcaattggaagctctgcaccaagatcacctcttgcaaccattgcctgtaagacatacacaaatctaattagacaatcacatgcacaagagccattccaaccatatgatatatttattgtttcacaaaacaacatccaatcagttgctctcacataaggagattacatactgtaagacatataaaagtcagaagaacaaaatagacaaggttgacagaaaaaatcaccccatctgatgctgtgataatggagtgcaagttaggtatggagtctgcactctcaattttcactatcacgtgtatatcagcaccactatctgcaaatatttgtaacaaacaatctcaaggttagaccaaaaaggaaatatcataggcaaatcattcacttaggatggaataggttccaagtatttactttgaaggtatttcttcaactcgtgtacaacttgagcatctttgacaaaggaaactgcataaaagtcaactttgttctccactccaaatttaatatcctcccagtccttctctgcggcaagaaaataattacaaaaaataagcatcagagtaagatctttcagacttaaatatgcaacacttcaaccaaagcaacaagaaaaagtgaaaaagagggtaaacagaaaattcgaaccagtgattgaaggtaaagttgcactctttcctcggacattcaggtgtctccttgacttaagttctccaccatcaacaacttcacatttgacagagtctttggtctttgacttcaccataaacgacatcataccacctacaacatagtaaaagcgccatcaatatattggaaaagactaaagcagatgtaaaacccttgtacaccaaataataagatgtacataccatcaacaagaagcatgtcacccgcttccacgtcattaacgaaatcatcatagttaacactgacacaacttggtgtgctgactcctctctcaattgtaaaggtaaactcttgaccaggatctaacataattggctgaggtaaatctccactcctaacttccggaccctatgaacaatgaaactaatcgtcaaaggcgatacatggacatagagactctcaagtaaatagataaataggaaacaaaaacaaaccttggtgtcaagcatgatagcaatagtgttgtctttagtttgtgcattgtattctttaaccaaatcaataaccttcttatgtgaagcatgatctccatgagacatattcatcctagcaacattcatcccagcttcagccaatttccatatcatttctcgtgtgttggtcgacggaccaacggtgcaaacaatctttgtcttcctcctcactgtcggcttcgaccacatccctaccgatgtatcaccaaactgctgcatttccaacaacctctcaagctgctcctctctctaatccacattgtaagacaacaaatttatcatcagctcacataaagacaaaagaaattcaattttacagattgaaacagttacataacgcatcaaattgaaatgctatctcaattactacaaaactcaaaacccagaaataaaaaacgcagcttcaatacagaacataagcttacacatacgttaggcacatcttcaggagaaacaggaatgacttcagtctcaacacgagcggatctcacagtagtatcaaccactcttctgcttcttacagagactcttccacttctctttgcttcgttgccaagaaccttcactgcaaaactcgctggtttcaatagcttctcggatcttgtagacacagatccaccgttgggagataacatcgagccttgaattgacctggtagcaaccacttgagccatttctgattttgaagagaaggaattcgagaagtgagaagttgcaaaggaatgagaagagagaggtcgaaagctgagacagagtagtgaaggatttggttcttttcggcggaacttacgaaggcggagaagaagtgcttagttcgtatcgaagaagcatgacaaatcattaagtagttggaaaattaaattaatttttagaaaaaaacaaaataagacacaacccaaaacgacggcgtttaaactcgtacttttggaccaatttataagcccatttagaccatgtgggccaaatctcggtgttttagtttgacttgtaacttttgaggattgcgaaatggcgggaaactgtctggagctattcgcgctcacaagagccctaatcacttgagattagtgatgatacagagaagctgagccttttcgaattctgatttctcgaagtttacgttttgattcgctaaaaatctcttcttaatttcattgagattttttatttcatttttgtattccgcggaagaaaatg

SEQ ID NO: 1090 - DNA, 3000 bp, Unknown
  misc_feature (1)..( 3000): cDNA_ID_2129951_gDNA_ID_1620357_Annot_ID_154534 3000 nt of promoter + ATG
tttgaattcaggagtactgagagctctaatcgtcttccaagacacaagagaaatgcttctgctgcttctgatatcagtagcatatcttcccgctcttcgagttctgtttcaggtttggaaaactgattattgtatcttcttattacatttgcattcaacttcgtgttcttagttcttacgtcttattgtttcatctatgccttatggcttctagcttccagaaaacgcactacaaatctatgtttcgacgagaaacttttcctgcaatcactttacaaggtaaaaagacaaaccttatcacaagtttgctacattgtttttcaatggatgtcttacaattattgtcattttctgtaggtcttgagttctgtatcggaaacaactccgctaatcatatacttgagagatgttgagaagcttcttgagtcagaaagattctacaagttgttccaaaggctcttgaacaagctctctggtcctgtcttaattcttggctcaagagtattagaacctgaagatgattgccaagaagtagacgaaagtatttccgctctatttccttacaacatcgagatcagaccaccagaagatgaatctcagctcgtgagctggaaatctcggttagaagacgacatgaaaatgattcagtttcaagacaacaagaaccacattgcagaggttcttgctgctaatgatatccaatgcgatgacttgtcttcgatatgccacgcagatacaatgtgtttgagtaaccatattgaggaaattgtggtttctgcaatcacttatcatttgatacacaccaaagaaccagaatacagaaacggaaagcttgtaatatcttccaaaaggtaagtgtacaagaatctgtttattcattcatttgcagatactaactgatcttctagctacttaactgattcatgatcttgaaacagtttgtctcatggactaagtatattccaagaaggtggaaacagatcatttgaagactcgttgaagctagatacaaacactgactctaagcgaaaaggaggagaagtatgttcaaagagtgagtcaaaatctggtcctgaaaacaaaaacgagtcagaaatatcacttccttcaaacaagaatgacaatccattacctccaaaagcacctgaggttgttcctgataatgagtttgagaagcgtataagaccagaagttataccagcaaatgagattggtgtgacatttgcagatattggttctctagacgaaacaaaagattcgcttcaagaacttgtaatgcttccacttagaagaccggatctttttcaaggcggtcttctcaagccatgtagaggaatcctattattcggtccacctggtactggcaaaacaatgcttgcaaaagcaattgcaaatgaagctggagctagtttcatcaatgtctccatgtctacaatcacttcaaaatggtttggagaagacgaaaagaatgtgagagctctgtttactttagcagctaaagtatctccaacgattatatttgtggatgaagttgatagtatgttgggacaaaggacaagagttggagagcatgaagctatgaggaagattaagaatgagtttatgacacattgggatgggctaatgacgaaacccggtgaaaggattctcgttcttgcagcgacaaacagaccgtttgatcttgatgaagctatcattaggaggtttgagagaaggtataaaagaaattttggtaaaatgcaaaacctctaaatcagtctttacactattttgactgatttttgttttgtgttggatataacagaataatggtgggacttccttcgattgagagcagagagaagatcttgagaactttgttgtcgaaagagaaaacagagaatcttgatttccatgagcttgggcagataacagaaggctacagtggaagtgatctcaaggtctgtgtcttctctaaccataaccaaagactgtcgtgtaaaatcgttggaaactgactgtttgttgaacttttgtacaaacagaacttatgcatcacagctgcttatagaccagttagagagctgattcagcaggaaagattgaaagatcaggtaaaagactaagaatggccctctcttgcgctctatattcgatcaaagtctcttaggattttgaaatatcttggtggttttaggagaggaagaagagagaagaagcaggaaaaggcacagaagaatcaaaagaagaagaagcagaagcttctgaggaaagagttattacattgagacctttgaacatggaagacatgagaaaagctaaaacccaggtctaactaaaatcttatctgtttgacaaaaaaaaaactaaaatcttatctcattttgtcaagaaaagacaagaaaactaaaaaccctaactagttatgttgtcgtgttattgcaggtagctgcgagttttgcatcagaaggagcaggaatgaatgagctaaagcaatggaatgatttgtatggagaaggaggctcaaggaaaaaggaacagctcacttacttcctttgaaaattgcaaacagatattgatgtgtgtttcttgatgcacacgatatatatataacaaagagatcccgcatatcacaaagaaagagtcttcaattacttgttaggccattccatttttagataactttttaggtttcatcttattctctttctttttgtgttttatagaattttctacaaaactatgatttttttttatatgttcatatttatgtcattgtgaatgtgtagttaatgtagtaaagatattttataaaaatattatgattgtttgttacatagaaattttcatatacatttgaactagaaatcatatgaaaagaataacaaaaattataccaaaccaaatattataccggttccggtttgatttggaattaagtaaattacacaaaaccgatacaatgattaaagaaccttgacgtcgacgatgattgtgtgatctccccagaaaagagaaatg

SEQ ID NO: 1091 - DNA, 3000 bp, Unknown
  misc_feature (1)..( 3000): cDNA_ID_3060597_gDNA_ID_1620357_Annot_ID_154525 3000 nt of promoter + ATG
atgctcagaaatttcaactgaatgctagcacaagtgacatgtcaacatcatatttcgggggcaagtccccgttcccgcaactggaccaattcatagaatccactgcttccacggggaatgtcccaggttgcatttaatctttgttcaacttgttgtgttgtggagagatctcaattctcatcttcttaaaatacatatgctgtgatatttaggtaagatacgctgctggtactggttctcagaagatggcctgattgtgtacagtatgttaagaaacagatattgcgaacggattggcagggaacataaaagcaatcatggtaccatctgctctcaacccatttatgatatacgagtatcgagtatgttatgtaatctctgcaccaaataacatttttttatgcctaacatttgttcaaacaaactatgttgttttagtgatgtacatcgttgatctcagaaggggaatctattatcagaaatgctacgatccagactgccgaggtgtgtatacgatccttactcattgtcttggcaaacaatatgaaagcaaaatcttgttcctaaaaaaaccaactctgtctgcagattatcggtctccaatacgtccagttccagatagttaccttcctgaagatatggtctactatcaaggagctacacagaatctctgtgacaatctttactctgaaggagaatgtcacgttgataaagaatgcgatccagatagtgctgctagcagaggctcatggtggcttgaagcagttaaagtcgcagatgatcttgaaagcaaacccaagacacttgaacctcttacctgggtcagttgacttattgttattgacttaagactctgtctaatttctcgagaatattataaagaaaaagctttggctcacaggaaaattacgaggaagatgatgactggtgggtagcagctgcagaagagtcactaaaacaaatcgcatctctaagtccttccccaaaatgcccttgatttagacatctacctaagtcaagaccaatctgggttcgtcttcttcccttttctctatttaaaaccaccatcgttccctaaatcaatgaatctctcaaaattcaatggctgcattaccagtattcataccagcagagtcatttccatcgatcctctcacatgaaaccttgatcaatcactttcggaccaatcttccgaaacattcatcaacaatcacaagccctgtccggcaaaactacaccgtttcatcaccttcctctctcctcctcatgccttcttggtcatcttcttcttctctcccttacatgggcgtcaagctcgtgacctatttccctcataactcttctcagaacttacctggcatccatggatcctacacactctttagctccactacaggccaaaccttagctacaatggatggtactgttttaaccctttaccgtacttcctctgtttcaggcttaggatccaaaatcctagctagagacgatagtcaagtgctgatcatggttggttccggtgctctcgcaccacacctgatcaaatcccatctagctgcgaaaccaagcttgagaagagtgatcatatggaacagaactccacaaagggctcaggagttagctgaaaccctctccaaggatcctcaacacaaggagatttcattcgatagccacgattcgctagatcaaatcattcctctaggagatattataagctgtgcaacaaactcaactgttccattggtcaaaggtgagttcttgaaacccggaactcatcttgaccttgttggatcgtttagccatgaaatgaaggaatgtgacgacaatgcgatacagagagggagtgtgtttgtcgataatgacactgcgatgatagaagcaggagagctcgcgggagcgtttgagagaggagtgattaagagagaagacatttgtgggaatttggtggagttgatcaaaggtgacaaagaagggagaaagagttcaacagacataacagtgtttaagtccgtcggttcgggtaccgtagatctcttaaccgcacaacttgttcacgagacttacctcagccgttgttaagcagtgtgaatgaatcttgtttgatcattgcgtttgcgaatatttcacattgttatttaaacgaaataaattattgatatggacctatggttttgttgttgtatagatggagttttattgccaaattttggattggttgaattctgatcgcaggtgaagcaagttgactttttgctgaactccgttcaggttttgctgatagccggtttggttagttgtccttctcaaattaactaattgaaaatgatatactcctaaatttcctattaactaattaaaattagtagctggagatgtgaatggaaattgattagtaccaatgtaaaaacggacaaattagtatgaaattgtaaaagcggacaaattcgtttactcgcatctgattttgtatgtaaacagtgttctctaatagtggcttcatgaatctctctaataaaatatgacttgttgacaaccacaaaaaatggcattgtgctaattagatccaatccaactatctaagtatacatatcactgacttatctttttttttgggatcaaaatcactgaattatctaaaatacatatttttggatttatatttgaaccaaacaaaaagacaggcgtatataaaagagactaatcaatcaattagtcatcgaagccgtcttagctcagtggtagagcgcgtggcttttaaccacgtggccgtgggttcgatccccacagacggcgaagtagttaattttatatttgatgcttttttttggggccaatcgggttttcggcccattaattaaaggcggtgataggaaaaaaaaacaaaaaagcaaatgacctaattgagtcagcttcttcttccctcttctctcttcacttagaagaaccgcaaagaaaagaccttattcacacaggtcgtctttgcgaagctcatcgtcgacg

SEQ ID NO: 1092 - DNA, 3000 bp, Unknown
  misc_feature (1)..( 3000): cDNA_ID_3060584_gDNA_ID_1620357_Annot_ID_154531 3000 nt of promoter + ATG
aaccgtgcagcggctaattcatcggaggcattgagatctggccggggatactgcagttactgtgattctattgtttggcacgaaaacttgagatgtctgaacaaacaatgtcggttgaaatcaggcaacaagccactcgacctcataacaactcaccaggtaagctattcttgcttcaaatgtttgtctcgttttatatatacatgctaaacaagctatttatctgcctttggtggttttgttacctcacaggttgtcaactatttgctggggatagagagttctgatgatgaaagcgaatcagacgatgaagcctttcctggacgactatggaaactttcttacgtgcctgattacttgtaaatcactaaagagaaatatatggccctatatgggcttgtggtacctcattggaccatttggccttactaagaatgtttgtgtagtttcaagcctacttgattagctttttgtttgcagatacgtatggtaatattgtgttttatctaaaagaagtttctacttttctaataacacttgaatttacgaaagagtataataatctaccaaaataatggaatataagaatttgattttttttaatgaaaaaatctgtagcctccttataaggaatgaagaataaaatgttgcagtgaagagtgaatggtaatcagaataatcagaaataaaagttaattaatgcttgaaagttgaaaacctgaaaacctaattactctgtgactcattgtcgatcatagattcattggagaaaaattgattaatgaattcgtatgtatatgtttaaaagatattgaggaagttgagtaagctagtgtgtaaagaatgcaagtctacacaatgtttattaattattatatacatattatacgagtaacgtagtgataattagtcgtggaaaccattattagggtcttttaaagatatgaagcacattttcttatgataagaagagctactattgaattatatcttcaagttttctttatgttatgctgttaatttatttttatgagcacctttttataggcgaaaacataaaaattcgttcaactcctaataaacaattctataaaatgtgatgatgcatacacacattccatgacaattgcgtggaagtagttccgaacgaatgaataggcataacttttgtattattctattaatcatatttaggtctaacagtataagcactttagtcggtatagctccatgctatccttagaaaactattgtaatagtcaataaaaaacaaaataatagttttccgttttcccaatttgtcaccagctattatatagtttaaaccaaattcttagtaaagaatgctttaatgtaaccaaggaaagttaataagtttggtttgttggttcataggtttgctgcattgaaagcaacaattgcataacaaacttagaagcttaaaatcgaatcgaaatatagaaaacaaagttgggaacatattaaacaagtagtataaaacagagttcgtctaatgaataacttattctcacttgtattaaagctaagaaacaaagtattttaacaacacacaaaaaaaaaggaaaagttaaaagcaaactgttctttaaactttaaagtgaaagaggtgtaaaattttgaacttcacgaaagaaagagcttttcgagtcaaagcttttgaggttaaaacctttgctatactcatagacatgataaatggatactagtacatacgtaacaatttattctttaagagtagagacaaaaggaaaattgaagtatgtaaaatgggccaactatacttttgtcatggaaagaaccccaagttatctttatacactaaggtcagagttcagaccgtcagatagctaaactcttctgctttttctgtgtagtaaactagtaaatgtttctttttgtcattcttatttatttatgtctgtgttcttcattctgtcttgttttttactatcttattaggtattttattactataagagtcaatttgagattttgtaactatagttggtatcatttataaagataataacatttttcaatctttgctcaaatataataacagttgtttaactatattagggatacatatacatatatattaagactagaaaagttaattgaacgttcatacgatattttgtgatataaattttaggttcaagaaaactcaaaaaccatgtattgaagatatgttgcggtcaaaccacgagtcggtcttaagcttttgcttcgagttgagcatgcatgcatctctcgttttaccctaaaggtgcaaagagaaagtatgttaagagaggttttgtttttcttttcttccatgctccactcctctttcttttttttcttttttttaaatccttattagtttcgtagattatattcttattttcaattttgtttcaaaatatattattttcaatttatattgattagagaaaatttattatatataaagacataaatttttacagcataagaaagagttaattttcagaaaaggaaaattaaaataattttaaaattttataaatatttagtttcagatattagaaaccagcatattttacaaaaaaataaaaaataatccaagcactttattctaaagaaaaagctactattatggcatagaatgctaaataaatgaagacaacagataaaacaaattaacctgtgcattagaaaaaaaaaaggcaaaggaaaagaataaagaaaaagaaaggagcggtaataaaaagtagagagaaaactcaaaaaaacaaaaataaaacattactttttatttctcttttttcttcctttaccaaacaaaaaataataaaccccatttcgaaaaaagctcaccttctctttcttctttttctttctatataaaatcctcacttcaccatttccgttgacaaagccaaactctttactctatctttatctctatctctctttctttctttctccattactctctttctctctttctaaatg

SEQ ID NO: 1093 - DNA, 3000 bp, Unknown
  misc_feature (1)..( 3000): cDNA_ID_2129932_gDNA_ID_1620357_Annot_ID_154527 3000 nt of promoter + ATG
gtcacataaataaagcttgctgccaaaaaaagaagggttaaatctttaaaaccccgacctaaatagttgttttatctagaagagacaagttaaagcgttatattaatggcatcttgaatactatattgaggcattaagatgtctagatatttttgagatttagctgaggaaatctattttcgtcttcgatatctattttaagatcttcataatcttaaaattcaatcaaactctttagaaaggctgtcgttacgcatttctttacatttaaaaataaatgtcttttatacatataaattaatttgtggtcaatgacataaaatgaaacataaaacaaaatgagtgaataatagtgcaagtgtgggtccttactccttacgataggattttgaacattattttatactccataagtgttctattatgaaacacataattaatatataattacaattgttaaaccaaattttgttatacaatattcacatttaacataaaccaaaatattatttaaatataaagaaagctaaactcgaattgaaatatagtagttttaaattttcgtaatcagctgttaagcctgtaatttgacaagagaattctcatagtatacagcaaaaaaaaagacaaaatctctcaagtcccaaatgagcaaaaatacaaatagtgtcagacaaacgttttaaaaacgttgagaattttcttaaattatttttggaagtatacaagaatataattttttcaaaatgattttgaattttggaaattttgtttagttacgtcacaataattttgaaattattattttttttgtcggcaactgtgattttgaaattagtttcttaccaacataattattttcttataagaatgaaggaattgaataaaacaaaaatacggcgaataatattacatgttgattgctaacagagaagagtaaatcgcacggcccagaggcacctcagataaacggacgaatcagaaaagaggaagccaatatatacggaagcagacaatcattacctttcatcgcaatatgactcactatcctgcgctgttactgctactgtacgccaaaacaaatgcggtccctacctttgacttggtttaaaaaagtcaaaattaaagcagcttttgtgggataagattgttgagagagaggacaagaatctgtatctaaattccacttacgaaattacgagaactctttgtgtctgtgagataacaaaaaaattaaaaatggaaaaaaaaataaagtagagagtgacacaagtgctttgtttggttcgaatattatttgtaccattaccattttattttctagcacacaattttgcaatttttctctctttttttggcctaatgatttgagatattcgtgctttcttaccttttaatttgtaagatcttgtgaacattttaaatcatacaaatatctcttaaatcagtgatgagattcgttttgtgaggaggaggaatctagaattgatcttgtatatatatatatatatgcaattttaaaccattcaattcttggattctttttttaaaaaacgtctaaattgttggattcttttatgagaactctgaacaatgttacttacgttacgtacgtttaaaacaatttaatatttcttcttgttcttgtgtatatctcagcattgacattcacgctaaaaacaaactaattatgtatattttgtgtaccggagaaatgttgtttggataactaccaagttgtaaaacatactataagctactgctcaaaattttgtactataaagtatattgattcaatatcatcacagaatgatgtttagtttgtctccaaatacaaaaatcatggatttataaacaaaaaccctgagaaaaaaaaacatgttgggtttaataaaacatggagataaaagtctaaactaataaacctagcgggtatttctttttcttaaaagacatgattaatattttcttcgcatctatattttggaaagtgaaaaaacatactacatacattagttagataaatcttgttttcgcaagaaaatctgatagtacttgctaaaattttattattttcctcgttattttaatgagatttgagaattgtaaaactagatttttgagggctagtggtcgttttataacaatgttagtcgcgtcacctagtaacctgactttaccgaatagttaataattttcttaaatgccaacataccaaatcattaccagtttaccactcaaccttagtccttaattgataggaatgtccattgtttgatgaaaaaaaaaaatgaaaaaaattgataggaatgtccattaagttaaaattcttacaatacatgttagtgttttactgtttgctgactgaatcttaaattgatttaccattagtggttggtggtaaatttgaaattttgtcttacatgctttgtttgttcagaaagacagaaaccatgaagcattttcctaaggtataagaacattatcgtaaatctgttttctagttacacagaaacaaactttcctctatcattattttatcactcagcaaacttaaatcattgaagtgaaaagacaaattgatcaacctcatttgtaaaatctattcacaatatatatgtataaattattagttaccgaatcttattggtactctttcaaatattaacaaatatacgatgatggagtacaacataatatatgattttttgaaaagagtataaataagtgaaaaagaggaaagaaaagaagatatgaaaacccatcaaaagttaaaaaaatttctttttgtcaaatgtataaataattgaaaagaataggcaagtcaagtgctctctctcccacacccatcgattcctctcggacactgccccaatctctctctctctttcgacaaagaaaaagtcagcgccgtcctttacgccatagtttgtctcctcctctctctcctcctctcaccaacataatcaaagaagctttcctcacgaattcaagatcgcc

SEQ ID NO: 1094 - DNA, 3000 bp, Unknown
  misc_feature (1)..( 3000): cDNA_ID_3060679_gDNA_ID_1620359_Annot_ID_154577 3000 nt of promoter + ATG
catttttctataaatccaaactaacatctactttctttaaatctataaccctaaacacttttttaaactcaaaccgatatataattttgtttaattttaaatctaaactctagtgacttatttataaacccaaacctaaaaataatttcgttttattgtaaatttaaactctaatttatatttataaatctaaactgacttataattttgtttaattgtaaaatctaaattttaaatataattaatcttgtttaattaaaagtatacagatttgttattttagtttattatataatatgatataataactagtttaaattaaaagtaagagtttattcttagaggtaaatgcaagtattgtccgaaaaaacaaatctaattcaagtagtgtccgaaaaaaaattctaactagtttgatagttaaaattttgatttaaaaaaggaaaaaaatcaaacaagatattaattagaagtgtgagacacggcacaagagtcacatgagtgtacgtacttatcaagattgactctgtctgagtctgaagtcccaaaccatgatggcaccacttccacatacgatcgtgccccgtattttggatagaatacggacagtggttttcgtttggacacgtgtcctgctttatctcttcgtcgccccaaaaaataccacaatgtcttatctcaaccacacgtgttctgcttatcccaacctcacaatttgtaccaaaatacacactttgcatggaagattttctaattatacaactcacattattcgaatttaaatttcgattttttagtttcaagaaaatcattctttgatgggtacttgtcttatttaacaggttgtatacttgtattcattgttctgccaaatgaaaataaaaatgaaaatgatgttcattgtttaataaaagtactaagataacaatcacgacaaatttctgtctagttcattaaatatttaatcaaactctaaacgattttcaaacaatttttataattcaaaaaataagttacatatctttgtttaacataatataataaaaataacatgaataaattattttaacataaaaaattcagtttttcaaaaataagtttagaagtttacgttctaaaataaggtaaaatatgaatgctgttttaagacgcaatctagataattttttttaataaaaaccgagatacatttaaatctatctaaataacttataactacctaattgttacataatctaccaatttaactctatgtaaaataaaactgattttagtaacatttaagcagtacgagaatgctagcgcctaattaaacgatcttctaatccactttcttgaatatttgttttaactaaatctaaacaaaaatatagttatataaccacaaatattaatgaaatttaaacttatagtaactgaaatacccaaaactaaaaaaaaaaaccaaaattataataattataaataagaagatattagtttatgtttacaatcgaaataatcaaataaatgattgtctttatttaggactacgatcaagaaccgaatgggcttttccaaaccaaaccgagatttgaattttatggtgcggattcggttaactggagaatagctatcaacaacaatttaaaatagatttagctagatcggtttggttcggttcgttttgtattctctgtcactcctcacaatcgcttatattttatattgtatgtttaaaagtcaacatcgaaatattgtacgttagtatgtcacttatgataatgtttattcgtaaacacaatttgaaaaggtcaaagaaagaggaaagatagttaatcaagcccttgttgtcaaaaataattattttatttactgtcatcgtaatgtttatcaatgcagttattaatctcatttttttctcttccgaagtcgacgaacaataaaaaaaaccaatctcattcgaagtacttattactgatatgatgctgagctgacacagtcgtaagccttggacaacaatcattcatgacgtcactgctgtgacgctagaatgatgacattatatcaatgtttttttgtctgaattttgttatggtaaaaataatgaaaatgtagagcttgagtattttgattttcgttttattgtaaactagctgaatctgaatcttgagcagttaattaatttcgtaatttattaattctattctgactttttaaaatataatatatattaactttggtagatgcttaaggtaattcttttttaataaataagatggttagagtatcttaaagttagcttataagaaaatcggaaaaattacttttggtgggttaattgtttctgtttgaagtaatgtgtgtagatttttcttatgaatttagattaaaaactatttgtttttcagatgttttaagaaaaaaattgtcattcatagcttgtccattcttacataccttaataagaaaaattataaagttttgtggattcacggaagctaatctaggttatgtatttgcccaaaaaataatctaggttttgttatggaattaagaaggaaaaaaaaattgagataaatagtatataaaaacaatttaaactaagtattattagcttaattgataaagattttaggtgaaacttaaaaatagttggttaaagagattacaaacattaaccaaattaaccaagaacctcctagtatttaaaaaaaacacttaaaaatatccaaacatttaattttttaatcataaatcttataaaacccacagctgtcctttcgaaaatccactatattcggtggattaagaattaaaaatcattcgaataatatgcatacttatataacaaaaacaattcacttgaaaacataatcaattgagagtaggaccgagtaacactgcattgttttatatatatcatcgatgcacatcgcatacataatatactcaaagtcgagccttccttcctttatctcttataccctttttgattcttcttcaattttctgacatcaa

SEQ ID NO: 1095 - DNA, 3000 bp, Unknown
  misc_feature (1)..( 3000): cDNA_ID_3060662_gDNA_ID_1620359_Annot_ID_154592 3000 nt of promoter + ATG
gaactcttcgaaaaaatataagacgatatgtgatcataattctaatcttaacatggataaaggttatataagttgtagtctcttcattataatccaactcaaaaacaggtccaaaaatacctgtaataaaacgcatagttagttcagagaaataaggaaagaggatatctctaacttgaactcataaatcaatgaaagtgaaaaagttcggaccagaaaaatcttctcatcttttcaaagcaacagactactagttaaacatgcaagaaactcttctcaaaatagacatcaagtcaaactgagaacaaaaacgaatatatattagagtcaggaatatatatgcgtatagtatgtgatcatattgcataataattatcgtctataaacaaacgtaaacttcaacgtcgttagtagactataacttaaaattatatttattataatggaacatattttaaattttgttaatgtaagctatttacttttatttaatatagtttacaatttgattacaaaaatatatttttaatcaatctttctaataactcccaattcttattaactaccaattactttaaaaaatctattatatatttttactctcttttactctaattatcacttttcttttcctcctgatacatcttttcccaattactgtactctcaattactctaatgttatccaatcagaccctaaataatgtatctacaaagagtcatgtatgtataaaccacgtgtaaacctaatagataaacccacgtgaagagaggtatggatgctaacttcaagaccgatccaataatagttgaaaataacacggactgattaaatttccttcataacaagtcaacgaaagtcttttattaatggtaacggtaacatgtcacacgctcccaattaaatgctaatctcaaatcttaataagcatttttcttagctcctcgagcctcccataggattactctttaagacttggtgatagtagttgttgaaatttgatgaacatgcaagtgacacatattacatatacggctctactttctaccaagtggtaccacaacgtacacaaataaaaatttaacaaaaagaaaaacgtacacaaataaattaaattcttaaaagaatatttcctccaagtcaaagaagaaacaagtttactcttcttttaacgtccgggtcttcttttaacgtccgggttatatatatagtaattgctaaaagcccaaaactttatgtgatttagaacaaacagactttatgtgatttagaacaaacaattttcagaatcatacattttcttaatgccttgagcaacttttgatcaccataatttactgtctttttcgaaaacttatgtaagtgagttgttattgttgttctaataataattataaaaatggcaacattgttatggtggggaatcctcgaggaatataccgatgccaaatcagctgtgaaatgaagagagagacgtcatagaaagtaggtgggcctctagtgggccgtgcatgttctcaaaagttttccactttcctcacatttttctccttttttggtctttttcaattaaacgccacattcatttttatttttattttgttgcaaacttagctattttaaatctattgtaaagtttatcaaatttttatttttattattatagaatgtttgttattagaaaatatatcttttgtaatgaaaggctgtaatttatttattttgatataaacttgccaaacaaatgttttccgtatcctcgtttttcaagatagagtattttttattattataaaatatatatcttttgcaatgaaaatttttaatttaaaatttgtttattatttgattatgtcatagtattaatagatactatatcttttgcattttttgaaaatagtgaaagaaacttttcgcatgctttgtgttgtgagttgttgaagaaaaaaacttttagagtgtgagttgttgacaaacaaaattaaatacatcttttgcatgctttttttttctttttcttaattcactaattaatggacctttagatttacaaatggttaacataaataaattaaaggttgtggatacgaaactagttaatttaatagtattgtttactttttgtattttgaataatctatatatagagtaaacctataaaattcatattttcatatattattttctaaaattcctacaaatgatttaggacttatcaataaaagttttgaagatgttttaaatattttgtggtaattttgaattaatataaaaaatcaattctatgttttagaatacctctatttcatatatatatgttaaatatggaagatccaagaaaaccaaattgggttcgaaatgtttcaccattttaataaattctgatttgtttttttttttgtaaaattaataaaatgtatgatttttctagtccttatagtttaacattgcttcggaaatcccatgaattgctactgacttttagtatttgtggttacagcaattatttgtaaattgtaacactagatttttgcatccaataataagagtgaaaacttaaaatgatgaaggattttaggattttaggagttctttcaaaaaattcaactagatgtcaaatatatatcaattagtcgattacttttaaatatagtatatgtttggtaacaaaaacattggtaaatccgaatgccaaatggcaacggctggtccaaacttaacagctatagggttcttcctttacaagttggagatttgtacacatatttaataacgcacacacacacacgtttatacataaagactcaaatctataaatagaggtatagagtgaaaggaaacgcctaagaatccggaaagctcaaaacaaaaattgagagaaaaatatagcattagatacgggaaggtccacgtaagacccgtactctactttgattctctcaatctccttcaatttttttctagattttttttgtgatcaatctttgatctaagaagatg

SEQ ID NO: 1096 - DNA, 3000 bp, Unknown
  misc_feature (1)..( 3000): cDNA_ID_3060651_gDNA_ID_1620359_Annot_ID_154596 3000 nt of promoter + ATG
gtcaaataggtaattataaaatgataggaaaaaaataggtgaaatttgggtggggatttttttgtatcttttaatttttgattccgcgcgggtttggtttaaaatattaccaaggaataactgacacgtgatatattatctctctaactctcgataagacaaaacaaaaacgaaataagtagacgaattcaaaatttaattaagtgcatacaatacatgtcctcaaaaaatgaattaacaatgaatataaaagagaaaaaaaatcactggtgggacccgtttagtgggaccgttaattaacggagttaggatcatattatccgttagaagacagtgttagttctctctctctaatctataaatatcttcttcatcttcttcttcccccactctgctcttcttcctcttgttgctatcgtctctctctctcgggtcaaaattagggtttcgtttcactatccaggtatgtctctctctctctctctctctctctctctctctctctctctctctctctctctctctctctctctctatcttacctttcttctctgtgtaatttgcttctgaaatttctaatttcgtggagaatcttcttcatcttaccatcggatctggtagctctcacttcgattcatttcaaatttggatttcaaatttcgttcttagagatgtataatcgtggaatttgtaatctatagcttaattacgttcaagtagattcgagatttgatgtgattttgaagaattgattagctgaaaatgtggagtgatctacgttgtctgtgatgatgatattgatggttttcttcttcttcggctttcttcggttctgcagagtgtatacaaaggttgttgtggagcttttatcagatcacaggaataagatggaggtatttggaaaatctcccatggttgttacatctgccaatgttatttacttgtctgcaattctgggtcgcgattgcgatggacacaaatgtgattggaaatgtgagaatgaaaatgtttgtgggaatatgtatcgctgcaaactaactggactaactcatgtctgcgacaagaactgtaaccagcggattctctatgataaccatagctctttgtgccgagccagtgggaggattttccctctctcgtccgtcgaggagcaggcggttaaaggtgttcggaggaagcttgacgccgctgagagtcatccttctgagagctgttcgtttaagcgtcgtcgtcgtgatgctcagttccatgcttctcctttcgagaggtcttttactgctgtgagccctatctgcagcccggctggagacggaatggagttggtttagattccatgttgatctccgcaaatcctgagactgagaggcctctttatcttacgtagaataacttcccttttctctttcttttggacaactatggatatgagacattgtgctattgctctcgcagggaggtctaggcatatcctccctgccttaaagagagcttttatcttagtaatgttgaactttatgtagtacttatgtaggagagactttataattctaatgctttattctggatcttactgctgtcgtatttaggtgatgtttgatatctcttcttgtccacctttagttttttcttgtgattggacacgatatttaggcaggcttttattcagctatgtatcttgttttggctactattacgcagagcctgacacaccatggttgatttctgtaagtgtggtgctacagggttttacacattgctaaccaattcccttgatcctttctgatcgaaacctaattctaacaaattatgtgtttatttccagctttccatttccttgattgatgagtatttggggttctgaaattgttttctgtttgtgcaggtttcaaatgttgcaattcaggagagtttaattgtgtttcttttatgtgtactgatttgtctgtttgaattttctttatcaaaggagtaaatctaactgatggaagtttaaaccttactttgtaggtcctcttgtgtttgtgctcagcaggaaacaacaatcatggtgtgattcattgtcattggcaacataagctgttactccttaactgtgagaagaaggcgggcattgaataggtatgaactacccaaagaggatgcggttggccaactgtgttcaaaactatcaacgaaacatggtaattatgtgtattgatgatcaaagaattgttaccgttagttacccttcgtttttcatttacctgtgggctctgcttctgtaccaatacctggctatatctgaggttctgatatttttccaatatctatgaccaggtacaatctctttaagtttctgatgaagacaacttccatgagtcccatctaaatcgcagtcttggtaagtcatagcgtacttacaaccttcttgttcctaactgcttgttatagtcctaggctacagccttacaacatcccctactctgaagtatatttacaatggtgaactaaattaactcaacaataaaaaaaactattaatcgtcatatagaaaataatctccaggtttgcttcataagtagaactgagaatggaaatgttgcttcaagttgttgtttttcagcgtggatttaatgcaatagtttagctgacagaaaggtgaatgtctaggcattcgatggtttcctgggatcgttgaagattctcttctgaagaagttggcaaagtatcaaatgttgactctgccgctacgataagataacggtacgggaatatttctccctaatagctaacgaaaataacaatcactattttactttttgttgattttttctaatttctactatacaaatttgattaccaggaaaatattttatttttattttttatcatttgtttttttttttaccaaagatatatttggttactttattcaactcaattgtcaaggaacctggatctagtgtaaattctcttacatgagacatcacttcattagttctataataatataataaaccg

SEQ ID NO: 1097 - DNA, 3000 bp, Unknown
  misc_feature (1)..( 3000): cDNA_ID_3060666_gDNA_ID_1620359_Annot_ID_154591 3000 nt of promoter + ATG
aagttgtattgattcaggttcaatggtagttgaaccgtgtcaaagtgtcactctgtaaccaagtgaagaaatttgttgtcatttaaccgtaaaattgtcaattttactgatgtcaaagatatatatatttttttggtaattttgcatatgcatatggtatatatggatcatatatattccatgtttattttcaaccctttactttaaaagttacgaagaatttagaacaaattacaaatatggacttggatcaaaaatgttcataaattctacttctatagctttttctttccccgtttataatatatggtattcggaggtaacatttttcttattttttctgtcaaccacattaattgtttgagatctctttaacccttttgtagttaggacaaatgttaagaatccataatagtaaaactaaatatgtatttatttttggagcttttatttttaatctttttttaaaacactatatatatagtgggtggttttctatatttttttaactaacgttgatataggatttaacccacgatataccgtgggacaatttgtgtttcgcacaatcttgattcgatatgtttaatattggtagtgtaacaaaataataaaatgaaaagagcaattgggtagggtcggatcatcatgagatatttagtaatttaacaacttgtagttttggtgacttcttaaattttgatcagatagaacatagccactaagtaggatcatgaggaaatacataattttctaaataaaataaaaataaaaagagagatttccacatattcaagttttaatattttttctttgtttttcaaataaattaaaactaaactaaaatccacatctaattaccattcaaatttttcaaacaactaacatttacaccaaaaaaaaaaattacaaactaaaattcgaaagccaaaaactattttaaaagctacatacatttatgattttaaacaacggaaaataaaatatttccagaaactgaactttgagatagaaagtaaacgtctttagtaactaagtgattggttggcatgtcaccgtaaattattcgctgtaaaattttgaccgtcagcgtgtaaaatgcaaccgtgtattttattgttatacgtgtagatattagggatataaagtcttagaagtaaatttattagtcgtatcttaaaatatgattagtaaatattttataaaatattatagttaaccaaactatataataaacaacaacacaaattttgtgatgcacatataggttaaatggaatctatataaacatgtaaaatagtttatatgttagtcggataataactacatattagttgaaaagaatatatacatataaattttttgttcaaatgttgttcaaaatttatacataagtatacattaacaaacaaaactatacatggtatttatactattagtatatatccatctagtgcctagtgtacattatataagcaacacataaaaaatgatcatgaggaaataaaattaaaataaaagagagattaaattaaaaatataacttatagaacttataacaacatatggttttaggttgtagaaatataagatttacggtcacaagattttttttttttctaaaactaattcacaacaatttggtcttcacaaaaacaattatggttgtaaaagattacattccaactaatcaaacactataagagactatcctcaaactagaaacgcagaggtctaaacccaaaaacaaaacaaaaagcaatgacttagataaactttgttggatatgggcttcgccccatttaacattcggaggcccaaacaaagagtcattgaaaacctcagttaagaatgatgaagaccagcccccctgagaaagccgcagcccattgcgagatgaggcccattttctggaaaggatcagccgccatagaagtttcatatcgctcagaaaatggtactgtgtactttcattgaagtactataaatattgacagaggaatgccagaaaaggacacctgaagtcggacgagaatagtacaagaacattctcattcggattcaaagacataagctcgacaattgacttgtgtagttttattcttgttgtatctcttaaaacgaggcttggctgtaaacatatcttgtaaacggccgaacgttaagtttagataaataagatcttccttttcgctcgctactttcttctctgtttttgaggtttagttttgagtaccaacggacttcgatatcaaacgttttaaagtttaaacctatttgatttacattatttggtttaaataaattgattcagacttcacacgaccaagaaaaaaaaatggttgaattgggttctcatctattgggctttaacaacaaacactattagtaagatgggctggccagttgtgtaaactgtttcatattggtaaatcaatatgataccaattaagtttatttaattcttctttaacttccgtacaactatcacgaagcttcctttatagcatcaacgtgtcaatatatgattcgctaggtgacatctctcgttcagacatcctcaccttttgactcatataacccctatttccgtaactattttactgcaatacttcaggggtaaaataggtatttacattctgttttgccttttacgcgtaacgaacgtggttttgtgttttatgactttctgggaaacagtggtacgcctatccacgcgccactttttcatctctttgtctttgatatctctcttgtctgaccaaatcgtgtcacatctccttcttctccactttaccaaatcgtgtcaaattttagggttttttcttttcgtacttcatcaaattctggaatctggttttttcttagttttcttctatatacctttgaatcgcatctttgatccaaattcattttagatatcaccttgaagtcgaatttgtgattttttcttttcctctcgaattctcaaagtctcacgcaactatgaaagaagacatg

SEQ ID NO: 1098 - DNA, 3000 bp, Unknown
  misc_feature (1)..( 3000): cDNA_ID_2130683_gDNA_ID_1620359_Annot_ID_154578 3000 nt of promoter + ATG
agcaagcgagtgagagaagacaatttactgatacaaatattcttatctcatatgatcttttccttgtccggtagaagacaatttctttgttgcctctttttctttgtccggatagtcccactggcgatattttattttttttgggtgatttttctattgtggtcccatccctgtatataagttatgattttcatgcaaacaaaattttaagaaaatagtgtagtcgtgcaacagttcgagggtcattcacctatttgtattttagtaaagtgtgaaaattatataaattcttagttttagaatttatatttatataagcaaatctatttgtgttttaatcatatttttaatatggaagatgtaagcttttgttaagctttataagttaactactaaaagcaaaacgagttaattaatgcaaataacaccatgataatataaaaatgtttaaaattttacttagaccaagtaaacggtcaataaactaatttgaaaagggaccaagaaaatctatgtatatttggtagatttgatatacctaaggtcaagtagaatttgggagtgaatgggtaaattttttcaaagggagaaaaaaggagagatttgggaattttcaacattagagcccacaagaaataagattatttttaatcaaatggttttttctcgaagaaaaatatatttaacctaagaaaaatgattcaaaaaaaaaaatcaaatttggggaatcagaatggtaaacaaaaaaaagcatcttcaatcaaagaaacatttattgtactatactagttacttttcggtcaaaaaaatatcttcctctttttttttttttagcagcaaagaaatatcttaaagaaccatatcctttgatcaaaaaaaaaaaaaaaaaaaaagaaccatatccttatctcatgtgagttttttttgttttttttttgtcaaagaatctcatgtgagtttctttgtccgtgtgaggcaatttccttgtcaacactcaggagtttcattttttctgtgtatcttctattggatgaagcatgtttaatgatcattcaagctctgattcaagacacatgatgtaaaattgtttttttttggacagatataaaaagtcttcattaaaagaaatattttcagtattaaaaatttaaaatgtgccgtcaacccagcataatagagattgactaatgactattctactggacgaccttgcatggaaagtgggagacttgtgcccacaattatctatatccaaaatgattacttattattgactgtctattgtaccttttttgacgaccgtgtatactgtatatgcatcaatattaacgctgctaagatacgatttacatggaactcttatgtatcgattggcatcaatatttacccatggaaacgagaaacataatgacttacagttagcttaattttgattaaagtcttcaagtccttcgaaatttctaaatcattatggcaaaaaaaaatgtagaaatttaaaatatggtagtttgtaaaacaaatcttagctagtgaccaatcataaattcaaataaaatagtttggacaattttatcatatgatttaaacacgcaatttcattttaattccactttactatttagcatatcaaatgattaaaaaaattaaaattaaaatggcgtctttaatttaaacctttttttttgttttttagctatctgtcatttactaacagaaacttaccaaattcccatttaatcataagaaactacaattgacccaatgaccatgtaatgcatagatggtcacaggaaaatgagtataatagacttaagactgacgtcctcttttacacatcatctttacctgttctttctcttttttttttttgattctcctatatgtttaaaacgtttatcctttattttatcctgaactcgatgtcaaataaaatattttagctttgatctttttatataaattgaattatctccacgattctactaaataatatatttttctttttgcatatattttggttaattttgcaatatttggtttagctttttgaatatattttcgtttatttttttagaacgaacacacaaaaattttgagtgagaatacatccttctattacaaattaaaacatctgaatgatatctattttaatcattaacataacatgttagtctattaagaaaccatagaataaaacgatatcattttaaagttacccacataacattttattttaaacaacaatgaatagataatatttttttgttagtggtaattagaacataacatttcatcacacgttttattatgttgaatagatgtgttctcatttaagattgcaaatataatgtgttttaatgaatgttttggccactagtgactttgaacttagttaactctatttattatctattattttgatctcttaacaagtgaactatttatatatatgattcagtttctgttcttatgtaattatttaatcttcattcttttaactttttcaactagtaataaacttcaagaatattgttttgttgacaaatctcgtacacgttttctaatacacgcgaccgagacattttgaaacacacaccttggtaagtcttctaaaataagcttttcctcttattgatgttgcgtaataaaatatatcaaaatacttgttctgtgtttacgtagttggcgcgatatgctgcaatagtgttttcttaaaaagcaccaacacaaaatggaaataaccgtttgaatcattccacttgaacttcatttagtcgttaaaaggcaacccagttcagtcaagaaatgattatttaattgctaacaaaaaaatactattttaaagattcaataggacgcgtgtgccctagctacctctttctctatataagagaaaatggatgcattaacatttctcaaattcctctaaacatcttcagtctctctcaaataaaagcaaaactaagaatttgttataactaattaacgtcaaggaatatg

SEQ ID NO: 1099 - DNA, 3000 bp, Unknown
  misc_feature (1)..( 3000): cDNA_ID_3060670_gDNA_ID_1620359_Annot_ID_154589 3000 nt of promoter + ATG
acatgtcaattattattacttaaagttcattttatagcaggtataccaaaaagttaagtccaaattcgcagttttagaggaattttttactacaagtaaagtgataatatcatcagttttaccaaacgatggagaccaattttagtttgtagcataatatagaaagtataaactaatttagagatggacacaaggtaaaatacaagtgattcatttttcagctgttgtgtatgaaaaattgttttatatgttacttttattcgttcgaaacggatattcaacattttacattaaaaaaaatttcgttgcaggttattatgaaaaaaatacatttctattgtaccgttttaatatttttataacaaacactaaaaatatcatttacctctgtaacaaaaaaaaaatcatttgcctgaaaaattcttcaatttcattacctaatccactccaaacaattacatagtaaaaatgagatttttgttatttacgaatactttcattcttataagcaatacagtggatatactaaatttaaaattttgtaactctttaagacttattaaaaattattgccaaactcaccaagaaatatggaaataaatgtacttttttgttaaatcatatttggataaaagatggactcatagatacgcacaaaaatgtatacattcagcatattgtgtaagctgagtcagctccaggtgtttgggcacatgtaaacatggacccgacctttttacctctttttctgttataagtttttaaaataaaattagattacttcacaaagactataaaaaggattataattccaaaaacaaaacaaaattataaaagtaaaaaagatatagttaactagaaagttaccaaacatggattataaaccggtcaactacgtacattaagaatctgagtgaattctctgaacactttcatctatcattttcttatagctaattttgtcttagtggcgaaccgtaaatgcctctaaaggttcactttaatttctaaatagttcttccaactatcgagcttatttgttttatactttatatgatagttgtaatatgtcataatgtctgagttgcgatatatcaaatagggcacgacggataagaacacacattgatggtgatatcaaccagaaatatatgatatacgtgttgtctataaaacgcccctaatttattcattaacttcacataatcacgtaaactaacattagtcgcataatcgagtaacaaacatctactggtctacaagagttgtcttaagtcttgactgccaaacaaaatgaaattattctctcatttgtccaaatttaatctaaagcatcccacgtgatttctactttttccaccatgccaaggggtttttacaaacactttaatctacccaaatatatttttaatagttttcattttattgggcaccccatgttgcatctatccccaaaaattgcttttgaagaaatgtgaatactatttttctatttttatgaaaatatagaacacattgtttagtgagttttctactgattagattgttcttagtatcgagaatacaagtaaccgaaacttgtggttaaaggattttgatgcctctgctaaaaggagataaatcaaatctaccaaatccgctttaacgaacaaagagaaactaatctaatggtttcatacaatgtatgcaactatagtttgatttgtcttttctaaccacttcgaactatagaaattacttgcaatgagaaataaatagtatactttctgaactattttttttttttcgattacattacacactacaaacaaaatagtttgtgtgtgaaatttagcttttaactttgtaatgtattacttataaaacataaaaataaaacctcttcgtattgtaaatgataagtattttcttagtaaataaattatttagctgacaacataatgttgggtagagatgatgacacgtcatcttatcatctttttctcgaactaacattgggttagaagttatattaaaattaagaataggaaagattaaattactatagaaaattaaggaggaacaatataaatgtaaccaataaagtcggtgagtatgatgcaaagtattgtccttttcgatgccaaaaattattttctcatggtacgttccttttatttatacatagttttccgcgttatcatgaatatacgtttctcccatgaaaaaaaaaatatacatatcagaagggagtaatccacataacatgaaaagaaaaggaacaagctaagtggtaggaatttgcaagtaataaattgttttcttagaatattgtaatacatatgtggtttttatatcaaacttagaatttgatttctcatgttgaggtgtgaaaaactaaattatcatgcaaaaacttgtagattttgaatacagtaaaagatcacatatcttacaactaaaattaacaagattaaatttcatattttggaagcctaactgaaaaaaactgactcaacaaaacgaacaacatccggacataactaatacgatgcccattatacaatcattcaaggtacatgatcaaagcacacccacattctatgcctataaaacctaccgacctcggaccatcttgttccgggccctcttcaaaaaatagtaaattgcaaaagaaagaaaatcgaaaaggttgtttgtaaaataattacaaaacataattagtggtgagaataaatctaaatataaggtacaagggggtgaaggggtgtgtgtctatatatgttggatgattagtttctgccatgtgctatggaatcaacctcttatgctttatgttctgtttagctcctaccttatactataactttaattattcatcaataattctaattctccttcgttttttaatatactagtgtttcatataaatactcgctctctctactcattccctccataacatatatttcttcttcgtttcattcataatcgtcttataaccacagattctaaaacatg

SEQ ID NO: 1100 - DNA, 3000 bp, Unknown
  misc_feature (1)..( 3000): cDNA_ID_2130689_gDNA_ID_1620359_Annot_ID_154580 3000 nt of promoter + ATG
gttgggctttggcccaattggtttacctggtagtcagaaatgcaggcggcctgactaccccctggcattagtcggaaagcatccaaactcgggacagacagtgtggtggtccttcgggaagaagtctactctgaagtacttcggtgcgtttctaccggagctgaccggatcagccgatagggtttatcaaaaaaaaaaaaaaaaaaaaaaaacaaacaaacttatctggactggttggatacggttgcacatcttaccttggcaaattatcctcttctagatatcattctcatccgtatgtgtttctaaaccatcatatatttcgtacgtaaggaaaggaatacttgaaggcagctgcagagagaaaaaaaagaaaaaaaaaaaaaaaaaaaggcaccacagggctggcttgacttgggccagctagtccaaacatacacgaaggcttcgtcgctagttcgggatgataaactgcaagtaattaattgtttttttttaattgtaacatattgtaattaacaaatataccaaattacaattacattatggcacatctgactagatgaaatgaataatattctcttttctcttcttgttgagtatataagatttatagtgcgccaactcaactggtggtgtttttagagaaatacaacaagttgaataaaagattactattttacactataactcgtcgaaattgttgtcccaaaaaaaaaaaaaaaaaaaaaaactcgtcgaaaaagaattatgttcattatgctaaaaaaagagataaaaagaaatgttcatctactataaattggagagaaatgaatatattggaaaagtttcttctagtttccacctcacattcaataaattttcattgatcttcatttagttttttttttttttcatgtttaccatttccctttatgattaagttctaacatgttttatgtttaaaataaataaaaaaaacaatttttaacatatgtttcgttcctatcatgtttaacgtgttaatcttgtttaacataatgaccaaaagtaatttaaatatttatgaactgtagcatgaagataagaacacaaattttcccaaaaacgcagtaaaaatttgaaaatattaaatgatcaaacgaaagaaaaagcgtgaataatctatgttctgtcaataattgagataaaatattttagcaaaagcataactaagataatacaagaacatgctacatcttatgttgtcgggcgggaatctagggtttcataagaaataaatgaggaatactatttatttttttcaaaacgtattcaaatcattagtaatcaccaatcttgaaaaatacagtcaaaattgaacatcgtcgtgatttattttttaagagtgatgtttttatatgattgtgtagggttttaaatatgtgcgttggttagaataaacagtccaagattaggcatcaactgtttttttaataggcatcaactgtttcaccataacatgttaagattacgattttagattaaaacaaaaaaggaatctggttttgatttttagtttactgagttctgcatattgcgtttcaaaagagttaaattgtgtggatagtaagatgatccatgatattaatattaattataaaaaaatattcatatttatttctaaatatagatattttgaatttttatatccaattaactaacttttgaaaactgactcgatagaaacaattatatttaataaatttgaaagcattttttttttacagaactaaaaaaaaacgcggtcataagacatgttatgttaatactcgtggtccttaccaaacaaaaaatactcgtggtttgatgaccttgatacgtggcaaacagcaaaatatatgcgttgtgggaaaattagagcggactaacccaattaacacttaattattaaagagaaaattttgtttttttttgttttttgaaaatacagtacttattcatgttttcaaaataatatacttaagacctaattattgtatattaattcttattcttatttttttcatttggatagtttagaaactatagaagaataaaaataataatcaaaataaaaaaataatatgccttatctaatttattatgaagatccttaacaaattttgttttaaatccaaactagccaaactggacgaaacaaagtttgattggatcggttaaagttctgtttagtaatataaatcgttcgattgaaaagtaaaaatagtttggttattcgttcagcttagatttaaaccaaaagtcgaatgcaaactattagtgttttcttaaactaaaccctaagtctagattttttctccaaatagcctccttccttgctcgatcttcttaatcccatcacatatattttggttttgatctcttcatataattagttgatttatttccacgatcctacattcctactaaacaaaaagtattgctttgaacattttgaaaatgtaaaatggtagagtaatagatatgtgattattagtgaaaacacgttttatttgaatgaccgggaacctttcaaacaaaccccattggtgagtctttagaaattctactttcgtcttgattgaagttgtgtgtatgttaaataatatatttgaaaacacttgatttatgttaaattacggacttaaacgtgatatgttgtaattggtcttattttataacgcgatgggaataaaccgtttgaataattccagtctaagtttgtttagtcacgagactcacgactatcatccaattatttaaacaaaagtcatcaaaaggcaaccggttcagtcaaaattaggattacttaataattaacaaaaactatgcgcaagattccattggtacgcgtgtgccctagctatgtctctctatataagaggaaatggatgcattaaaatttctcacaatcctctaaacaccttcactctttcagtctcaaataaacgtacaatctataaataaaattttaaagaagtaacgaccaagaaaatg

SEQ ID NO: 1101 - DNA, 3 bp, Unknown
  misc_feature (1)..( 3): cDNA_ID_2130592_gDNA_ID_1620360_Annot_ID_154613 3000 nt of promoter + ATG
gat

SEQ ID NO: 1102 - DNA, 3000 bp, Unknown
  misc_feature (1)..( 3000): cDNA_ID_3060687_gDNA_ID_1620360_Annot_ID_154623 3000 nt of promoter + ATG
gtagcgaaagtcgctcctgaaagcgctataaagtttgctgcttatgaaatgctgaaaccaataattgggggagcggatggtgacattggtacaagcgggaggcttttggctggtggattggctggtgcagtggctcaaacagctatttatcctatggatctcgtgaagactcggttacagacttttgtgagtgaagttgggacaccaaagctgtggaaactcacaaaggatatttggattcaagaaggaccccgagctttttacaggggtctttgtccttctctaattgggattatcccttacgcaggaattgaccttgctgcttacgaaactcttaaagacttatcaagggcacattttcttcatgacactgcgggttagttacttatcgtgccttgaaagttcttgatatttctcatgatactaaaccgtatatgatgtgcagagccaggtcctttgatacaactgggatgtggaatgacttctggagctcttggagcatcgtgtgtttacccattacaggtcataagaacaaggtaaaaactcacaatctttagctttttgagtttatctatttcttcgttttggtttgaaactgagtttagtcatttatcatcagaatgcaagctgatagctcaaaaacaagcatgggccaagagtttctgaaaacgctaagaggcgaaggtctaaaaggtttttacagaggaatcttccccaacttcttcaaagtcattccttccgcaagcatttcgtaccttgtctacgaagctatgaagaaaaatcttgcccttgattaaaaaaagcaagaaacctaatgttgtgttcacagagagatacagtgaaaactccttgatggtgacgacaaaaaaaaaacttgagctttccgttttcctttttttggattcggtaaaggtcattcgagtgtagaaaatgtaacttgatctgattgattcttgattcttctttagtagtttggtgagtccataaacactcatttcttaagaaaatagtttttatgctaaatcgttcgtttccctttaaaagagaaaactttagaggatctggtgaagctctttgatcaactgaatgataaattatagtagttgttcatatctcttgaagctgtgtagaacccttaaacatctgcatcagtttcatgcccaattcatcacttccggcagaatctctaatgatttcaaacaaaactctgttttcgccaatgtcctcttcgccatcacctctatttcaccgtctgcgtcggcgtcgaaggaggtcgtgagctacgcgacttcagttttcagattcatcacaaacccttcaacgttttgtttcaatacgatcattaggatttgtacgcttcatgagccgtcgtctctgtcttctaaacgtttcttcgtcgagatgcgacgtcgctctgttcctccagatttccacactttccctttcgtattcaaggcttgtgcagcaaagaagaatggtgatcttacattagtcaagactctgcattgtcaagctttgagattcggattgttatctgatttgttcactttgaacactctgattcgtgtttactcattgattgctccaatcgatagtgccttgcaactgttcgacgaaaatcctcaaagagatgttgttacctacaatgtgttgatcgacgggttagtgaaggcacgtgagattgttcgtgcaagagagttgtttgattcaatgcccttacgtgatttggtttcgtggaatagtctcatttctggttatgcgcagatgaatcattgcagagaagcaatcaaactcttcgacgagatggttgctttgggtctaaaacccgataatgtcgccattgtttcaactctttcagcttgtgcacaatcaggggattggcaaaaagggaaagctattcatgattacacgaaaaggaagagacttttcattgattccttcttagctactggattggtggatttctatgcaaaatgtggtttcatcgatacagcgatggagatcttcgaattatgttcagataaaactttattcacatggaatgcaatgatcactggtcttgcaatgcacggtaacggtgagctaacggttgattacttccgtaagatggttagttctggaatcaaaccagacggagtaaccttcataagtgttttagtgggttgcagccattctggtctagttgatgaagccaggaacctttttgaccaaatgagatctttgtatgatgttaatagagagatgaagcattacgggtgtatggcggatttgcttggaagagcaggattgatcgaagaagcagcggaaatgatcgagcaaatgcctaaagatggaggaaacagagagaaactcttagcatggagcggtttgttaggcggatgcagaatccacgggaacatagagatcgcggagaaagccgcaaatcgagtcaaggcgttgagtcccgaagatggaggagtgtataaagttatggtggaaatgtatgcaaacgcagagagatgggaggaagtagttaaggttagagaaataatagacagagacaagaaagtgaagaagaatgttggatttagtaaagttttgtcatagtttggatttaattaaaattaataaactatgattactaatgtaacaatcattaagagtaaggacttaaaaactttaatggcccaggcccaataactatgctcaactagctgttaaatgtgtacgtacgtatatagcaaaataacagtgcacgtagaagagctcgcttttgaatgacgtggcctgttatgattggttagcttcgcgtggcgagagatttgattggtggaaacaacaaaatgacacactcgaccgggtctacgggattgaatatataatttattcagagaaaccgaaaaatacatatcactctttctccttcacgagggatttttgttccgatctacttctccggcttatcaccgatttagatctaagcctgaggtttccttttgcattttagagattccgagaatg

SEQ ID NO: 1103 - DNA, 3000 bp, Unknown
  misc_feature (1)..( 3000): cDNA_ID_2130642_gDNA_ID_1620360_Annot_ID_154625 3000 nt of promoter + ATG
tctcacgagaaagacaagtaaaagaaaaattattgttctcctttcgttttctgttttcaaccattcaagtgagagagagaactgacatagaaaagggcaaaacggtcaattaacaacgttgggcgaaaaaaagtataagatcaaagaaaaaaatccgacctgccggaatcgaaccagcgacctaaagattatctgcaaacattacagtcttccgctctaccaactgagctaaggtcggttgttaattgcaattaaaaattaattatatttaaattataaactcctagttttgtggcaaatctgacgcgtatcatgactacaaccattcacttaccaattacaattgattttgtaaacctttgactaaaactatggcactaaacgaagacgacacaatctattccaacgtttacaaacattcaacaaccctcagaagttgatctcacgtctctctgcgaagaattttccggttactgcctcttcggaaaggaccaggctaagccaaactccagtatcagctgcatcttcaggtggcatatttccggcgtagccagtcatcgcagtcttcacccaaccagggcaaaagctgttaacataaatcttctcttcctctcctcgtctctcaagttcttttgccattagtctcgtgtaagcattgactgcaagcttagacatggagtagtcagtgaatgtctgaggccacccgcctgattcccaagttccgtcttttacttggttgatgaatttagagacagttctgtctataagttcctcggtcagcaaatctggactgcttagctgatctctcaactctacatttgccagtctctgcaattcatgaatttcaacgagattttcttttttcaaaaaaaatcaaagatatgagtgaaagagtttcttacattacgtcttccatttactctacctagccgagaactaacattgactacacgagcgccatgaggagatggtctcatcaagggtatcatagcttttgtcatgtttttggttccttggtagttagtagatataactgtttcagcaaattcaaccgtattatctgagccgagattgtagttaacacctgcattattcacctgaaaaacatagcaacacaaatgcatgtaattcaaatctaagaaaacattagaactatcctccaagattacgaatcgataaggatcttacgagaatatctaaacctccaaatgtttgcttaagccagcaaccaaactctctaatcgacgaagagtctgtgacatcaagttgatgaaaataaaccttgagaccttcttcttggtgcctcaaagatttaactgcttcaagaccagcattcacgtttctagctgtaagaacaaccgtcaatccgtgaaccgcaagctgtcttgcaatctcgaatccaatcccgcggtttgaaccagtcactactgctacattttcacaagaccaccacctaaaaaatcatttgacgcctaatgacaagtcaaattcaaaaagagggcttgagagacacatacttcatcattttcaatttctctaaattcttttggtttagtgaaacacaaatctgtaagtaccaacaacaataccaattcagtctccaactcccaaatagagaaaaatagaaactcatcaaacactgtaagcgacactaagaaatggatttaagcaagtgaaattagagattaacacatcgaatgctgtgaaattgagaatctcgcagagtaaatgatgatagatcttaggatacaaagaagccgaaacaattggacaaattaggtctcttcatacctatggtggtcagagtaaggaatagttcgaaggagagagatctcctgcattcttttctcccttctctctcgagctttctccttgttcgtcatcgtcttcttcgctcgcgtcgcgtgtttgggtgtaccgtttatcttactcctgaatcaaattcgttgtacattagccatcagctctaaggaattaataaatgagaccttcaactttaataaaaaccacataatggcccaaaccttatactcttaactattcaatccaccagacaccagtaacgcttggcagtcaaatctttattgagtgggttcatactctaaaccgtttactgaaatttaattcaactaaacaaaccaatgatttttcatacaccattaattacaaaaactacaagatgaaaaacttttcacgatatttgttcgaaaatctaaaccaatgattttttccctcaatcttcgtttatagtttaatttatggtcgtctatctacttttgtttgttttatttgtcgtcggttgtctaatatccatccattctcacataaatgtttagtggtactatgataacctaacatgattgtgtgagataaaatagaagaggacaatactagcgggtttgtgacgagagcggtgacgtcactggtttacacgtgtcacgtactaacgattctcgcgtccatacgtctctgcgttcatgggctattgataagtattaaatagacaactcccgaatttgttttgttactcatcacaatagcgggaaactcatccggcttctggaaatttccgtttatccgattcgttctcacgtaaatcactctctctctctcgctctctcgctctctctgtatcgtctctgtttgatttcgcaattgaattctgggtttaggaatctcttattgtatttaatttgacaatcaaattttgggttttttaaataccaaactagaaagtgagattacgaaagattgttccatagtggatacgttcgtctttcaaaaggtaagtcaaactttttttttttgggcaaaggaattttgaataagcagcacaagtactaaaatcttctgattaaaattaggtttcaagtggttatcctctattgttcatagtttgagctaggtttagagtttgtgatatcttatccatgtttatgaatttgattagctgaatcaatctctttccttttatatatgatcatgaaacaggagatgatg

SEQ ID NO: 1104 - DNA, 3000 bp, Unknown
  misc_feature (1)..( 3000): cDNA_ID_3060718_gDNA_ID_1620360_Annot_ID_154630 3000 nt of promoter + ATG
gaaagataatgctcatcaaagtaaaaagttcaaaaacaagatatagaatcggcttattcaggcatgaatattgtcatatacaatttacaaatcagatgcatcttgatttacattttccccaggttcaacaagtgaaaacgaaacccctagtcttcattcgactagcaaactagctgatgactacacaagataactacggcaaatccctagaactaagctgcatcatccaagtaaaattatgaaacctgagaattcacaaaatccatagattaaccttctctgcatagactgatagatagaactcacctgaaattcgctcagttggttgactccgactcagacggaaagcagaaatcgaggagaatgtgttacatagaaggaagatcaaaacgcagctcgataacttcatttttctctctcagaaattttggttcctccctaaaaactcttcaaaatcccagatcatataaagtatataaagatcaactagaacagctgaaatgtcagaagaagtagttgctaaaaccggaaccccgagattgagacttcaaaaccggaacaaaatttacaaaattcgctaccgattgttagatctcactcacgcccagcgttgacagcgagagcccagcgattttcatttgaagatgcgaagaaagcaagaagaaagttgaagaagattcgtctatggcctatacgacgtcgtttgaaagggatccatttttcgcaaaggaaagtcgttggggacttgaacattccacgtcagcctcttttccactttaaaaaataacaatgtaatgggctgaccgagaagatataaacgcagcccattatttaatgggcaaaagtgttttctttttgggttaaagtgtgattccgttcttgtgaacctagttgtaaacttttgtaactgcaaagtgtagttcggtcttgtttatccggtatattgaattttgaaacagtaataaatagctgaattaagtcacttttgagttgtttttctttaatgtgaaaatgatactgagaaaatagggtagtaataggaggctttagaacagattattcagtcttttcaagattctaaaactccaacagttaaataacagtggtgaaaacagtatcaagagtacgagccgctactcgcaatgatgaagatgatgatatataatagtaatgaatttatatgttgtaaacttgtaatgttaaagattaataataaactaaatgagagaaaggacaaagaaaaggtaagaggaaactgagggagtgagacagtcaaaataaaacagactgagagcattaagaatgccagtctctcagaacttcgatttgacctgtcgtttcctcattggctacctttccaacattaaagttttttatcggctcaattccaatgttataattttttatatattttcacatcattcttttttttcactgtttagtcacaaagtttacgtaacccatatgtccaatcccacactttaatttgtatttttagttccaacatataaaaataacaaaataaccattgcttttttccccactttaatttgtaagttctttctgttatttaataaatttgacattaccaaaaaaaaaatttttagatgggtgaatatatatagaaatgtaacttatcaaattgattcggttttctgattttcttaacgactaaaaaaaatatatgtgtactagggcaataggggtaattacaaatcagggagatgacaacacgtaagagatagttgaagagattagaccgaaacacacctgacctcctctccttctggagttttcacactgcatttatcaattaatgtttcctaaaacgcagatagataaaggtttcatttattagcttatgtttatttaaagcaaaagaacaacttgtggctatatatagtagattaacaatctcagactcagagtgctgatatttcttatcatacaaaatttatcttcccctaacaatacttccaaagcttatttagatagacatatatggaattatggataatggattcccttaagttatatgaatcataggggaatataattttagtaacttatcgggcttctgcaaagattgtgcatggtaccatgcgtccatgccaatacagttaaagtttacataatacaaatttttacgtatttctatatatcatatatgacttacagattatcatagcttaatatagccagtattgccaactttccattcgtacctagaacttataagaagattggaaaggatattaaaattgaaaaagacgtaggttggccatgtatcttaagatagttaaacgatatcagcaatctatcaataatcaatctatcgtaacaaatatttttgtcataaatgtatttgtagatttttttttttatacttttagatggttaaatgttcaagaaatctaaccaaatggtggaatggttccgtttgatcgtgctctcatggtacaaacaatgagaccccccaaaaaaaaaaaacccccgaggatgaaattaaaacaaataacacagcttgaacaaaacatcaaaaacagaggatcatcacagtaaatattaatacttgaacaaaacatcaaaaagataggatcatcacagtaaatattaatatgcataaagaagagaatcaccacagtgaaaaccctaatcattttatattcctacgtgtcaaattatgaatggtcataatcagagtagagaaaaagaatgtcgatgaaagaaaaagtttgacttgttaagtcccaactgtcaatttcccagcaagacacatatcttcttttacatcacattacatctacacataaatgctttattgcaaaaatagcgatataaaaaaagaatatacaaaaacctagtatttattttctagattctttactgttgtatatatagaagttgctcgagtggtcatttttacaataaagcaatctgctcaaaagagtaaagaaagagagaaaaagagagtgatagagagagagagaaaaatagatt

SEQ ID NO: 1105 - DNA, 3000 bp, Unknown
  misc_feature (1)..( 3000): cDNA_ID_3060726_gDNA_ID_1620360_Annot_ID_154628 3000 nt of promoter + ATG
cggagagtagcaaatgacggcgtctagaagattcctcttcctcctcttcttgcaatcgtctccgttcagctctaacggcagctttgataccgtaccgttcaccaacaagaagctcccaacgaaagatatgagagagactattcatcatctcttcaagctcctcgtccttcatacccacaagcgtgctcgccgtaaaacctaactccgctatcttcgccgccgtgtagaaacgtataccgtacggaccgaatagtccctctaaaccaccaagtcgcatcccaaaagcagccgtctgcggtgtcaccggctgttgctgcagcggaggtggaaccggaggtggtgcttgaaccaatgctctcgttgggttccaccggaataagccactcgtgaaaccttcaggatccataatctatttttctctctctctctatcactctctttttctctctttctttactcttttgagcagattgctttattgtaaaaatgaccactcgagcaacttctatatatacaacagtaaagaatctagaaaataaatactaggtttttgtatattctttttttatatcgctatttttgcaataaagcatttatgtgtagatgtaatgtgatgtaaaagaagatatgtgtcttgctgggaaattgacagttgggacttaacaagtcaaactttttctttcatcgacattctttttctctactctgattatgaccattcataatttgacacgtaggaatataaaatgattagggttttcactgtggtgattctcttctttatgcatattaatatttactgtgatgatcctatctttttgatgttttgttcaagtattaatatttactgtgatgatcctctgtttttgatgttttgttcaagctgtgttatttgttttaatttcatcctcgggggttttttttttttggggggtctcattgtttgtaccatgagagcacgatcaaacggaaccattccaccatttggttagatttcttgaacatttaaccatctaaaagtataaaaaaaaaaatctacaaatacatttatgacaaaaatatttgttacgatagattgattattgatagattgctgatatcgtttaactatcttaagatacatggccaacctacgtctttttcaattttaatatcctttccaatcttcttataagttctaggtacgaatggaaagttggcaatactggctatattaagctatgataatctgtaagtcatatatgatatatagaaatacgtaaaaatttgtattatgtaaactttaactgtattggcatggacgcatggtaccatgcacaatctttgcagaagcccgataagttactaaaattatattcccctatgattcatataacttaagggaatccattatccataattccatatatgtctatctaaataagctttggaagtattgttaggggaagataaattttgtatgataagaaatatcagcactctgagtctgagattgttaatctactatatatagccacaagttgttcttttgctttaaataaacataagctaataaatgaaacctttatctatctgcgttttaggaaacattaattgataaatgcagtgtgaaaactccagaaggagaggaggtcaggtgtgtttcggtctaatctcttcaactatctcttacgtgttgtcatctccctgatttgtaattacccctattgccctagtacacatatattttttttagtcgttaagaaaatcagaaaaccgaatcaatttgataagttacatttctatatatattcacccatctaaaaattttttttttggtaatgtcaaatttattaaataacagaaagaacttacaaattaaagtggggaaaaaagcaatggttattttgttatttttatatgttggaactaaaaatacaaattaaagtgtgggattggacatatgggttacgtaaactttgtgactaaacagtgaaaaaaaagaatgatgtgaaaatatataaaaaattataacattggaattgagccgataaaaaactttaatgttggaaaggtagccaatgaggaaacgacaggtcaaatcgaagttctgagagactggcattcttaatgctctcagtctgttttattttgactgtctcactccctcagtttcctcttaccttttctttgtcctttctctcatttagtttattattaatctttaacattacaagtttacaacatataaattcattactattatatatcatcatcttcatcattgcgagtagcggctcgtactcttgatactgttttcaccactgttatttaactgttggagttttagaatcttgaaaagactgaataatctgttctaaagcctcctattactaccctattttctcagtatcattttcacattaaagaaaaacaactcaaaagtgacttaattcagctatttattactgtttcaaaattcaatataccggataaacaagaccgaactacactttgcagttacaaaagtttacaactaggttcacaagaacggaatcacactttaacccaaaaagaaaacacttttgcccattaaataatgggctgcgtttatatcttctcggtcagcccattacattgttattttttaaagtggaaaagaggctgacgtggaatgttcaagtccccaacgactttcctttgcgaaaaatggatccctttcaaacgacgtcgtataggccatagacgaatcttcttcaactttcttcttgctttcttcgcatcttcaaatgaaaatcgctgggctctcgctgtcaacgctgggcgtgagtgagatctaacaatcggtagcgaattttgtaaattttgttccggttttgaagtctcaatctcggggttccggttttagcaactacttcttctgacatttcagctgttctagttgatctttatatactttatatgatctgggattttgaagagtttttagggaggaaccaaaatttctgagagagaaaaatg

SEQ ID NO: 1106 - DNA, 3000 bp, Unknown
  misc_feature (1)..( 3000): cDNA_ID_3060734_gDNA_ID_1620360_Annot_ID_154624 3000 nt of promoter + ATG
ttgataagtattaaatagacaactcccgaatttgttttgttactcatcacaatagcgggaaactcatccggcttctggaaatttccgtttatccgattcgttctcacgtaaatcactctctctctctcgctctctcgctctctctgtatcgtctctgtttgatttcgcaattgaattctgggtttaggaatctcttattgtatttaatttgacaatcaaattttgggttttttaaataccaaactagaaagtgagattacgaaagattgttccatagtggatacgttcgtctttcaaaaggtaagtcaaactttttttttttgggcaaaggaattttgaataagcagcacaagtactaaaatcttctgattaaaattaggtttcaagtggttatcctctattgttcatagtttgagctaggtttagagtttgtgatatcttatccatgtttatgaatttgattagctgaatcaatctctttccttttatatatgatcatgaaacaggagatgatggctcgttaccacaggagatcgatgatcttgtgcttagttctgctctcattaagcatatcgccgagccaaggcttcctagggacagaggaaaagatcaaatccgctgtcttttactcaccaaaacttgtgatgaatccaggatcagttgcaaatccttacttattcgacatcgatttcccaagaggtcatatcggcctcaaagctttcgatgctgaagtggttgacgaagcgggcaaacccgttcctctacacgagacctatctccaccattggattgtcgagccatactatgtacgtaaaggttccaagcttccacagagagaaatgttcaggaatcatggattttccagggaagatcctgaaagcaatcttgattccaagtcagatattattcttgtgaaaaatggagggttgtgcaggagtttaacactcagacatttctttggtttaggatcagaaacccgcgaaacctcgacgtatgttcctgatccctacgctattgaaatcggtaatcctgaggaaacacctgatggttatgaattcaaatggcttcttaacattcacgcgatagacaccagaggtgtggaagataagaaaggatgcatagaatgtttgtgtgatctgtataatgttaccattgatgagtatggtcgagctataaggcctggatacaaaggaggtttatactgctgctatgataagactcaatgtcgggtgaaaagcggatttgacaatggggagaaaacaagaactctgtatttgaagtataccgtgagatgggttgattgggacagctcggttttgcccgctaaggtttatattttcgatgttacagattcttgggaaagatcaaaaggagatagccaagaacatatttgccatgtcagtaagaactttcatatctgcttaatgccgttacttctacttcattctctaataattttccgggtctttgtgattttcaggtggaatacgaggtgaaaccgtgcaaaaccaatggcgatggatgcgttgacgttaagaaaaagagcttagtgatgccatttgatgggtatattgtctacggggtagctcaccagcacgctggtggtatcggtggtgctctataccgagaggtaactaagagactgatttagtttaggctactgcaaaacgaaaagattgaaactttgttattgaattgagactcttgttgtgttgtggatcagaacggtgaagggatatgcgcttcaatgccgaagtatggcaatggagatgaacctggaaacgaagctggttacattgttggaatgtcgtcttgttatccagctgatccagtgaaagtgagctatggagagacattgactttggaatctaattacagtaatgccgttggtcataccggagttatgggactcttttacatcctcgttgctcagcagctgccggaaccagatagctccttgcctaataaacaacattttgaggtaatcactccacccggtaccagaactcggttaaggtcaaaccggttacgatacatatacagtgtattgccatgtgattatttaactgacgttaatatctctcacttccttgtaggcacctgcgagaagcttgagctttttagccatttttgcagtgacggtagttgtggctgttgtggttttaatagccgccgtgatataccggagacagaaacgggaagatggttaccaatcacttagtacttaaaaaagagcaaaaaccatgtcgactctatatatgtcttcaaagtgaattctgtttgtatacatagaataaaagattattttgttgtcatcttcctctgatgtgatatctctgtaatagttacgtgtaagaagaacttttctttctcaaatacatcacattcacacaataaactaacattattttcgttgtcttggttccaaaccctttaatacttgcaaaattacaattttttttaatctctataacttatgaattactctacatccaaatttgtgatgtttcactgtctaaaatcatctgtatgatcaaaaattcaaaagttgatattcagttactagagttagttataaaaaaaaacttttaccgtcactgttctggttcaacccagatattgttctcgttcaaagcagctaaaccggtgaaaactgactcgttgctgtgattcactcaaactagaccggttttatttgactggtgttttttgtgtgtcatatatgtcggaaacagttttgagtggtccacgaacaataatggagactccagctgtccatggaagatttgaggcagatattttttgctcaccgacctcaaatctcagagacaaaagttttgtccaaataaatttcatttttgaattctgattttgattatttccgaaattcttttttcttccaagaatgaagggaccatagaatcgtccaaaactgttgaaacttgaaagctttccaattttgctcatctgggtttctcgattgatcgttaaccagcaatg

SEQ ID NO: 1107 - DNA, 3000 bp, Unknown
  misc_feature (1)..( 3000): cDNA_ID_3060738_gDNA_ID_1620360_Annot_ID_154622 3000 nt of promoter + ATG
tttaagtttaaccaacacatctaaaccaatttaataaaattaatatttttccaaatttcttaaatatacaagcgatgaaattgagaaaaagtaaactcgtaatttttccaccaaaaaacataaacccgtgattttcccgccaaaaacataaacccatgattttcctaccaaaaacgtaaatccataattttcccgctaaaaacgtaaactcctaattttcccacaaaaacgtaaacccgtaattttccttccaaaaacgtaaacccgtgattttcccgccaaaaacgtaaactcctaattttcccgccaaaaacgtaaacccgtaattttccttccaaaaacgtaaacccgtaattttccttccaaaaacgtaaacccgtgatttttccgccaaaaacgtaaacccatgattttcccgccaaaaacgtaaatccataattttcccgccaaaaacataaacccgtaattttccgccaaaaacgtaaacccgtgatttttccgccaaaaacgtaaacccgtgattttcccgccaaaaacgtaaatccataattttcttgccaaaaacataaacccgtaatttttcaccaaaaccgtaaatccgtgattttcccgcctaaaacgtaaacccgtgattttcccgccaaaaacgtaaatccataattttcccgccaaaaacataaacccgtaattttccgccaaaaacgtaaacccgtgattttcccgccaaaaacataaatccgtgattttcccgccagaaacgtaaactcgagattttcccgccaaaaacgtaaacccgtaattttctcgccaaaaacgtaaaaacctataatttttccgccaaaaacgtagatccgtgattttacgtacaaaaaacgtaaacccgtaaaaagtggaatccgtaaatatcttaagtttgatgataatgaattaataattattattatttattattgttttataataataattaattaaattattacttaaatgagttaacccatttaacaactcaacccataaaattaaatgagttatgggttgacccaaacccatttaacaaaatgagttgggtcaacccataactcatttaaccctatactcatttgattatgagttgagttgagttgggttacccattttgacacccctaaagatatcacaccctaaagatatcacaatctaaataaaattgagaaagaagacgtttttttgacaatatgaaaatatgagctaagtttcatcgcgtcactttttgatttataactgttgatttaatttgttatttttaccaaaaaaaaaagaaaagaggttatatggaaaatgactagtagctaatcgtattagcgttgacaacggatagtgtgatatatatatatatatagtcggacgattagctagctcataaagctaagtgacaaaactaattatcaacggtgaatgagattggtcggcaagtaggtagagcgtggacagatcaattttcagacagaattcaaagtattaatgaccaatttgatacccttgaatgaagaaccaaactaattaaaacgtgcaaggaaaaaaacgtgtatctcctcctcgtgtattcacacctcctatttaatttatcatggatttattacttatattaattgcagatatgtttttcctcaaaatcacatgcaattgtttcctcattcttcaacaaattaatattacgcttactactatttctcatttcaaacttggtcaaatttacatattcagttaagacaaaataaaattatatagttaatattttccaacaaattaaaaatatacatttatattaatatatatatatatatactattgttttggtaacgttatctagtttcctatcaaaataattttaaatgttacattaaaaatacaaaaatacatttgttacaaaatggtttgtattgctatattataagaaagaaatacatagaattgagttgttgacaaaaaaaaacatagaattgatttaatgtagcttaaaaaaagaacataacttttttaaaatttgttttcaccacataacttttttaaaaaagtttacaaaacccatatttttctaagaaagataaacaagtgtagtaaataatttaaattttttttcttcaaaataaactattttctgcgaaattaaatctaaaatatttaatggcataaagaggtaaataaatgaaaagtattagggtaaaattacatatataagtataatatccgatttctctcatgatgtccttgtttatatttcatccacctctcctctgcacaatcttcttcttctcagctctctctctctcaatctcgagatccgttctctttaaatctgtctctttctcttcaatctcattgtctttgagctcttttgttgagatcaatctcagattgaaatcaatcatcatagacaattaagttttgatttacgttttttttttaatttcttcatcagatctagtttttaccaataacggataaattcaggtatgttcatcatcgtagatctatctctgtctattgattcaaattggatgtatttagattcaatcctgatctgatcttttggctttttgcgatcgcaagttttgattggtgagaattcgtttttttctagctcgatcgaactctgtagtgtagatcgagacgaatgtagagtttcgtgattcgtttttggttatatgatgttatgttttaattgatgcatgtgagttttttttgttttttttttgtgtgtgtgttgtgattcattgatctgtgagaaaagttttctgaatcatggttgtgtttattgatttgttggagtatgaatcatagaagaaccaatgcaatcattttgaaaaggaaaacaaccttttttaaaaaactttattctcatttcgcgagtgtttttagtgattgtggtaagtgggtaacctttttgatgttaggattactattgtttgatgttttttttttcattgtttatcgtgcaggtcttagccaatcaccaac

SEQ ID NO: 1108 - DNA, 3000 bp, Unknown
  misc_feature (1)..( 3000): cDNA_ID_2130607_gDNA_ID_1620360_Annot_ID_154616 3000 nt of promoter + ATG
ccctgatgaagaaagaagatcgatagagtaggccacaatgagaatcacaaaccactccacagacatgaggtagaacagcttatccattccgctttccttgagatctttccacttcatcccgtttccccgggaggcatattgcgcgaactcatacaatccgcggaataaggaaaagccgggatacaactccaaagcaagaatccctttttctgtaacatagatatatactagttacttaagtggtcacacataaacatgtgtattcgttcttcaaggtattgattttgttaacttaccggggaatgtgggagattcaagcagttcaccaaagagaaacattcccaagagcccacttgcaaacaccaatgtataagcaacaactacaattataagccgatttttttttatcatgaagccgttgatatataacatattcgtgagatgattcaagaaatgtgatgttagtacctgttgcagtcttaacctttgagaatatggaagaagctaaaaaggcgaaggagatttgcagatttacgaagataaaatagaaaatgaactggacgctgtagtcattgagccggaagtacctgagtcctatcgctgaaccgaagatcaccaaagaaataacataaaacatagatagagtaagaaaataggcataggaaatcatccaatatggaccaatgcctagcccgtgcattttcattataattcttaggcgctcttgtttctcatacaccaatgatgtcaagatcacctgcaaatattatatacacacaaccacataatgtgatgaatactttgttgagtttagtacttgcaatggcataaagtaagaaattgttaaataacttacggggaatagaagaagaacaacccaagtgaaaaaaagcgggcctagcatggaagcgatatcaagattgaatttagtttggtgtttaggaacttctttgacaaactcgaataatatcctcgtcccggggcctttaagaaacttaagataagcatttgatacctgcaagttttgcacggtgtgaacattaattggatccgttcaataacagaaacatgtaaaagagtactacagcgtgacttagattcataccagattgagcaagcgaggaactcgaaccaaaggtgcccttgaagggtcatcaatgtttgttgagttataccagatcgtcacatcgaagttgtttctatccgtattcaagagatcatatgctaaagacaacaaaaatacatcaacagtaagaaatcacagcttgattcttaagcatatgtatatagaagaaaatgaaacaaacctgcagcaatctcatttgtcatcctctcaggatttcccttccaattacccttgaaaagctcatcattgacctctacagagttatttctccatagagacaacccttgaagacacgtcaccgctgagataatattagacacaaccactaagttgatcatcaaagtgaagaaaaccacatttttcactgttcattttatcatctcaagctttgaacataaaaaaaaaaaactacctgtatgaatttttccaaatgagagtggccatgtagagtttggactgcactgagattggatactgtagataggaaaatccgactcaatcccgggatctgcataattgtttgtgcctagtgctagtgttgaaccctgaagtcactcacatgcacatgacctctagttaaaaatctaaaacagagagataaatgtttgcacttgcttgattgaaagaaatatcaaaacgtaccaagacattataggctaaactagacaagaggtcagaggaattcacagcaaacgaaccaccaaacatattcccagataaagctgtagtagaaacacttaactgataagttacatagcaaaaaatagagagtaaatgtatcaaagaagcgcatataccttgaccaagggaatggttattcccagtaagaagtatagtaacaggacaagttccagtttttctacaagacttatcaggaaggtcattgtacgaaaagaaaccaccgctgacagcacgagattcaggttctggaatctgtaacaggggaggcaacagtggagggtttgggatgggacaatcaccaatagaaaaatcatcttgacttccacacttagtcaaatcagcggccttattcaccacaacatcaagcaaaagttgaatccctaggagaaataagcaaaggagtagtggaaccaggacaagcctaatattcgtccatatgtgtctcctctgcacccacccaaaatgtcatataatcgattcaaaaccatgttttcaaacaacgatcgtaacaattttgtcacacatacacatacctggtaggttaagttctttctaagtaacgcatttgcttgcgcccagaaactggcttgactaggatccgccattgatgaagaagaaaaagagctccgttagtctttaaaatttttcttactgacaccactttttagtattcttctccaaaacgcttctcttctaatattttttttttagggtttttaattaatcaaataatagttgatgaaaatccaagaaaaccctcttgattgttgtatacagtgtaacaacaatctgatacattacccctttgtaatgatggattggatacagatagtcttcccaagaagtcaataaatactaattggaaacatttcaaatttaatactatgtagaaacggaaagattaaaaaaaacttaagtgtacttacaaatacagaaaacgcgtttcctttaactgaataaaatcatggaaaaaactaggaaaaaaactttttaagaattctcaactttcaaaccttttttagagtaataaacaaaattacttctttttttttctctagaataattgataagagtctttgtccatagtttcataggcgtttccttacgaaaaacctaattaaagataaacgttattcatttgtttcaaaaaaaaaaaaaaaaacctctaatcttcttcttcctctgtgatcatg

SEQ ID NO: 1109 - DNA, 3000 bp, Unknown
  misc_feature (1)..( 3000): cDNA_ID_2130611_gDNA_ID_1620360_Annot_ID_154617 3000 nt of promoter + ATG
ccctgaatttttttcaatgaatcaatagttgaataataaatgtaactgttgtaacacttttatctcaagtcacatgagctaggaacatctttggcaaaagccatacattatcggaaagcaacatacctttacagcatgaaaaggcgaagttttggtgcatttgcagcatccaagctttgttgttccaggatatgtctttgcaagaccatgtatctgaactgcaatgttaggatcaactcttccatccattgcttgttgtttaactaaaatctcctcttcaagcacatcttcgtcctctggtgtaatatgctctactggtggaactgaaccaatacagctacagatgctcccttcttcaaaagtgtagaaaaacatgttttaacttataattagttttatttagtgcaatagagaaaaataccttccactttgttgccttctttgccagtccaataactaggttttagaaagtagaagatcgattttctcacaccggatgcattggggatgatgttgtcaaagtagagagccaatacaaaccagaaaaagaacgttcccacgagccatatgtagattttattctgccaaaaacacagtttgttcagagaatgatacctacacaactattagatccaaaatctatctcagaaaggttggcatacagttgtaataacgcaagtgctctcgccccctgcacatattgctctttcactccaactgattccagagtctccgggagatgatgtcgcttcaagaagcagctgcagacccgcagaaaaggtattcggtggaaagagtgaccaaatgacacggctaccaatcgaatatgcgcttgaataagggaatccagcagttgttacaatctgcaataagaagtagaaatcgtaagagtccaagatttaaataagaaccaaaatttcagctactatatatgttagcaagagaggccaaacctgtgttataaaaccaaccagaaacacaaggaaaccaacagttgttgccgaagatgatttgctaatgatagatgatagcgcgaatgctaggccaatctagcaacacaagtaaatatataataacttaaatgatacacaaataatatctttgaagaaagcagagtacataatttgaaaatgaagttttttaccatattaaactgaaaaagaaagaaaagtaggaagacaagaacaaaactgttcttcaagaaaaactcaaactggaacatcattccaaagaggaccaagaagagtgaggagacaaaggtaaggattccttcccatatgagccatgacaaccaatatgcagattcataaacacccatcgttgtcattgcctgttgagcaacaaagaaacaaaacaatgatccaatacgcaaaacctcaggctaccaaaaaacaagaacagagattattataaaacctcgcgaagttttagctctttctcggtaaccacagacccgagttggagaacaaaaccaaacatggagaaagcaagaaagaacactggtcccataagataaaatgcagaaatgatcacttcaccaccaatcgctggacgcgcaaattccttaaatccaaaatcccaactaaactttggatctgaaaatgtataaggacttgacttattattccatgttataagaagcacccacatatgtatacatacacactgctacaaaaatcttcctaacacaaattaagattcaagaatataaagtacctccaattaaagaccttgcgatttcacgctctgcagcaatttgaagaggaacaaggaacttaaacgtaggatcttcacgccgaccacgttttttctccgatgaagagtttgtttgaattccatagctgatcactgtagcattcttttccacaaaatgcaaagcccctgttacttgcgatggatgtgacataaaccatgcatctacttcctcaggctttgtaaatgattgaacctgaaagagaccaaaccacaccagaaacataactattcagattttcgtacattagagactatggaagatgatgaagagacataatcatgacaaaaaaccttattggttggaattggtcgtccaggattgttagccataattgcagagacaatgtcagtgacacgacggctctggttgccactccacacgaagtcaaaacatggaagtctcacgaaaaacttatcctcacatggaagaatcggaagagagactaatgctttaggatctgtgacattcttgtgcctagtcgaggttaagtcgctcgctttggaagattcctctatagagaagatgagaaggatgaagaagaacgaagagaagagatgaagacacgtggctctcttgttcctccatgaaagcagtagattcttcttgaacaaagctgtgaattgctgatgaaaaagcggcaagccttctcgcagagtcatgatcacagaggaagaagaagattagaggtttttttttttttttttgaaacaaatgaataacgtttatctttaattaggtttttcgtaaggaaacgcctatgaaactatggacaaagactcttatcaattattctagagaaaaaaaaagaagtaattttgtttattactctaaaaaaggtttgaaagttgagaattcttaaaaagtttttttcctagttttttccatgattttattcagttaaaggaaacgcgttttctgtatttgtaagtacacttaagttttttttaatctttccgtttctacatagtattaaatttgaaatgtttccaattagtatttattgacttcttgggaagactatctgtatccaatccatcattacaaaggggtaatgtatcagattgttgttacactgtatacaacaatcaagagggttttcttggattttcatcaactattatttgattaattaaaaaccctaaaaaaaaaatattagaagagaagcgttttggagaagaatactaaaaagtggtgtcagtaagaaaaattttaaagactaacggagctctttttcttcttcatca

SEQ ID NO: 1110 - DNA, 3000 bp, Unknown
  misc_feature (1)..( 3000): cDNA_ID_2130895_gDNA_ID_1620361_Annot_ID_154644 3000 nt of promoter + ATG
ctcttctccaaagtccttcattagaggaataaacctctatgtggtaaagttcagagtcagaggcagaagaaaaagagttgttgcttcttcctctgaggcaaaagactttatagtgaggagatcttgaaggatcaaaggctaatgagagtgcgatgtgaccggcgatctgatggagaagagtgtactgttttgtcgtcggattataaacatagtaatttgtgttgaaatggttagaagaagcacaagaacatttgcagaggagaagtccattggttgattgcattatgatcatatctgtttgatgatcagtaaaccaaagtggtaatgatgatgaaatccgttggttggttgcgtcatcatcaagagagacaaagctatacttgatctctcttggtgagtgtaagaaaaagccagagatgggtaaggggtggttggacttgatgacacggtttgagaaaacagggtttgtaatgagcgaaagccagcgtttggatacgcgtttgaatcttaaaagagttttgattggaagaaaagagaggatttgaatcaagacatcatcgatatctgccacaattgtagccgatgaagaagagaaaccaccatttctacggcttctggccgatcttggagcttttgttcttgttcttgaacaagaggacatcgctggagtggtttaaaaagaaacttgtttagggtttattggagtgaggaagaagagagactctggtgttggattatatagagaggtaaggatgtgatgagttatgtttttttggtcaagaagattgtggaggaagctttgcttatcaattattctttgagtttcgttgacattgacctgttctcacttctgaattttgagtcgtgtctaatacaaatcttagcttataaactctgtattcttctgaaacttaaagttttttaaatattgttatctcgaaactgctatagacctgtagaggatcaaggataagttacatgtttaggatgttccaaccacaaacgtgaacaacacgacagttaatttttgaactctttacaagaacaagaaagaaaaaaggtccaaaaaacatgacaacccccaaaaaaagaaaatgtaacgtgacgtagatctctatgactctatcgactcccatcgttttgcatgtagaccccaaacaacgtaaccatccaaaaacaaagtatgagctgaagaattacatcaaaacaaatctcatcagtcatagaaatttaacatttatcacaacatgttttcttttcttatcttcttgttggaggtttataaggttgttatcgctgtcgtggcctctatagtcttcttcgtgttctcgggtctaacactcgctggtacagccgtcggattaaccgtaaccacaccgcttttcatcatattcagcccgattctcgtaccagccacgatagccattactctcttaaccacagggtttacgaccggtggcgcccttggagctacggccattgctctcatcaggttgctgatttagtaaatcaaacaaattttattgaaatattcatatggtacaatgtttttttttctaatttaatttaatgaaactatgacatatatacaaacacacacacttgtgttattgtgtatgtgtgatgtaggcgcggcatgggagtaaagtcgaagaacaatatacctgcaataggagctccaccaactatgtttgcccagttcagtttaacgccaaagattaattatgaaggaacttttaaagggtcttggggaggaaaatcgtcaccccaagctacgccaaattttagttatggaggaacttggacagcaaattggggaggaagatcctttactggaaagtttggagatcagtctggcggtggaagtaccgcaggtggaagtacacccgaagctgctggtgctggtgctggtgctgctgctgctggtgctggtgctgctgctgctgcgggtgctgctgctgctgctgttcctggtcttggtgcagctagtgctggtgctggtcctggtgctggtgcaggtacacccgcacccgcacctacgggtaaggcgggtaaggccggctcaaagaaaaagtagatccgttcagtgatgtggctaataatggcctttttgttggaaataataagcttttttaaaatggaaaattggcccaaatttcttttcttctttaagtcatgttttgtgcgtatcgatccgtgcagtgccgtagctaacgtgacagtttcacatagtcatctttttttttcccagataaaacctaatattcaatcccagccatcgttctgtgtctagaaatttttgaaagatttggaccctcaaattagcagagaattaaataaaaaaaattggagcctctgcattcatttgcgccggttgcacacccttaaaacccccccgaggtgaacgacattggtcgagctgttccaacatgtagcagcttcaaaattcaacgtttcatgtttatgagtaattcaaaattctatgatcaaatttttttagtaaaaaaattacaattaaacgtcttatgtttatatgtaatgttgaatctgcttatagtgaaagtctgtctgatctaaaaatacaacaactctattgtatcagttggaaaaacatctttcacgtgattaagatgaatgtgcatttacgtacgtgaacatcaaaatatggtcgatttttaggtgatcatgatttcgtctatgtgaaggtgtttgttaaataaggctattattgtcattccagcaacaaacgagttaatgaataataggcctcaggcccattatcaatctgaaatccatccccgtaactggcccacccaatacaaacccgacccgactcacaatctctctttcatttcaattttgaaaattttctctcgaaaaagtcgatatccatggcttctcgcagtctcgtatcacagtgaatccaggagcttagattatcatagatcataggcattgattcttctcttctgagaatctcgttgcacatactcaaatatg

SEQ ID NO: 1111 - DNA, 3000 bp, Unknown
  misc_feature (1)..( 3000): cDNA_ID_2130931_gDNA_ID_1620361_Annot_ID_154652 3000 nt of promoter + ATG
ctagagaaagatttgacaaggaaggaacttgaaatgcaggatctgaaaaattcagtcgcttctgaaaccaaagcatcacctacatcaagtgttaatgagcttcatctagaaatcatggttagtgatattggttgaaaccgtttgattgtcaatatttcccatagcatcattcttgattgcactctttgtatttctcagaaattccaaaaagagatagaggagaaagaatccttgctagaaaaacttcaagactccttgaaggaagccgaactaaaggctaatgaacttaaagcttcatatgaaaacttatatggtatgttagcgatacatttatattcttggatttgtgtaaaagagattagtcatcttgatttacagaccagtttactttaatatagttcaagctagctacagtgattctatctaaaacgtacatgcagagtccgccaagggtgaaattgaagcccttgagaaagctgaggatgagctaaaggagaaagaagatgaactccattctgcagaaacggtgcaccttcgttaagagtttggttctttacttgtttgcacttagtactgaactgtgattctgtttcaggagaagaaccattatgaggatataatgaaggacaaggtcttacccgagattaaacaggctgagactatatataaggagcttgaaatgaaacggcaggtaagcaattataaaattctactagtaataaacatgaaaagggacaaaaatatcataatgagcaatgcaatttcattatatatatatgtttgtatgcaagttaattattgctcttggattcattttttttaaatactttgttcaactgctgaatttcaggaaagcaacaagaaggcctccataatttgtcctgagagtgagataaaagctttgggtccttgggatgggccaactcctttgcagcttagtgctcagattaacaaaataaatcataggctgaagcgagagaatgagaagtgcttaagtttctgtgccttgtgattgttcctacatacggaaattacccgttgaatgcctgttaatgttacatgcgtttatctcttattgatacagttattctgaatcaatcgatgacctcaggattatgcacggggaaaaagaacagaagattgggaagaaacgcaaaacttacaaaagctgtcgagaaaaactcaaggtttacagatatattttcccttcatccaaaattccgagatatatgtgctaattcatttaatgtgtgcattactgtttaatcaggtctgcaaagatgcagtagactcacggtggaacaagctccaaagaaataaagatcttctgaagcgagaattaacttggcagtacgaattgttttgcccataattaccaataccattggctaactctttagttatgtgattttcatatgctattttccttgattggtgatcatcaaagcagattcaaccatcatttaggaaagaaaggtatcagtggaaatatcagagtctcttatgaagacaaaactttgtccatagaggtaactggtgccatattgctacaatttgcatgtgatatgtctatattattactttaatttactggttggttgcacttttgtattcgacaggtaaagatgcctcaagatgcaacaaacagtgctgttcgagatactagaggactttcaggtgctgtttctctgctctagatttgcatatgaattatttaagacttaaattcactcattctagaaacgttagaacaaggttcagtggaataagttaagtaactaagcccttgaagatggtacttaaatctaagaatctaaaactattttgacctttgtttactatatgccctctatgttgtcctatatttgaatctctagaagctaatgctccattgagagtataaccttattcgttcaaattatcagctatttacatttctagggagcttcaaagtttgatcaatcctactcttatcataaattccaggtggggaacggtctttctcgactttatgcttcacattagctcttcagaatatgactgaagccccaattcgagcaatggacgagtttgatgtgtttatggtaatctccttttgggaattttatttcttacaacttgatctcggtttgcatagtataatatcatacaccacttcttctcataacttggagcttctaaaacaaaattcaaacaccttgagagaaataacgtgttaacgattcggtttctgcaacctcaggacgcagttagcaggaaaatcagcttagacacattgattgatttcgcattgaaacaaggttcacagtggatgttcatcactcctcatgatataaggtaacttccatccacttagtgaagtaacacacaacactgtttctttaaagcataggaactatgtaacattgtaatctctcttttgcaaattacacagtatggtgaagtcacacgagaagataaagaagcaacaaatggctgctccacgttcttgagctacaaagaacctctccttttgtaaattcaccatcttactctcttttggccataacttaatggggtctttctaactttatcctatattttggaagtttctcttttgtcaataatctcaacagatagatataatgattatgatctagtggcttcagattttttgatgaaaagattgaaagtgacaggttcaattttttcttcttcactgtacatttgagaccgtttgtacattattcctagaaatctaaacagtttccaaaacgaaagctaacaaaaagagaccgaatctttcgtctttagagagagacaacaaaaatatcattttttataaacaaaatctaaaatccctaaaaacaaaatttttgctctgtgaatgtaaaagttctctagttcctcaaagcttcaaactttccatttctattgcagaaatccgttaaagctctttctcgggaaaatcaaaaccgagaaaaaaccttcaagaaacgttgacggagaatgtgaagtatc

SEQ ID NO: 1112 - DNA, 3000 bp, Unknown
  misc_feature (1)..( 3000): cDNA_ID_3060754_gDNA_ID_1620361_Annot_ID_154657 3000 nt of promoter + ATG
gatataactaagaaaatgtcaaagagaccatattgtatcggagaaggactgaagaaaggagcatggactacagaagaggataaaaaactcatctcttatatccacgaccacggtgaaggaggctggcgtgacattccagaaaaagctggtacataactatatatagacgcatttgtgtctctataatatgaatttattcacaatctgttactaatatgtattaattattctcttaattgatcatttgatctttatctgctttttttcgagtttagggctgaaacggtgtggaaagagttgtagattacggtggactaactatttgaaaccagatatcaagagaggagagtttagctatgaggaagagcagattatcatcatgcttcatgcatctcgtggcaataagtacgtatggcatttctctaggcttgtttgtgctcatatcagtttagtgaagacatgatcatcaatgttttgatatatatgtaccctgtgtttttattttattttactaggtggtctgtcatagctagacatttgccaaaaagaacggataacgaggtcaaaaactattggaacacacatctcaagaaacgtttaatcgatgatggcattgatcccgtgacacacaagccactagcttcttctaaccctaatccagttgagcccatgaagttcgatttccaaaagaaatccaatcaggatgagcactcttcacagtctagttctacaactccagcatctcttcccctttcctcgaatttgaacagtgttaaatccaaaattagcagtggtgagacgcagatagaaagtggtcacgtgagctgcaagaaacgttttggacgatcgagctctacatcaaggttgttaaacaaagttgcagctagagcttcttccatcggcaacatcttatcaacatccatagaaggaaccttgagatctcctgcatcatcttcaggactcccagactcgttctctcaatcatatgagtacatgatcgataacaaagaagatctcggtacgagcattgatctcaacatccccgagtatgatttcccacagtttcttgagcaactcattaacgatgacgacgaaaatgagaacattgttgggcccgaacaagatctccttatgtccgatttcccatcaacattcgttgatgaagacgatatacttggagacataaccagttggtcaacttatcttcttgaccatcccaattttatgtatgaatcggatcaagattccgacgagaagaacttcttatgatctgtctatagatggcttgtcaatttcccaatgttgacatgcccaagattatgattaggcttttctcttagataaatttcaagttgtttgaaacaaataatcccgtggatcgattagtttttgatttgccggagtttttatatttttgtaactcttttgtaatataattttaaatagctttacatatatacattatatatgacaaataagaatctaagcgaaaacgtttacaaaaatatatacattataggtccacaaaaacactataacacaaaaggtaaatagcaatgagtgggcaacaatattggatctgtgacccggcaaaatttatccgctaacaaaaacgaatctgaataaatgtccactgatatatgtgtatgtgtgtgtgagagagatatgacttatgcgagcttttgtttctatgtgtgtggctgcacatgaatgatttagtttttgttgtgtgtgtgaaaatgaaagttgtattttttctgtcggccgattaaaaactccaaattcgaaacagaatttgaaccaaaaatagacacacaataatcctcacgatcaaataaacccaaaagaaacgtagctattacaagtacgatctctcaggaacaaataatccgcatagccaaaataggctacatttcaggtagtcacatatatgactgcaatcacgaaatcacacgttgagctatcccaaaaagctctcttcttcgaattcgatgaattggtcgtaactgagagttttatgaatggattaaatgaaatagacgtatataaaaagtggaataaataatgcctttatgtttgcataaaactagtccttaattgtatttatgtatttcgtttccttttaatggaattttctatgtgcactcaataaaaattgacctaagattcttttcatatttgaatataagtttcattcaagaacaaatccattgatcaaaccaaattacatactgccaaaaactttaaacgtggaaatcttttatatgctccagcaaagtggagattttataaattggaaaatagaagaaaaccttactttatgataaatttaaataaaattgaaaaatttcctcatgtaatttaacaaaactaaattattgcagcattttcgttactcattattaagtgaaaactgtataatggtcaaaagtgcatctaattaactcctattaatagttcaaactaacacacgaatctttttcagattcatatgaagagttgaatctttttttattttccagctgaatcttctgatccaaaaccagaaggtccaaaacacatttctgtttttttcaccaaaaaacaaacaaacacaattctgtttaaagtaacctaattaggccgttaagaatataaaccttatttgggtcgtcaagaacataaaagcctgtataatagttttcttcttttttgggctaaagttttagttttaataatcaaaattaaacaactaatctatttgttaaatcatcatcttaacaaacctcggaacaaggacaagatcaccaggtttacaaacgaagcaacgaatcaacaattggaatcaaaaccttacctagaaagataaaccctaaagtaaattcagtttttcactttacctgcagaattggacaaagtaacttgatcttcatataatccctcgatgatccctcaaatgttcttaagaaatttcgaaacttttcacattcaccactcgattgaaccggacccgtttattca

SEQ ID NO: 1113 - DNA, 3000 bp, Unknown
  misc_feature (1)..( 3000): cDNA_ID_3060750_gDNA_ID_1620361_Annot_ID_154660 3000 nt of promoter + ATG
aatgacttaaacgaagtaaccatattatatagtaggaaccaaaaaaccgtgcaagatttgattgataatatcaagacttcaacagacctgctcccacttttccaaggtccacttgccaccagtgtagctctacaacaaatcagtcaattaaatgatatatatcacaaaataaagatcacaagtagataatgctactcaaaagtcaagaggttaaccataagaagctccatattctccttggttgggaaaaggtttataagaccccttatttcatcatcatctagcacagactcatccattgccatgattgcagcctggacgatgcaatctggttaatctttcatagcttaatgataattaataatccacatttactcgggtaatgtaggtttttggagcttaccatcatatctgcaggcagccgaatatttaataacattagcgtaagttccgtgtcagtggctctcctaaggtcaatcttgaaagccaataagacaaaaaaaaaactcttcaaaaagagtggaatattgaatcacaacagtcacttaattgtttatagctacgtgataaaagtctccaccagaaaagagcaagttaaaatatctgtgttaggaatatttaacattaccagtggatctttttcaggttttgctgccccaagagagaaaaaggtctctatttctgatacatcaagttctattgcactagccaaaaaaaaaaaggagagaaaaaaatgatagagtaattgcaaagcaaaggtcaatgatataggaactttaattcttccttcttcaatccgttggaattcggtttcttgaagggattaccagagaatctgttcatcctcgatatcgccgtggcatacttgttgtatctgtaactcatcccataagctccccggcaaagcccttgttattttaacccagttaaatcgcttcagggaggacttctttttagatggacatggaaaacaacacactatacccttaagtgcacaagttggaggtggggctcctacaaatatcagaggaggtggtggcagtggcgcttctctacgcacacgagtaggtggataacaacaacacagaacttctgcatcaaacatcggaagtggaggtggaggtggaggtggacgtggtagtactcttctacgcatagcaggaggaggaggtggcggcagtggtgctcttctacgcataggaggaggaggaggtggcggcagtggtgctcttcttcgcataggaggaggaggaggaggaggcggtggtggaagtggaactcttccacgcataggaggcgacaccacggcatcagcgccagagatctcgacaggggacattggatcaggaaccaaacggatgatttagtagagagatttaataacaaacatatttcttcaccgacctagatcaaataacactagttcatagcaaaaatactcagaaaatattaacagaatgatcaatggcagcacaattgactttgagaaaaatttgaacagtcgacggacgagacagagtatttgatgtccatttttttgaataataattactactggcatattaattgacgaattcatctacccaaaacgacgaagtcaggttgacgaaaaaaaaaaaaacgacgaagtcagaaagaccaatgggccgaaaccaagccccactcttatttatgatgtctcggttagaccatcctttccattacaaaacaataaaatttgcattaaaaccctcgaaggaagtaaaaaaaatgaaactttgagctaatgcaacatagtactgaaacattgttagcattgttttagaacccataaggagaagtcacgtgactccgtaagttatcaatgggcttttaagtaaattaagcccagcctttaatatatgggtctcctccgctgattaagaaaatataaatgagaataactagtaaaaaaattaatatatgggtctcgtaaagacattccccacccccctttattaaagttttacatgatgaaaatatagcaaccagacatgaatatgacgggttactaataccgattcaattactaaaaattggtatgtagtgacttattttaaatcaataataacgtgtttcgacagaagggaaaatcacaagttgatcgtaaatgaaaacgtggttgtaattataaatatagtttttttttttacgtttccacgtaggattagacaaaacacctagaggcttaaagatagagagaagagaagggtctggtcgtgtgtccgaaccaagtctcgctctttttttctcgaaagtccaccactactatgctctttcgtttccaagagttcaatttcaattacgcaaccatggaaaaatcaaaaaagctttttgtttgctattattaaatacctctaaaaatatgaattaaacccttttgtgaataattaataactttattgacacacaaataaaaaaataaactgctggaagatttgtcgaaatctggtttcttccttcgtttttttcatttctgctccttcttctccttttttcacctgaaattcttcatctcactgtcacttccttctctctctatctccctcttttattttatttttaacaactttttgattagcttcgaagattctttgttcccacgattgagagaagattcggcattgtacatagagatcgattcatttggaacgaaactagtttgaaaaattctcaactttggggtttggctttgtgattacgacttgcgtttttgtttccaaaattggattattggtggaggcagagaggtgaagaaggaattctgggaattgggtctttatcacgctcttgtaattaagcgaaatttgtcaactttttagctaggggtgagaaattagggtttgtgacctgaatttttgggggaagaaggggatctggggtttaggtcaacggaattggagcaatcgagaatgatctgcttgttggtttactaaatcgacggtttggatctgatcggaggagagacagcgccatcccatg

SEQ ID NO: 1114 - DNA, 3000 bp, Unknown
  misc_feature (1)..( 3000): cDNA_ID_2130966_gDNA_ID_1620361_Annot_ID_154662 3000 nt of promoter + ATG
tttagctaaagctaaagttccattaaaagagtatttacgtgtgattaatgcgttttcttctctcatccattttgcttccgcagtacttcctagagctaatgaaggttccaggagtagaatcgaagctgagagtgttttccttcaagattcatttcggtactcaggtctggtggtatttacctataacgttttggtttttgtcagtgtctaagtaactgtagattcttgatctccttttttatgatgattactttgcagataaaagaacttaataaaggtttaaataccgtaaattctgcatgtgaggaggtaagatatttgcaatacttaaaactcaataatttacgcagcccatttgcgtttatctttcttagacattttctccttattgcttgtttatcagatacgtacttcacaaaagctaaaagagattatgaaaattattctctgcctggggaacatattgaaccaaggaactgccaggggtgagtattataattattttcttacccaaatattttttttctgtagcttaagacataacacaataaaatttctctgttcaatgtgggctaagttcaagaatggcgcctttgtttcattacatcataaatacttgttttgtatgaacgcaaatcctttgtggttgataaagaccctttgctctgctttctgcaggcagtgcagtgggattcaagttggacagtttattgaatttaagcgaaaaatgttctgctaacaccaacatgactctcatgcattatctttgcaaggtaaatttcaatcaaaagaagtagaatctatttatactgaaacccctaatctttctttttctcaggtccttgcttccaaggcatcagatctactggacttccataaggatcttgaaaatctcgaatcagcttcaaaggtttgcatttgtacgtactttttatccgttcttagctgtaattggctcatcatttgattgtcctgttgattcagatacatttgaagtcgttggctgaggaaatggtagctataaccaaaggactccaaaaactgaaccaggagcttaccgcatccgaaagtgacggtcctatttctgaagttttccgtaaagtatgttgttgtttttcaatcttatccatcttttatcaatcatgaatttgagattaggtctatcactttgccacattactaaatctgcttccatcattttgtaaaatcaataacagctagaaataattcttcagctaagtttgttttttcctacataacttcttccggacgctaaaatctagttttatgttttcgacagttattgaaggacttcatatccgttgctgaaactcaagtagcaactgtatcgagtctttactcctcagtggtaatttttgtcaacctctactagattccaagtaccttacatttaaaaatgtgtttgatcctgaaattaattacttttgtttttgaatcttatgatggtggaccacagggaggaaacactgatgcacttgtacactattttggcgaggatccgaacgattatccatttgaacaaggtatacgatgaacttcatcatcctcatttgtgctaatatacataaaaagtggctggctcattgtttttacgtagctaataacaatacatgattatcgatattgcctgcagttaccgcgaccctcttgagttttgtaaggttgtttacgacagcagcacaccaagagaatgtcaaacaagcggagttggagaagaagaaagctgcaaaggaagcagaaatggagaagacgaagaaacgagtcagtctcactaataaaaaagcaagcggagttggagaagaagaaagttgccttatataactgaccatagtgtggtaactcagatattttgtgttgatttaaacaagcgatggaaatattttcactgtttggtgttgttaatatgtgtgtggttacaaccacgttttttttttacgatcaacttgtgctttttcccatctgtcgaaacacgttattattgatttttagtaatccccaattgcaattattgtatcacattcatatttacagtagtttataattgaatcggtattagtgaaccatatattaaaattttaatcagcgaagacccatatattaaaggttgggcttaatttacttaaaggccggcccattgatgacttacggagtcacgtgagacgtgacattctccttatgggttctttgacttttgttcatttcaatccttggccagtttggtctttctcttcgtcgactcttttgctgaatgtgatttcgaagttttgtgtgaatgaatcaaaatcttcagataagtcggaatcaaacttttaatttaatttcagacagtatgacacatgtgacatgtcatgtctctcccctcaactcttgccatgtcttcgtctgtaagtttcctgagaatattctccattttcctgcaatccaatcttctctcttctccaatgataatggcccagcagatctcggatacgctcttcttgcttaatcgaaattgaaattaaaataaaatattttagtgctaacaaatgtttcattacactatgttcttctaggaatctagttcaaaacttcatttttttctcttaaacttgcttctaggtctgtaatgctaattttattgttttgtaatggaaaggatggtctaaccgacacatatataaaggagtggggcttggtttagttagcggcccattgggcttcctgactttgttgttttgggtagataataaattcgatgccgttattgattaactattcaaaaaatggatcagacaatactctctgtcttgtcttatcttgtcgtccctccaattttggacaagtcttttccacaaagtcaactgtgctgccattgatcattctctttatattttttctgggaatttttgctctgaactagtgttatttgctctaaatcggtgaagaaagcagtttgctattaaatctctctactaaatcatctgtttggttcctgatcca

SEQ ID NO: 1115 - DNA, 3000 bp, Unknown
  misc_feature (1)..( 3000): cDNA_ID_2130962_gDNA_ID_1620361_Annot_ID_154661 3000 nt of promoter + ATG
aataaattaccaaaagaactcataaaattttaatctatcccttactaatgtttttaattcgcacaaaacagtgtgatgattacaatggtctgaaaagtacctgttggtagagacgagtgtgtttctttgtctttagtgtggagaagagaagtatggaactcctgttggttcgggctttagggtcctgaccataaacacgtaaaatgggtctgcaaccttttttcccttcaaaatgtgggagatctctgagaatcaagcaatccaaaagaagaggagtgtcggaaggaggccaatcagagcctaaatttcttctagaaatgtactgaagatatctaagttgagatggctgtgggtttagaggagacaatagatgaagaagctccttaggagcctgtttgtgtaccatctcaagcgtcttctgctcgccgtgatactgctttctgtacaataaaaggcccgataacataaaagcaagaacaggccaaccacctctttcacaatgcattaacaatacattttgttgaccttccaacgataaccagctttcactcgatctcagaaagtgatggatcatttcaagaggtaaaagcgggcaactctcatactgccgtggataatccataaccgtcatatcgtattgggacaacacgtctgatatttgactccgctgttccccctctctaaagttaaacaccatgaaagacgcctctgggaaatgatcctgtagctgcgccacgatgccacccaagtatactttgtactcatcctcccccataacatcgctagagaaacagcagtcaaaaactgcaaagaagaagaaaaaacaagagaagttggatcagctctgaaaccttgaactactccagcaaaatataggttgctagaaaatggaaacacaaatctgcaagctctgaaattttaatcactatccccaagtgcaatccagaagctcaaataaaccccttttccaaagaactatcattgtccaacattaaaggaaacaaaagaatatcccacaaagctataaattgtcttcaaagagattctgattcctaaaacctctttaattcaaagttgagctcaaatgagcatccactaattctcatcccaatcaaactgccaaaaaccctataccatccagaagctcgtcgtagcagttttgatcccaatgcgcatatatcaccgattgtaagaataaatccggcaacaatttcatctttttatagatactttgatcatgaaaagagagaaaaaggaaggagtgattaccataaacacgctcagagatctcgagaagccgatccggaggctttttgtagaagaagcgacggaacagcgccatgggatggcgctgtctctcctccgatcagatccaaaccgtcgatttagtaaaccaacaagcagatcattctcgattgctccaattccgttgacctaaaccccagatccccttcttcccccaaaaattcaggtcacaaaccctaatttctcacccctagctaaaaagttgacaaatttcgcttaattacaagagcgtgataaagacccaattcccagaattccttcttcacctctctgcctccaccaataatccaattttggaaacaaaaacgcaagtcgtaatcacaaagccaaaccccaaagttgagaatttttcaaactagtttcgttccaaatgaatcgatctctatgtacaatgccgaatcttctctcaatcgtgggaacaaagaatcttcgaagctaatcaaaaagttgttaaaaataaaataaaagagggagatagagagagaaggaagtgacagtgagatgaagaatttcaggtgaaaaaaggagaagaaggagcagaaatgaaaaaaacgaaggaagaaaccagatttcgacaaatcttccagcagtttatttttttatttgtgtgtcaataaagttattaattattcacaaaagggtttaattcatatttttagaggtatttaataatagcaaacaaaaagcttttttgatttttccatggttgcgtaattgaaattgaactcttggaaacgaaagagcatagtagtggtggactttcgagaaaaaaagagcgagacttggttcggacacacgaccagacccttctcttctctctatctttaagcctctaggtgttttgtctaatcctacgtggaaacgtaaaaaaaaaaactatatttataattacaaccacgttttcatttacgatcaacttgtgattttcccttctgtcgaaacacgttattattgatttaaaataagtcactacataccaatttttagtaattgaatcggtattagtaacccgtcatattcatgtctggttgctatattttcatcatgtaaaactttaataaaggggggtggggaatgtctttacgagacccatatattaatttttttactagttattctcatttatattttcttaatcagcggaggagacccatatattaaaggctgggcttaatttacttaaaagcccattgataacttacggagtcacgtgacttctccttatgggttctaaaacaatgctaacaatgtttcagtactatgttgcattagctcaaagtttcattttttttacttccttcgagggttttaatgcaaattttattgttttgtaatggaaaggatggtctaaccgagacatcataaataagagtggggcttggtttcggcccattggtctttctgacttcgtcgtttttttttttttcgtcaacctgacttcgtcgttttgggtagatgaattcgtcaattaatatgccagtagtaattattattcaaaaaaatggacatcaaatactctgtctcgtccgtcgactgttcaaatttttctcaaagtcaattgtgctgccattgatcattctgttaatattttctgagtatttttgctatgaactagtgttatttgatctaggtcggtgaagaaatatgtttgttattaaatctctctactaaatcatccgtttggttcctgatcca

SEQ ID NO: 1116 - DNA, 3000 bp, Unknown
  misc_feature (1)..( 3000): cDNA_ID_2130955_gDNA_ID_1620361_Annot_ID_154659 3000 nt of promoter + ATG
tttttcagattgaccttaggagagccaataacacggaaattatgcttactaaagtaaagatgccgctacctgatatgatggtaagttccagtacctactttacctgagtgaaagtcatgactggttaccctttcatagtttgatgataattattcaaatttttctttgcatcgtccaggctgcagttctggcaatggatgagtctgtactagatgttgatcaaatagagaatcttataaagttttgcccaaccaaggaggagatggagctacttaaggttacgtcttgacttttgagtagcattatctatttctgtctttactttggagatcatttgtgaaatatgtcaattattggttatcattattcacttgttattgacatgagtccttgttcttggtcgtaattgtctggtttgttctagaactacactggtgacaagacgaccttgggaaagtgtgagcaggtctgtttaagtcttcagattaccaaccaatctcgcactgtttttggcttctactataaaatggttagcaattagcttactgagttaatacattttttgtcatccattttgctattgcagtacttcctagagctaatgaaggtgccacgagttgaggcaaagcttagagtcttttcttttaaatttcaattcggcactcaggtctggtggaattacttaataccgttattttctgtctatttgattctttggaggacaaaatataattttattagactattgataatgatgttttttgtgcagataacagaattcaaaaaaagtttaaatgctgtaaattctgcgtgcgaggaggtaagatgcttgcaatagttaactctagtttttgggcagtccatatgcatttctctttgttagaattttctacttattgcttattcatcaggtccgctcttcacaaaagctaaaagaaattatgaaaaagattctttacctggggaacacattgaaccaaggaactgcaaggggtaagtattatttatgttattcttgttctacatctttttgcacaagacattgctagttgttttgtctgtacggataacctttgtggttgatatgatccttgctttgctttctgcaggcgctgctgttggattcaagttggacagtttatcgaaattaagtgatacacgtgctgctaacagcaagatgactctcatgcattatctttgcaaggtaaatgacaatcaaaaagagcaggatctagtttctgatgaaggttattataaaaagtggtctggatcaggagagatacataattctgaaactctcatctttctttttccaggtccttgcttcaaaggcatcagttctactggacttccccaaggatcttgaaagtcttgaatcagcctcgaaggtttgcagttgttcatttctcgtcctctactccttagtttctattggctcatcatttgatcgtcctgtctattgcagatacaattgaagtctctggctgaggaaatgcaagctataatcaaaggattggaaaaactgaaccaggagctcactgcatccgaaagtgatggtcctgtttctgatgttttccgtaaagtatgttgggttttttaattttccttttgcacatcttatctatcatgaaattgagattagttccatgattgtgccacattactaaatctgtatcacttttaaaatcatcaataacccgctggaaaataattcttcagttgggttttgtttatagagttaatttcttcctgatcctaaaacctacttttatgctttgataacagacattgggggacttcatatccgttgctgagactgaagtggcaactgtatcgagtctttactcggtcgtggtaatttgtcaacctctactagattccaagcgcctttaccttgacaatgtggttgatcctgaaaatgatttttgtgttgtttcttatgttggacggcagggaagaaatgctgatgctcttgctcactattttggcgaggatcctaaccgttgtccatttgaacaaggtatgacgaggaatctataaacttaaatcctcttgggcaatacatagaaaaagaaaaagtccctaatcgttatttagttggaagtgttatgtagctaataataataccgggtaatggactgctgcagttactgcaaccctcttgaattttataaggttgtttaagaaagcacacgaagagaatgtcaagcaagcggagctagagaagaagaaagctcttaaggaagcggaaatggagaaggcaaaaggagtcaacctcacaaagaaaccagttgatgatagctgacgaaaaacttaagtatcaatttgcaaattccgcctcaacctctcaagagaactgagctagtcttgtaagccagcaaagaggcggtggtgctgttcaagtaaacctttccgcaaagcggcattggatgcttagtgcggttaaaaaaacaggctcgggtcctatggggagcggtttcgcctggcgggggctatcgaggaaccatcgaaagattaagagacaggtcttttcgccactcacgtttaacatgattgactccacattgatttaattctaacttgtaaattagaattctttcctgttttttatttcctgattagaggaatttttgatagattggaatgttgtataggtttcaggtagagagagtgagagatgtagagcattttgtctatttagtgtgtaactttgtataccttaacatcaatgttctttttaggattcagttcagacaatgagacggcacgtgtgataaactaattaatacaaaagaaaattgcgcgagaaaatgagatggcacgtgtgtatgaccagattttcttaaacgaatcagcgaaaagcaacaatcacgtgttcttcttggatcccaaaagtttgaaactttcatggatttgtccttcttcttcttcctccaactgtttctttctcacaagcaaaccctagcgagataattcctccagcaaatccaactgaagatg

SEQ ID NO: 1117 - DNA, 3000 bp, Unknown
  misc_feature (1)..( 3000): cDNA_ID_2130943_gDNA_ID_1620361_Annot_ID_154656 3000 nt of promoter + ATG
aacgatgtggaaagagttgtagattgcgatgggctaactatttgaaacctgacatcaagagaggagagtttagctatgaggaggaacagattatcatcatgctacacgcttctcgcggcaacaagtaaaatcctagcttgccgaaatccatataaataagggtatatataattaacacattattaaagtttatatatatgttttacttaaaaggtggtcagtcatagcgagacatttgcccaaaagaacagataacgagattaagaactactggaacacgcatctcaaaaagctcctgatcgataagggaatcgatcccgtgacccacaagccacttgcctatgactcaaacccggatgagcaatcgcaatcgggttccatctctccaaagtctcttcctccttcaagctccaaaaatgtaccggagataaccagcagtgacgagacaccgaaatatgatgcttccttgagctccaagaaacgttgttttaagagatcgagttctacatcaaaactgttaaacaaagttgcagctagggcttcttccatgggaactatactaggcgcctccatcgaaggaaccttgatcagctctacaccgttgtcttcatgtctaaatgatgacttttctgaaacaagtcaatttcagatggaagaatttgatccattctatcagtcatctgaacacataattgatcatatgaaagaagatatcagcatcaacaattccgaatacgatttctcgcagtttctcgagcagtttagtaacaacgaaggggaagaagctgacaatactggaggaggatataaccaagatcttcttatgtctgatgtctcatcaacaagcgttgatgaagacgagatgatgcaaaacataactggttggtcaaattatctccttgaccattccgatttcaattatgacacgagccaagattacgacgacaagaacttcatatgatccgttgattgcttaccggactagagttgaccggttaatgtcatatggttctcttagatatttgtcaagttatagtaaaggtccactatagggtcactatatattaatattcagtaatggattctcttagttagagaaccttgtgatgccgtggatcaattagtatttgatttgcgggagacacgagttttttttccttctattgttgtttgtggatttacgtactataaataataaataaaacacccatttgattgcaagcgttcactgtactaaaaccatttgatttaaagtttgagccttagtttgtctgacagtctgagccatgttaccaaaaacaatgaaaaatatgtaacacattttaggtttttggtgatatgaaactccgaagaaacaaatccctactgactactgagaaagtcgataagcttttttgtggataagtttcatggatatattagaagtagtaaccattaaccaacaaaaaaatagcttaagtgagttatcaagggatcgatgaacaattatgagatccaatgtgtttttgttaagaggcaaaatccgatgcagtctctatgagacaaaatttccatgggaaaaacagagagttctgaagtctctctaccttaaacatgtgcaagccttagcttcaaatgctccgtaaggttttcatttaaaaacatgaaataagatagagaaatgatacttgatccaactgatgaagattaacaagataattttgaagcaacttctgtttgtataatatgtcgtacaaaatctgctaccaatttagaggccaaattattttcttttctagacagtttgtgaggtgggcagctgaaggtgtttaagccaagattctcaagatttataaatcttgaatcgaattaagctatcagccggaaattaggaaatgatatgcatatagggactaaagatatagttgttgcattaaaaagcttaaagagagaagtggatgtgaaaagaaaaaaaccacagatttttgcacacaatcttgtgtgttgattgatatccaagtagactaattagactgctttgttctacacgataattggttgtttttagatatcaatacgaaacatgttaaaatgtgaaaatattttagattagatgataacacctgaatttaatgacaaaaaaaaaaaaaagtggatagagactagagggacagcaaggctgtgtgacatatatgggcagatagacaaagaagccgaaaaacgtgcaccgtccaagattctggctactatacctaatttccttcccgcagggacttgacaaatatcactatctgccatttttagttttattttgtattggtgtcaaagaattgaaataatgaacaacggtcgtaaaaagatgtaaatggtgtttgattgattaatgtttttttttttttcttagtatattttagcaattgcatattatcatataacattaattaataattattgtgttgtagataaatgtcatgcataatgcagtaataaatgtgtgtgcatatattatatatacacgttaattagatgctaaaatgagtgacatatcttttaattctttgataacaccatttccataaatcattgtaaaacttaccttataacaaaaaattaataaatgttataggggtcaattgacccccataactctacactagccccacctctgcggataagcttaacatgtctattaatattcattagtttacgtggtttaaaagtttattgtcacgagtgcatgacacttaccgtgatgttgactatatgaagaggtagatcgtacgtgtacaaatgacttcatagatctttgatcttttttttcttcttcttcttttttggtaatattctttagttttatttgatctattgtcgttgtaatgatctttgattacaaaggaaaaaaaaaactaagacccttgacgaaaataataaccgtattcgtaatctctgatatcctacattatgtactatttctgatttttgtttcttatacgcacttttgttctagatataactaagaaa

SEQ ID NO: 1118 - DNA, 3000 bp, Unknown
  misc_feature (1)..( 3000): cDNA_ID_2130927_gDNA_ID_1620361_Annot_ID_154651 3000 nt of promoter + ATG
aagtgtaagaaaaacgaaattcatcataccgttttgtaagaatttagttgcttgcttgttgttatgtttttttcatctttcgtttagaaattcatatatggactagaggtaactattgcaaaatacatatatagtttcaggacctgagcaagaccattttctaaaacagaatctagaggctttttctttgtaaagagagtaatttaccttgcaaaaataatgcatccttttaacacttaatctgtccaacttgaattccactggagaaagaaaggttcttatcaaccacagaggatttgccttgagaacaaacaatatatatatatgatgcagcagaaacaaaaaggcgccgttcttgaatcaaagaaatcttattgaaggtcttgtgcaaaaaagataaaatatccctaatacttacccctgtcaggtccttggttcgatgtgttacccaagcaaggaatctttttcataatttcttttagcttttctgaagaacggacctggtgaataaggagcaaattctaagaaagagaaatgcatatatggactgcacaagaactagaggtaattattatacctcctcacacgcagaagttaccacatttaacctttctttgagttctgttatctgcacagtaacaacagaaccaagaatatacagttacatagacgctggtaaaaccaaaacgttttcctccaaagaatcagataacagaaccgccggaccttagtgccaaattgagtcttgaaggaaaatactctaagctttgcctcaagtcgtggcaccttcattagctctagtaagtactgcgataaacaaaattgatggcagaagtcaatgagttagctaagtaagctaattactaaccatatttatttatagtaggaaccaaaaacagtgcgagattgataacttcaacagacctgttcatactttcccaaggctgccttgtcaccagtgtaggtctacaacaaatcagtcaatcacgacaaagaacaagaacccgtgtcaataaaaagtgaataatgatgattaaccaagaactgacaaatatcacaaaataaataaatagaaagtaaataatgcaactactcaaaagtcaaaaccttaagaagctccatctcctcatttgttgggcaaaactttataagtttctctatttgatcaacatctactacagactcatccattgccaggactgcagtctggacgatgcaaagaaaaaaatgtggactattatcattaagctatgaagcgtaatgacttcttacccaggtaattaatgtaggttttgtagcttaccatcatatcaggcagcggcatcgaaagattaataaccttgttattggctctcatatagtaggatctaacattaaaaaccctgtaactggctctcctaaggtcatgctggaaaaccataagagagactatactttcaaaagtctccaccagaaaagagcaagttaaaaaatatatgtgacgcaataaccaaatgtgttaagaatatttcacattaccagtcgaattttttcaggttttgcctcaacaaagaaaagggtctctaattctgatatatcaagttctattgcactggcaaaaaaaaataagaaatgattacttgcaaagcaatggtcaataaaacgtcagtacgtattatcacatagaagtaagagaaaagccaagataaagttaaagtccaatacgtttgtgaatctccatgtcgtctctgtaactcatcccataagctcccctgcaaatcgcttgttattttaacccaatgtaaaggcttcagggaggccctttttttagctggacgtggaaaaccccacaccattcctgcacccgtatgatcaaaggcatcaaacatcggaggtaatcttctaggcataggaggaggacgtggtggtggtggtggtactcttccaggcatcggcgccgccatagcatcagagccagagatctcgacaagcgacattggattaggaacaaacagacgatttattacagtttatatacaagaccaaacagattgttttagatcatgttcgatctaagtcagagcatataagagaatgatcaatcgcataaatagacttgggaaagcacagttgactttgggcaaaagaggttgtccaggtttgaacagtcgagaagattcctagaagaagatagcaaggaaacattgttagcattaaaatgttcttttttaaatttcgatgcaagcaagaagtgcgagatctgctgggccatcattatggtcatgaaaataacctatatttgagtcaaacctagttattttccctttagtagtttactattacacaagtctccaaaacagagcattttggacataatcatgagccctatccgcttccaaggagaaagaaccgatcatgtacgtatcccactcactaatatgctaatccaaagacggttaaggattcggtttatggttttgcttacaaaatatttcaacggtgagaaagagaaagacaaagtgaagctttattggaaaatataaaaaaccttgaaaatttcattattttttgtttttaagattttttttttggaaatttcagaattttcatttttgtcctattttcgttccctaaaaaaaaaaaaaatatgaacgaaaagaaattagcaagaaaaaagtgtaaaaaacagaggataatgatagttattcttctttttttcctataaacatcagagatagaaactacatacaactggacaaaaaaagggtagaaatttcttaagaaacaaattactttgagtttttatttccaaagaaacaacaaaccatttgcaaattctttaaaaacttaattgaatttcgaaaaggccaaattatggcacgtttttattttatttttgtcgtatggcacgtttattatataaatccgtaccattagttatctcctcttttatttcccgcccattaaaacatccaactttcttctgttcttctgagtacgaaaccctaaaaagtgacagag

SEQ ID NO: 1119 - DNA, 3000 bp, Unknown
  misc_feature (1)..( 3000): cDNA_ID_3060769_gDNA_ID_1620361_Annot_ID_154645 3000 nt of promoter + ATG
atgttaactttttttctttttttccttttaaccccatggaatctcgtggttacttgtttcatgggttttcccgggaagattctatacatacatatatagtttcttagaatcttcctggataatttaccattcccatgatgatgatatcatatgtacatacatacatatatattcataaagatataaattaaaaatactatgtaagattaacaatgtgttaagattatccaaaagagaaccacacagctggaattaagcacattagctggatcatttaattcagtgtttcattatttgtcttaaatattattttcttcaagcttttcaaaatataaggtatgagatcatctttgtcttttgtcggtactatttttgttttattttctgtcattttccacttctttagtgtagtaagaacaaaatttgacactaagaacatcaatctcagcaaatatctagactaataagaaaattacattcttgttttgttttgacaggtggagatgatgaatcaagaaaatggatcaatattttaagaatcacaattggaatatcgaaagcccttgatcatcttcatacaggaatgcaaaaaccaatcgtccatggcaatctgaagtccaagaacgttcttctcagttcgagtttcgaacctagaatctctgatttcggtttacatttgctcttgaacctgtctgcaggacaagagattcttgatgtttctgcagctgagggatacaaagctcctgagttaataaagatgaaggacgtgagcaaagagagtgatgtgtatagtcttggtgtgatcatgcttgagctagtctctggtaaagaaccgataaacgagaatgcaactggcgatgatgagttctatcttcctgattttatgaggaatgctgttcttgatcataggttgtctgatttataccgtcctgagattctcggaagtgatgataatctaagtgaagaatgtgtcctcaagtattttcagcttgcaatgtcttgttgctctccttcgccttctcttaggccaaacgtcaaacaagtcttgaggaaacttgaagagattgggaaattttagaagaggtatcatcttttgaataaaagcttctacatagggatggattttacagagaaagataaactactatttagacattagcaagagacttgatgaactggaaagttctttggaatctgtaaaaatgatcctcaggagcatcattgaccaatgacttgaaatcacaaagtttcttgaaagtcttgtctatgaagttgtactttacagcttggtttggaatgtggagcaaaatgtatgatgctgcatctgtctcttcctttacaaaaccgatgacagagaacgcgtaaatccgcctatcggtatagtattcggttctgatcatctcggggaaagcggctgcaagaggctctaaatcaacattatacttcacggaccagcttgagctgttgctttccatttcgtaaacccgtaaatttgaagagctctgattatttacctcaatatagtaaagatttccctgggattcatccagaaacatcagtatcctgggatcaggtagcggttcgtcttcatgttcatgatcagggagtggaagaatcttgatttcctgtgtattgatatcgaaagagaggcaatctctagagctgaaaccgtaccagttaaccgcgccattccagaagactgagtagctgaactctataaaggttgaaggagaggttggaactggaacaactcttctccaaagtccttcattagaggaataaacctctatgtggtaaagttcagagtcagaggcagaagaaaaagagttgttgcttcttcctctgaggcaaaagactttatagtgaggagatcttgaaggatcaaaggctaatgagagtgcgatgtgaccggcgatctgatggagaagagtgtactgttttgtcgtcggattataaacatagtaatttgtgttgaaatggttagaagaagcacaagaacatttgcagaggagaagtccattggttgattgcattatgatcatatctgtttgatgatcagtaaaccaaagtggtaatgatgatgaaatccgttggttggttgcgtcatcatcaagagagacaaagctatacttgatctctcttggtgagtgtaagaaaaagccagagatgggtaaggggtggttggacttgatgacacggtttgagaaaacagggtttgtaatgagcgaaagccagcgtttggatacgcgtttgaatcttaaaagagttttgattggaagaaaagagaggatttgaatcaagacatcatcgatatctgccacaattgtagccgatgaagaagagaaaccaccatttctacggcttctggccgatcttggagcttttgttcttgttcttgaacaagaggacatcgctggagtggtttaaaaagaaacttgtttagggtttattggagtgaggaagaagagagactctggtgttggattatatagagaggtaaggatgtgatgagttatgtttttttggtcaagaagattgtggaggaagctttgcttatcaattattctttgagtttcgttgacattgacctgttctcacttctgaattttgagtcgtgtctaatacaaatcttagcttataaactctgtattcttctgaaacttaaagttttttaaatattgttatctcgaaactgctatagacctgtagaggatcaaggataagttacatgtttaggatgttccaaccacaaacgtgaacaacacgacagttaatttttgaactctttacaagaacaagaaagaaaaaaggtccaaaaaacatgacaacccccaaaaaaagaaaatgtaacgtgacgtagatctctatgactctatcgactcccatcgttttgcatgtagaccccaaacaacgtaaccatccaaaaacaaagtatgagctgaagaattacatcaaaacaaatctcatcagtcatagaaatttaacatttatcacaacatg

SEQ ID NO: 1120 - DNA, 3000 bp, Unknown
  misc_feature (1)..( 3000): cDNA_ID_2130917_gDNA_ID_1620361_Annot_ID_154649 3000 nt of promoter + ATG
gggcgggaaataaaagaggagataactaatggtacggatttatataataaacgtgccatacgacaaaaataaaataaaaacgtgccataatttggccttttcgaaattcaattaagtttttaaagaatttgcaaatggtttgttgtttctttggaaataaaaactcaaagtaatttgtttcttaagaaatttctaccctttttttgtccagttgtatgtagtttctatctctgatgtttataggaaaaaaagaagaataactatcattatcctctgttttttacacttttttcttgctaatttcttttcgttcatattttttttttttttagggaacgaaaataggacaaaaatgaaaattctgaaatttccaaaaaaaaaatcttaaaaacaaaaaataatgaaattttcaaggttttttatattttccaataaagcttcactttgtctttctctttctcaccgttgaaatattttgtaagcaaaaccataaaccgaatccttaaccgtctttggattagcatattagtgagtgggatacgtacatgatcggttctttctccttggaagcggatagggctcatgattatgtccaaaatgctctgttttggagacttgtgtaatagtaaactactaaagggaaaataactaggtttgactcaaatataggttattttcatgaccataatgatggcccagcagatctcgcacttcttgcttgcatcgaaatttaaaaaagaacattttaatgctaacaatgtttccttgctatcttcttctaggaatcttctcgactgttcaaacctggacaacctcttttgcccaaagtcaactgtgctttcccaagtctatttatgcgattgatcattctcttatatgctctgacttagatcgaacatgatctaaaacaatctgtttggtcttgtatataaactgtaataaatcgtctgtttgttcctaatccaatgtcgcttgtcgagatctctggctctgatgctatggcggcgccgatgcctggaagagtaccaccaccaccaccacgtcctcctcctatgcctagaagattacctccgatgtttgatgcctttgatcatacgggtgcaggaatggtgtggggttttccacgtccagctaaaaaaagggcctccctgaagcctttacattgggttaaaataacaagcgatttgcaggggagcttatgggatgagttacagagacgacatggagattcacaaacgtattggactttaactttatcttggcttttctcttacttctatgtgataatacgtactgacgttttattgaccattgctttgcaagtaatcatttcttatttttttttgccagtgcaatagaacttgatatatcagaattagagacccttttctttgttgaggcaaaacctgaaaaaattcgactggtaatgtgaaatattcttaacacatttggttattgcgtcacatatattttttaacttgctcttttctggtggagacttttgaaagtatagtctctcttatggttttccagcatgaccttaggagagccagttacagggtttttaatgttagatcctactatatgagagccaataacaaggttattaatctttcgatgccgctgcctgatatgatggtaagctacaaaacctacattaattacctgggtaagaagtcattacgcttcatagcttaatgataatagtccacatttttttctttgcatcgtccagactgcagtcctggcaatggatgagtctgtagtagatgttgatcaaatagagaaacttataaagttttgcccaacaaatgaggagatggagcttcttaaggttttgacttttgagtagttgcattatttactttctatttatttattttgtgatatttgtcagttcttggttaatcatcattattcactttttattgacacgggttcttgttctttgtcgtgattgactgatttgttgtagacctacactggtgacaaggcagccttgggaaagtatgaacaggtctgttgaagttatcaatctcgcactgtttttggttcctactataaataaatatggttagtaattagcttacttagctaactcattgacttctgccatcaattttgtttatcgcagtacttactagagctaatgaaggtgccacgacttgaggcaaagcttagagtattttccttcaagactcaatttggcactaaggtccggcggttctgttatctgattctttggaggaaaacgttttggttttaccagcgtctatgtaactgtatattcttggttctgttgttactgtgcagataacagaactcaaagaaaggttaaatgtggtaacttctgcgtgtgaggaggtataataattacctctagttcttgtgcagtccatatatgcatttctctttcttagaatttgctccttattcaccaggtccgttcttcagaaaagctaaaagaaattatgaaaaagattccttgcttgggtaacacatcgaaccaaggacctgacaggggtaagtattagggatattttatcttttttgcacaagaccttcaataagatttctttgattcaagaacggcgcctttttgtttctgctgcatcatatatatatattgtttgttctcaaggcaaatcctctgtggttgataagaacctttctttctccagtggaattcaagttggacagattaagtgttaaaaggatgcattatttttgcaaggtaaattactctctttacaaagaaaaagcctctagattctgttttagaaaatggtcttgctcaggtcctgaaactatatatgtattttgcaatagttacctctagtccatatatgaatttctaaacgaaagatgaaaaaaacataacaacaagcaagcaactaaattcttacaaaacggtatgatgaatttcgtttttcttacactttttctcctcatttcttattcatcatgtccgtttcttcacaaaagctaaaagaaattatg

SEQ ID NO: 1121 - DNA, 3000 bp, Unknown
  misc_feature (1)..( 3000): cDNA_ID_3060761_gDNA_ID_1620361_Annot_ID_154648 3000 nt of promoter + ATG
tctaaaatttcccaatctcttcaagtttcctcaagacttgtttgacgtttggcctaagagaaggcgaaggagagcaacaagacattgcaagctgaaaatacttgaggacacattcttcacttagattatcatcacttccgagaatctcaggacggtataaatcagacaacctatgatcaagaacagcattcctcataaaatcaggaagatagaactcatcatcgccagttgcattctcgtttatcggttctttaccagagactagctcaagcatgatcacaccaagactatacacatcactctctttgctcacgtccttcatctttattaactcaggagctttgtatccctcagctgcagaaacatcaagaatctcttgtcctgcagacaggttcaagagcaaatgtaaaccgaaatcagagattctaggttcgaaactcgaactgagaagaacgttcttggacttcagattgccatggacgattggtttttgcattcctgtatgaagatgatcaagggctttcgatattccaattgtgattcttaaaatattgatccattttcttgattcatcatctccacctgtcaaaacaaaacaagaatgtaattttcttattagtctagatatttgctgagattgatgttcttagtgtcaaattttgttcttactacactaaagaagtggaaaatgacagaaaataaaacaaaaatagtaccgacaaaagacaaagatgatctcataccttatattttgaaaagcttgaagaaaataatatttaagacaaataatgaaacactgaattaaatgatccagctaatgtgcttaattccagctgtgtggttctcttttggataatcttaacacattgttaatcttacatagtatttttaatttatatctttatgaatatatatgtatgtatgtacatatgatatcatcatcatgggaatggtaaattatccaggaagattctaagaaactatatatgtatgtatagaatcttcccgggaaaacccatgaaacaagtaaccacgagattccatggggttaaaaggaaaaaaagaaaaaaagttaacattctttgctttctgtcggaaaaaagaaaaagtttggtcctttttaaaacttttttatcaagaaagtagaaaagaaaacagagagacttacttctgatgaagtcggaaagattcccggaaccgaagaaaggatgaaccataagcttctctcctctgtttccagcgtagaaacctaacagaggaaccaaattctcatgtcgaacaaacccaagtgtttcgatgatgccattaaactctttagaatccgatctcactgtacacaccggtctaagaaacctaagaaccctaatcttgccgcttctttgtaaagacgctttgtatagagtaccatagcttgattttccgatgacttctccgggagcatcgaggatatcgcagatcgtgagatcttctccgccttgaaagattacgagttcctctgtttccgaggagaagccttgtttgttgtggtctagtgattcgacgtcgtattgatctgattcagtagatgatgattcttttcttctaaggaagatgataaagaagattactatcaagaatgctgataaagatactcctagtaacaatgttagaagtagagattttctcatctctgaaacacttttttaggtgagagattttttggaagatttatgattatgagtattgtgaggtttgcagggaaaaaaattacagagaaagagagaaagattgatagagacgggagatgaagttgatatataagttcagaggacagatctaagaatatcttttttattttatttccttgtatcaatgttgactttatgatttcttggccttgtaagggtatgtgtatatttgtatttacatatatatgcaaatttactttcctcttatgttctcaaccaattatgatgacctaataattccaaattgtattttcgttacacgtcgacctatatgtacttattttctctctagggttgatgtttttcagtttcacacatgcttgtatactccgtataaaagagtttttggaaaataatatctcgagtagaacgttttagtttctttcaaggtaaaaatattaatgagcgaccgtggtaattaattgtaatgatctcaagaaaaaatgaagaacgttggaagtggtgatgataattaaatgttgggtttgactagtgatggtagttgaagtgcgtggggtacatatttagatccttgattggatgttttatccggcaagttagggtcagactggtggagaggaaataaattgaaggcaagtacatacaactcctaacttgagaatgaaataaattgagaagaaaaaaggatagaggaatacttttctctcttttgttgaggaacctttcttctactaataccaattttttctgtttttcaagctgaaattgttttggaataagtatgattgtgtttagagaaaagactgaaaataatgattgttgagaagtgaaaatcgacatcacgattaatctattgttagctgtaagctttgtctctactccttaattagacagttgacacagatgatgaaattcactttattcaacggctcgaaatcacccatttttggttccactatcccatgtcatcatcattttaaattgttcaccaccaaatacgattgtgaaagcatactcgttcataatcataataaattgcacgatatatattggctagccttttctaagttttctcgtaactaatttatatgtagcactacaaagtactataaaaccatatgagttgaaaaaaagaaacacatcacatgagcccacatattaagttaggagtagttaattagctctagattgagaagatgggaatatagattttctttagcattacattttgaagaaaaatcggaaaaatatcatagcaatattttactaatattgattattgagtacatgggttcaaaataataaaaaaaaa

SEQ ID NO: 1122 - DNA, 798 bp, Unknown
  misc_feature (1)..( 798): cDNA_ID_3060840_gDNA_ID_1620362_Annot_ID_154667 3000 nt of promoter + ATG
gatccaaagtcacttgaaaacccacttaacaatgttgacctttaaaactggaaaagtcaaaacgatgctagtcaaaaacctggttgattacggttggaccggctcatcactcttcacaaacatctctagatgatagcaacgtttagttacaattacaagttacactaaaaagtctgaaattggaatcagtcctaccaaagcaggttataaaacatactactttctttactcgttaaaccaaaaactataataaaacatgcaactttacccaaatgttgaatttccactgaaaaaagtttggaccatttcaacatttacaaaattatataaattgacaagaacacaacaactaaaacttgtagaatatctatggaatactatgtaagtttctatatcctccaactttataaaattcgatttgttgaatcatagaagaaaaaacgaattatgtatatatatatatatacaaaagataagattttatcaaaaaatggcttaacccaaggcaactaactatccggaatttatcaatcaatttcttctccatattaaattccataccataaaacgaatattgcaaaaacattactctatcttatttttattagtagtactaataaatctaggaaacaaataatttaaaatttgacaattgtcttcgtaaattcgtctgcttgatctcttcttcttcttcttcttcttcttcttcttcctcgtcttctcaatttcctcaagctttcaatgccgtgtcgttgacaaaagattaacttgggcaacgtacaggtgcgcacgataatg

SEQ ID NO: 1123 - DNA, 3000 bp, Unknown
  misc_feature (1)..( 3000): cDNA_ID_1442179_gDNA_ID_1620362_Annot_ID_154689 3000 nt of promoter + ATG
ctttcttttgttttagaaatatatacagagaattgatttagttctatttcagaaactcgattttggatcaaattgctttgatatagttcagttttgattagtatgctgctttgacttagtttgtctgtctagagcttagtatctgtatgtataagtgatcttgatccgtcgtagttcaattctgagattgttccaaattgtttcagtagttggatgcatttggctatgttatcaagtaacctctgattaaatgttggtttggttcacagggaagaccacatttgtaaagagacatcttactggagagtttgagaagaagtatgaacgtaagtactctcgcaagcaagccccatcctgaaatatatcacttgtcattaaccttttttattctcacaaaagattctcatgtgttcttgtgtttttgcagccactattggtgttgaggttcatcctcttgatttcttcactaactgtggcaagatccgtttctactgttgggatactgctggccaagagaaatttggtggtcttagggatggttactagtaagtactttcttctcatacaaatcacttaaaaccgaccttgttaataatctagaatcatctactgtcatgctataatctagaatcttctagtgttggaagcttggttatggtttgaagctcaataagatgattgtagctagcaacatgaaaaactattgataactgttgcaaatagtttgtgtttgatacaataatgtgttctgttttgttgcagcatccatggacaatgtgctatcatcatgtttgatgtcacagcacgactgacatacaagaatgttccaacatggcaccgtgatctttgcaggtatgatgaactcactcacagaaactagcatttgttgtatgtggcaaattgctaaacagaaaatgtcatcaaatttcatggtgcagggtttgtgaaaacatcccaattgttctttgtgggaataaagttgatgtgaagaacaggcaagtcaaggccaagcaggtaacattccacaggaagaagaacctccagtattacgagatatctgccaagagcaactacaacttcgagaagccattcttgtaccttgctagaaagctcgccgggtaagaaacaattcatcaattcaaccctcattgtagttattgtgaaacaacggaaaaatgaaaattgagatgttgcttgtttgtctcagggacgctaatcttcactttgtggaatcacctgcccttgctcccccggaagttcaaatcgacttggctgctcagcagcagtaagttctctaaaactaattttgttttaatttgttgctaaggtttgagttcgaggcttttcttcaattaacgattatatatttgtaggcatgaggcggagcttgcagcagcagcaagtcagccacttcctgatgacgatgatgacaccttcgagtagagaaagagagatgtgatctgtcactgattacccgttagggcttgtctgaacttttttttgttcatggtgctatttttatgtgtccgtactttgaaatgaatcgatgacattagtaattttcatttttaagtttttaactgtcgctatgaaagtgaaaaccttttgattacaaaccttacatgcttcacaatttcaattgtatctctattaatcctagccgcgcaatctcatcaattctccacacccaacacacttaatagtttttttttacatcaatcatttcgaaaccacaagttcttagatactcaacaacatttttttttttttttctgtagccaatcgatgttctaaagatcaagaatgttgtattatttctaccacttatggagtcaccaaggatatgtgaagggttttctttgtttatatatttttttaattgcgttttaggacatctccaatagaagtatctaaatgtagatactgatctctatcaaaacagattatggatatcatactagagtacattaaaaatttgcttctaagattttgagttcttggagtcattaacgcatcgctaagggtattttcgtaactttaaataaccccaaataatattttgcttcctccccaagaacctttttgcctctttctacttccgtcggccggattcagagtcataaataaatatataaaaaaaagtttcgatttttgcttttcttcttcgattcattgcgcgaatcatccgtgatgttggtgtctagggttttatcaagagtttctcgcagcgcaggcttacgctcgtctttctcctccgtcgttactccgaagaggaatcagattccgattgttgcaagccgatttcactccctcgttcacggaacccccaacaaggttaggcttttaagctgattttacttgtaattcgttctggattttatcgtcgggtttatgctagggtttaaggggtttgtctaaacaaaagattgttatgttctgattctattgctctggtcttctttattacagtgtcacgaatttaattgtgtatgtctgaatgttaatgttttgattgctctttcatatgtcttaatttggatgtgaaattctggcaatccttgtgaatttgaaagctgagataaagctcattctaggatttgtgtacagtgaatttacttaatttggatcattttttttaatggcagcttgttgcagttccagtgtcgctccgaaaccatggaactctagatttgaatgttcttcaaaggttcggctttttttcctcttcctcagctgaaccgaagggaaatgagagtaacaccgaagtaccaaagaccggcgaaacttctgagaatgtggaggtggggaaagctacaggtgaggcaaaagattcatgtattttgacttagaataaagagagattactgtgtctaatactgaacgagtttctttttctgagttccagatgcagagattgacttcgacgatttgtcaagagacgatttagtgaagcttgtgagtgagaaggaagatcttttgaaggttcagcagaaagacata

SEQ ID NO: 1124 - DNA, 3000 bp, Unknown
  misc_feature (1)..( 3000): cDNA_ID_3060819_gDNA_ID_1620362_Annot_ID_154687 3000 nt of promoter + ATG
aaggaatcaaccgcatcaagctttacgacaccgagacaactgtactaaccgcactcgcgaactccggaatcaaagtcgttgtctctctccccaacgaaaacctcgcttccgccgccgcagatcagagctacaccgacacttgggttcaggacaacataaagaagtacattccagcgacggatatcgaagcaatcgccgttgggaacgaagtgttcgtcgatccgaggaacacgacgacgtatctcgttccagctatgaagaatgttcaaagctctctcgtcaagttcaatctcgacaaatccattaagatctcgtcgccgattgctttaagcgcgttggcgagttcgtatccaccgtcggctggttcgtttaaaccggagttaatcgaaccggttattaaaccgatgcttgatctcctccgcaaaacgtcgtcgcatcttatggtgaatgcttatcctttctttgcttacgcagctaacgccgataagatctcgttggattacgcgttgtttaaggagaacgccgggaatgttgattccggtaacggtttgaagtataacagtctcttagacgctcagatcgacgccgttttcgccgcaatgtccgccgttggatttaacgacgttaagcttgtggtgacagagacaggctggccttctgccggagacgagaacgagattggtgctggttcggctaacgcggcggcgtataacggcgggttagttaaaagagtgttgacgggaaacggaacgccgttaaaaccgaaggagccactaaacgtttatctgttcgctctgtttaacgagaatcagaaaacgggtccgacttctgagagaaactacgggttgttttacccaaacgagaacaaagtgtatgacgtttcgctcaacggtaagtcaacgccggtcaacgataacaaagagaaggttgttccggtgaaaccgtcgctcgtgggacagacgtggtgtgtggcgaatggtaaaacgacgaaggagaagcttcaggaaggtctcgactacgcttgtggcgaaggaggtgctgattgccgtccgattcaaccgggtgccacgtgttataatcctgaatcgttagaagctcacgcttcctacgcgttcaacagttactatcagaagaacgcacgtggagttggcacgtgtaattttggtggtgcagcgtacgtggtctcgcaacctcctagtaagtaccctatctttcctctccaaaattttattttgattagtaagtattttgcatatacagtatagttattttcacgttcttaatagttggaagatggttagataataattatgggagttgggatggtttaacaacaaatgttatttttttgggcttcacttacgtatacagatttataattaaattgtgacgtatagacggaaacgtaaactaaattaattattttttgttggttatgtgtttgtagagtatgggaaatgcgagtttccaacagggcattgaaatggatatagagaagaagaggatcgtgcggatttatttacgttatttattttgatacattgttcttttgtcattcgagtatatgatttgcgtatatttatttttattattgtatatttggttggtttcatcggataaatagtcagattttctttcccccttaagccttaacttctttgctcgtgagtttataaaactgacaaaactttgttgatataaaccattatatcctgcaactgatccaataaacaacattgcaatattattttcaaaatctcaaattgattcgttttgctggtgatcaactgatcatgatccaagcaaaactcaacagtatatattgtccatattgtttcattccaatactccagagtcaaaaccttgagctgcctacttcatcaaacttgattagcgcctaccatcaattgagctacgactacactaccaactcccatatagaagcctgtaactcgaaaaatgggttttgagttatagtttgtcacaaagctctgtgaatacattatactacatgaaaactcatcaagtcttttgatatggaatcttcagaaccaagaatagctttaatgcttttatagttgtgaagtctgttattattctattactgaatgtgtattctcctccagaaatatctaagatcttagatgagtcagtttagacgttttaaatagcaagaatgttctgcttttttatgtcattttaaaaagcttaaggttttggattgtaagcatcgtgtggttgctaatcgaacttccttccctttgcattattgagatagtgtactcgcaaaacacggtggcaatttaaccaaaacatagtacaaacacggtttcaaaattttaaaaacaaaaccatatacagtacttgattaccatcccaagacttacatattcttagatggactatgagtctatggctttttcttcaactactaccaacttgaacttctcctccaaaccaattaagtgggctttcaattggtcatgccttctttccatatcacgagtttcttctagccagcgggagtgatttgatggaaaggtggtcgcattcgtggagtatgcttttgtaagtcttgattggaaaagctgtaaacaatgctctttctgaaatattgagggctagctttggatcgcgccatcgcggctaactcttggcaacaccaatggcttccttgtgtcttcttccatcaaagcgtgttcctttcattaattacattctcttttgtggccttctattatattgttgcgtagttttcagtcttttatttctcttcgttgtatctccgtgttatgtaaaaaatctaaaatttcgtataaaactttaaattttaccaaaaaaataattaaaaacagacaaattctttagaaataaaatctaacaccttttatattttcttcataaacaattgaaccaaaaaaaaaaactcaaatccaactcctctcccctataaaactctatcttattgatgattttgctcaaaatgtagtagtaataaca

SEQ ID NO: 1125 - DNA, 3000 bp, Unknown
  misc_feature (1)..( 3000): cDNA_ID_3060792_gDNA_ID_1620362_Annot_ID_154694 3000 nt of promoter + ATG
tcccaattaagtatcacatatcattagtcaataatctcctttcgcttctcattaccctttttgtagctcattttataattgttaaaatgtgccaaaaagaaagatgagtttgttacgtaattaattaggtaatttagagaagaatacataaaacaaatatagcaagagagaaagataggaattaacaacggcataaaaaacgataaaaacctaagaagagcaatttaatcataaaaaaggggtttaaacatcgacattaagtggaaataacaaatttcaatgactgtgaatttagggaaacaagaatgacaacaaccaaaaaatattgaaattttcaagacttttacatctgaagaaaatataaaagtctaagaataccgcaaactttgggcttagtgtaaaagaaaaactagtaaccctcctaaacctgaagtttgttattttataaagtttaatttggtggttattttgggaattaaatatctaatgtactactaattacccaaagatcttgattagatagtagaagtatatagaacagtatgactttcttttcacgactattgtggcatgctaatgaaagtttggttgttggcttaatataagatatatgggacccacttgtatcttttattctttgtatatcttttgctaattattctttttcatctaacatcatatattcatatcaccaatgaaattcatgcaatacctatccgtatacatgtaacaatcgtcttagaaagaaaaaaagtgacattttcccatatttaaaaacatccattagttaaacttcaattaaatgactagaaaagccttaaagtactaatgattgtagattaagatattcaatttttattttattttcgttactaatgatcgtagattgtagattacgagcataaagaagtgtgtttactgttacgaaaaattaaatctgaatctaaccttttcaacccaaaagtgtaagaacaagcaaattaaggaaatctgaagtcaacatttcagtaagattaatacgtactaaacccgtctcaacctcagagatctcaaatctaaaacttgtaaaaaaaatgggatgccaaaatcatgtttggaggaaaaataatgaaataataacatctagttttaggatagagatgatgaaaatgtagagaaatggatagagagtaaaaaaaaccggcaacatgatgaagaaactagtctcttttactatattgcttcacctctctgttccattggattccatgaattttcggcgtcaatctcgtgccttacccactcttattcctcctatatgctacttttatattttctcaatatagactatttatggagatttaaaccttaatacttaagctagcaaaaaaaaaggagaaccacagatgaatatgccatgtaagaagaaccacgataattagttacggatgagttggtaatttggtatatatattgacaattagaattgctcgtaaaagtttaattatgcatacaccttattttggatcactgaccttacgttcgatcggtgtgattatttaactatacaatgcctttaaggctttaaatattattcgaccatttcatcgtatagaaaccaggaatcaatataaaaaaaagatctaaaattttaatgcatcgtcatgccacatttttgggctagttgataaagattggctgacaatggttaggaccaatacttgggatatgaatgaaactttattggatagaaagcaatggatgaagaatttttgaaacatgcatgaatctaactaagatcgtatcatagctttaatactccttatgtcccctcgggtggtagcctatggaaacacaatcattttccttttgatttttctcatcatgattgttttaagccaaccaataggttcttactcttaagactcattaattaaccctaaccttataatgctattaataatctcataactaattttttttttgtaccatgcatatttgttatatattctcattcatcatactcattacataatcttaacatgcatattactacactaagattaaggaactactatccactgatctaattacccgcgatgagatatgattgacgagtcaacaaacaacacatttcactaattacgatcgagtatcccattcaaatttgaatccagggcatgatgtagaaacaaccaaccaaaattgtttccacaacttacttaaatttttcttatatatatatctcaatcccaaaaaatgaaaataaattaattaataaaattacatcaaaatgaaattaaaaataccaatattccctttaaaattatatattaccatgaaaacaccaaactaatcaaatctcaaaactagtgctgctttatagaaaagtaaagttaacacattatgatatatcaaatttaatgtacttatgtacaaatgctattttgatataaaaaattattaacaattgcgataatacttaacagaaatgtcattttaagatattctcattttaaatcacaacctcaaaaatacttgacaaaaaaaatatcacatcagatattgaaaattatacgtgtacatcatatattgattattgtgtacatcatatatatatgaccaccatatattgttcaactctttactccaattagccctacacaaaatgtggttgacaaaataaaaacaacctacagtgcacaaaatgacaaaccatgtatatatactataacatgtgacacaagtacaccatataattgtattttgttttttgggaaacaaacataatgatgcgttgtttttgcatgaataatcagtatatacaaaatatgtacgcaatggcacatttaataatatgtttccccattcaactaaattcatacatttatcatttcatctctttgtcctcttttcctatatatatgtgtcgtctcctcgagcttgtctcattcacaaaaagaaggtgtagagaaagttaaagagagaaggagagatccatagagaaagagaaagagaatg

SEQ ID NO: 1126 - DNA, 3000 bp, Unknown
  misc_feature (1)..( 3000): cDNA_ID_2130862_gDNA_ID_1620362_Annot_ID_154692 3000 nt of promoter + ATG
aaattgcttcctggatgcaccactttaaaggaggtaatgaacacatggattttattttcaacaaattatacaatttttttttttgtcttatatcagtgtaattcgctaatgaaacaagtaaacaggttgaagaaactctggctaaaagatgtcaagagatggagcaggaagccaaggagcaagcgacagacaacgccatccttgagcagattcgaaaggtcatcatctaattccatatatcatttgaagcattaacatcgttgatcaaacatcatttgcttctttttttttagatggttgaagtagagattcctcaatctttatttgaggaacaaggaagacagttttatggagctaggcttctagagattcaggcaagtgttttcagtgactgttgttgatctcttactctcttttactgtcactcagattcttaaggttgaatatggtgctgcagggaaacatgaagcttaacgaagaccagttggcttctctttcaagtcaaaaagcagtaaatgagtttctagaaactcaaagagagagcatcaccaacataatcaagcagaatatagctgttggagatatcttcaagcgcgaaaacttagaggtatatttatatgcatgatactctgtctccaagaaagaaacaatacatttttagtaacaaaaacattgtcgaaatacttgaatgcagttctcaacagatgaactagttaaagaggtcgaaaactcgatctcagaattcaagaaacataaacaagagttcgacgaggagcgtgtgaaagatcaggttagttctcttgtgaatctaagcactatcagtttcttgagcctatataagataactgaaagagagaggttcttcttgaattggtggttggttaggtacaagagattttagaaggagcaaaagtgcttgaatggttaaaagaccgagccgagattcaatacatcactcgttgattagcatataggtaatgtatgtatgattggcatgttctgtttttgtatgagcaatttggttttgatgtacaattatgattgattttgtcagaagaagagaactttgactatatttgaattgataggtgcaataaattattaacagaaacgttgctttttattttgtaatttaggtcactttttgattctatagtcaatgtgttttattggatatagatggtatagatataagtatttacgtcgatttcatattgaatttgccaactaacattgagtcattttgactatgacttgttttttatttcgacaaaaaaaaaaagagactcttcgtcttttctagtttggttctatatggactaatcttccctctgacctcatcacttttgctacttgtcttagctgtatttacgaactacttcctcatgatccatgttaaattatggaaaggtaaattaaatttcaccaatccgagtaggctagtacttacaccattttcccaactaataataaacacagttcaatacaaaaaaaagaagtttctaaccaactagtgattggatttattaataaggaataatatcgaagatactgctaatttgaaaacagaattttattcaaaatcagcaattctccggagaacttttcatctattttgaatgcaagactataatgtcaaagatgtcaatgtttgatctgagtatttcaaactaacatttataattccagtttactttacagatatctgataattaatttatgtgtttatctttgtcaactgtatttgatattaattcaaaattcctaaaaatgttttatcctcttgcatcatactttaaaacaaatatgaatttcgactgatagcgataataaatatttacaatattgtaattggataatataaatctagtgatatatatatggtccctaaaactggtaaacaactttggttgtacagtaaatgtttttgtagagctacacataacatttacagctttaaataaccataagttaacttggttagagaaaaccaaaaactattgaagcatccgagaatctagtggtgaattataacgatattattgcactgtaagaaaagaaaagaattaaaaaaaaaagtaaataacttgtgtggtcaaacaagcaaagaaccaagtcaaggaagagtaaaaaaagacacaagtctgtctgtgaacagtgtcatgtttgtaaataaagaaggaaactaggggtgaatattttgctaattggagtttccatcgtacttcaaaaaaaaaaaacgattgggtcccacactcacctctccgtctcttccacctccatagatagattttttttccttaagcaaaaaagattttatctcactctcaatagtgttagtattgtcacagagaaagcttcagatctagaagaagaagcagagttcataaagagaaacccattttaaaccctagaaatcaagtgtcaatctcggtaattaaagtttatgcctttttctttttactgttagatttgatcaattttgaggtctttagtctgttccttaaggttttgattgctttggttttatcaccaatgctgtccgattctcttgaagattctgttttttttgttcagagatctgcttcttctttctgtgctttgcttctgcttgatcggattttagatattgcattctgagcttgacttcgtttgctttctgtgtcatggtgaaaaaagggtttttgagcttcgtaagtcaaattttttgtttccgattcttaatgtttggtctgtggagtttaatctttggttagagtgattaagaggttttagattccgaaaaagattctaactttgattgagaatatctacagcgtatcttttggtgtttgttattgttttttcttagcttcgtaatcttagttcagtttcattataatctgatgcagaagaaagatctgatttgagcgatgtataattcattcttagtttagttttagtctctcattggtttttgtttttgatattttctgcaggaaaccttctgattccgcaaca

SEQ ID NO: 1127 - DNA, 3000 bp, Unknown
  misc_feature (1)..( 3000): cDNA_ID_2130856_gDNA_ID_1620362_Annot_ID_154691 3000 nt of promoter + ATG
cttcgattcattgcgcgaatcatccgtgatgttggtgtctagggttttatcaagagtttctcgcagcgcaggcttacgctcgtctttctcctccgtcgttactccgaagaggaatcagattccgattgttgcaagccgatttcactccctcgttcacggaacccccaacaaggttaggcttttaagctgattttacttgtaattcgttctggattttatcgtcgggtttatgctagggtttaaggggtttgtctaaacaaaagattgttatgttctgattctattgctctggtcttctttattacagtgtcacgaatttaattgtgtatgtctgaatgttaatgttttgattgctctttcatatgtcttaatttggatgtgaaattctggcaatccttgtgaatttgaaagctgagataaagctcattctaggatttgtgtacagtgaatttacttaatttggatcattttttttaatggcagcttgttgcagttccagtgtcgctccgaaaccatggaactctagatttgaatgttcttcaaaggttcggctttttttcctcttcctcagctgaaccgaagggaaatgagagtaacaccgaagtaccaaagaccggcgaaacttctgagaatgtggaggtggggaaagctacaggtgaggcaaaagattcatgtattttgacttagaataaagagagattactgtgtctaatactgaacgagtttctttttctgagttccagatgcagagattgacttcgacgatttgtcaagagacgatttagtgaagcttgtgagtgagaaggaagatcttttgaaggttcagcagaaagacataatggaaatgaaagataaatttcttcgcacttatgctgagcagcagaatcttatggacaggactaaccgtaatgctgaaagcgccaaaaagttcgctgtacaggtttacttctctactccgcgaatcctttttcttctttcttgtattaactcgttttgctttgtgtataatccagtgctgaatatgttttgttgtgctgcagaactttgcaacgagccttttggatgtggcggataatcttgaaagagcttcttctgttgtcaaagagagtttttcgaagatcgacacttcaaaagatttggctggtgctactccactgttaaaaaacctattagaaggagtggagatgactgagaaacaattagctgaggtaaaaacgtccattatatatatcttttgaggtaaacaatgataataagactggtgctgagaatgcaattttgtatgtaaaactgcaggtgtttagaaaagctggtttggtgaaagaagatcctttaaatgaaccgtttaatccaaacagacataacgcagtgttccaagtcccagatgcttccaagccaaaaggcacaattgctcatgtcctaaaggtactaaactattcaaaggattgctctctttcttgctttaactcttaagcctatgttaacttttagaaatccacacaatatcatggattctctgccatcattttataactgtttttttttcttccatatttgcagtctggatactcattgtacgatcgagttataaggccagctgaggttggtgttacttgcgccgtggagaatcaagaaggcggcaaagagtctgcagcttgaaatacttaaaacatcgagagttaagcttttgtttttaacatcttcatgagttctttttttagttaatagttctctttctttgcatattcattggaggaacaagattcccataaggtagcatgactatgctctgtacttccagggaagccctggttctgtaacttttacacaaattcataagccaaagccaaactcttggtaaaagcttcaaatcttacatttatataacttcttcctaacttacaaacacactacatagagatctagaagacgtcaaagtggaataaccgcctagcataagatacaatataagacatcatcacagctgaacacattttatagttgctcatcccaaatcaatatgattctcttcattcttcagtcccttcagaattcagacacagtcccagattcaaattaccagtttttgcttcctgcagagtaagtttataaaacacaagtatgaacaaacactaaccactttcattacattgcttgagttttaaatgaagcttaccttagtttggtctgagtctgttaggttcatgtctagctcaacagctttaggtaatggagattcagtgtcgaattcttcagtctcttcaatttcagaatccttagaaatcactttttctctatgctcaagcatcgcaatctacacaaaatcaatcattttccactaatcccacacaactaaaaccctaatttaatgatttggggaaaaaaaacttactggagcgtatctgaatcttcgcttaggcgactcctctgtctcaccggaaccattagcgtcggaggcagtaaccgtcgctgaggtaagtggagtccacttatggagaagtagatggtgtggtgagttactgttgttgctgttgttacgaccgttggatttagatgctctgaaaacaccgacggatgaggttgagacacgtacccacttcttcttccatttccttacacggccactgaacaccgccgtcgccgccggaccactgtatctcgatgacgtccggctcaatctcgatcctacaccttccattctcttctctctcttctcactagccgggaaaatagttgctttatctatcagctagaaaacgctgcgttttgatgtgatatagccacaaacgcggcgtatttatgtgatatggcttcaaaacgcggcgttttagtgagataattgttaattagttgaaacgtagcgttttaaagagagatttgttgattagtcgaaacgcagcgttttaaggagataactctgtttatctgaaagtagaagcaagaagaagtggcgcttcattcattagctctgttcagtataagcaagaagagagagcgaaa

SEQ ID NO: 1128 - DNA, 3000 bp, Unknown
  misc_feature (1)..( 3000): cDNA_ID_2130854_gDNA_ID_1620362_Annot_ID_154690 3000 nt of promoter + ATG
aatgtattgtttctttcttggagacagagtatcatgcatataaatatacctctaagttttcgcgcttgaagatatctccaacagctatattctgcttgattatgttggtgatgctctctctttgagtttctagaaactcatttactgctttttgacttgaaagagaagccaactggtcttcgttaagcttcatgtttccctgcagcaccatattcaaccttaagaatctgagtgacagtaaaagagagtaagagatcaacaacagtcactgaaaacacttgcctgaatctctagaagcctagctccataaaactgtcttccttgttcctcaaataaagattgaggaatctctacttcaaccatctaaaaaaaaagaagcaaatgatgtttgatcaacgatgttaatgcttcaaatgatatatggaattagatgatgacctttcgaatctgctcaaggatggcgttgtctgtcgcttgctccttggcttcctgctccatctcttgacatcttttagccagagtttcttcaacctgtttacttgtttcattagcgaattacactgatataagacaaaaaaaaaaattgtataatttgttgaaaataaaatccatgtgttcattacctcctttaaagtggtgcatccaggaagcaatttatcagcgagtgagtcatctaatgttggtaaatctctgtagaaaagttccttgcagtcaaccttaagaaaacatacacaattagctgtcccaaatatgatctctttgtaatcatctttttctatgtttggtatatagaaagacgagctcacagtgaattgagcacgttggccacgtagactttcttgtttccatgattcaggaaacacaagcgtgaatgactttgattcgcctgctcgaattcctatgattgcatcaaggaatccaggaagtaatctattcccttcttcagtgtcaaagtgaaaacctgttcacacaaccgccaatctcagtattcatttgcaagcaatgatttcaatggactaagagatttcaaccacaaatctctgttgaaatataacagttctaaaacctttgctttcagcatctggaatcgcttgacccgttgacccgtcctcatctatagttgtagcagaaatatcaacaactgctagatctcccacctacacggttttaggacataataaaaaagcaattctagcaactatatcatctttgcagagttaactacgaacaaatgaagccagattcatagccaaattattttaaaaaaacttaaatctataataagctatagtggatgaacttaaatgtaacgactaacgaggtaaaaggtcggtcctattttaactcagcaattagcaaccttacactagtttcagaaaacaatgcaaggacatggggaatttatgcattcctttacctgtagccctcgctcggttacaatcttcaacgcaccaagagacttgtatttctgtcttagttgtctttcacaagctttttttgcatctatctcatcgcctagttctacaacgaccttcatatttttatacccatcctcaggattccattttagttcaggtacaacatcaacaaccacctcataactaaggaacaagagaaaatcagaaaaaaaaaaacaaaaaaaacatgttaagttagttagcatcattactccaaaagatttttagtatatgtgatgaagaaacaaaaacctaagagtcttgagcttagaataagccttctccatatctggaaaactgcttacaatctgtatcgagtcttttaaagcccttccagtcacctacaaaaaccaaaatctcatatgcataatgttccaagacaacaaacaccgaatttagatacaccacaagacttgttcttgccaaatggccaaaacattatattaaaccgcggaagattgaaaaacataaacaaactaatataaacatttgaaaacttactgattccatggcgtgaggaagtgttctctttaagatagattcaacagttgctctcagaacatattgcctcccaacgaaaccaacaataatattctctggaactcttgttttaggacggaatccaggcacctgattcaaaccaagtaaaatcacaatcaacagcaagcattacatggatcaagtttcaacatttcatcttcatgtaagatgaatattagtttacctttgagagtttcatgaattcggtaaggactcgttggtaacaatcttcacagacaatttctggaacttccacactcaatttcacctaaattgaacagtaaatcaaatttcaagtcatgtcaaaactcagaccaaacacaatgctacacatattctccaacaaatagacaaaaaaaaaattgaaagtctcttacacttgaattcgcctgtacagtctccgtgaccttaagatcagctggaagtttgtcttcctttacactagtttcaaccgctggagaagccgccgcgaatagcctaaaattaccaccatgtgacataaaatctccgaaaaatccaatttttctagagacacaagacatgtccaaaggcctgctaattggtttcttcaacctcccaccaaactgtagcacactatctgattggaagagacgggaactaacacgacgtgtaatagacggaagaaacggattaattgccttcaccgtcgtagtcgtgctgataacacagagctccattttcgctctctcttcttgcttatactgaacagagctaatgaatgaagcgccacttcttcttgcttctactttcagataaacagagttatctccttaaaacgctgcgtttcgactaatcaacaaatctctctttaaaacgctacgtttcaactaattaacaattatctcactaaaacgccgcgttttgaagccatatcacataaatacgccgcgtttgtggctatatcacatcaaaacgcagcgttttctagctgatagataaagcaactattttcccggctagtgagaagagagagaagagaatg

SEQ ID NO: 1129 - DNA, 3000 bp, Unknown
  misc_feature (1)..( 3000): cDNA_ID_2130810_gDNA_ID_1620362_Annot_ID_154672 3000 nt of promoter + ATG
tgacgcgtgaaatgtggtgaaaaaggttaagtaaggtttcaagcgatcgatcttttcttggggagaggtgttcttttttccttctcatttcagtaattaattttgtgcatgtacatgcacatgcttattcgcttacgcgttcacaacataagagtaaaaataaattatgtgtgatatacgtaatcaaaacatattaattttagacagcctctcgtactaataatgtagtaatgcatttgtaatatgttaccaggtgtgagagaactatctttggaatatggttgattttacatgtggtgatcatttgaattcattattataggttagcacttaccaatgctaactttcatgttatttttttattgataccatgttaatcagagtgttctatatatatcggtttttttaaaaaaacttcaaattataatgacaacatataacaaaaatagaaaataaagatgaggattctaactctttcgaccaaaggaaaccatgcaaatggctgaactttacggttcagaatcggtgttttttcatggatctccgctaatcgagttttcgtttatgtttttcttgtttgtgttgtattgtagtttttggtggtttttttttttatgttctctgtatgtaaatttcaaaaatgatataaatttaactttttaccaaaaaaatataaactaaaataaaaactgcatatgcgtgacaaaccatgacggaatccatcgctttgcctcatgggacggtctgagatgattcaggcgagatgcaaggagacgcaaaggcgtgattttgattaaaagaaaattacttattgattttatttgtcgtgaaaaccacgaaccactaatttatatatttctaaataaagcaaattgaagctatatacatcctgcctctaatggacacttgctttaacttgaattctaaagttctcgatccgcatacgcccaatcaaccacgattatataatttaatatatgaaaggccatttttacattgtaacttgtaacaatagaataatatgaaaataatctatataagtcaataaataaaagtttttactttagaaacacatgagcaagctttgtaaggctaagttccttccatcgtcactagtcttctgttcatatcagacaatctcttacataaatgatgtacaactccgttctctttagtcttttccatggagtaattcaactctttttttcattctatctctaatcttctaatatggtaccatagttccaagtataattacccgacatatgatttctcatagtatacatatatagtcagtggcggatctagaaccataattaacccgaggcacaacatatttataaatttttaaaataaagtacaatatgaacatttcttaaaagacatgtaaatggaagaaaattttttgaagtgtcaatcaacattggcagtaccttatattagcataattccttcaaacagttatagaaaaagataaataaagtaaaaataagttaaatactgaaaacatttattacttgaaaatagtaaaattaatgagtaataaccaactgactagaaaaaaagtcactctaacatggggcacaacaaacgaattctttcatctacaatacaaattgcacaacaaacttcaaaattatcaaatcttgcatggggcacgtgccccagtacttatacacttgcgtccgccaatgtatatagtccgttttgtagtgatatgtccgagacaatgaatatctcacattacaaatgaaaatacaaggtatatagatctttccactttattttaagttacaaacaaacccgtgattcctgatataaatatgtgtaatggaatccgaattatgatgtccattagtacgatgatgaccattaattaaactaatacaacttgctttgttaaatgtatgtttttgcataaatgtgtacaatctatatttagtttttgaaacagttatataaaatttgaatgtccctatagtagcttacactaatatagctctatacaccaacgatcgaactatcgaagaaaattcttgaataaaccagtcaaagacgtccacaaggcacaaatattatatacggtgttgaagaaagcaatagagagaggtcaacgctttcctccaatttgttaaacaatgtataaactttacgtcaaaaaagtcaaaaccattcccttgttgcttattggtcattttccgacctatacgataatcttattgtttctctacgatatctttctgttgcattaactattaagccacacgcaaagtcgttttacattaacgttagtttaattagataacgttagtttaattagtattatttctacagagtaattgctttcgaaacttttgaaaacaatgtgccatacaggttgttcaaacatggttagatagatgcataaaattacaaaaattatatagagagaatattaaatcacttaaccattgtatcatgaggagatagcttgaaagccctgacaaagaaagagggttcataagttacctaaaaaagaaagaaagagagctcataatattttcatcaaagtaaaaactcaatgtggataaccgtcacatcaagacgaggcagatactagattgagcaaaattctccaatgaaatcacaaatgttgaagcactttaaatttggagatttcactgctttttcactcttagggtggcttacatttattaaagttaaggttatggggaaaaaatataaactttcttaagcagggttgaaaacgcaaaaacataaagaatgcacgtcgttgttagttattttctcccaaatgcgtgtggttttattacttttcaaacggcaagtaaaaaagtcttataaacgacgtcatttagtcgacttgatctcttttgtaagtcatcacatctttgggtcaatcacgaatttggaacatccggttccaaattacggattacacagaccctagcctcttccccaaatcccaattctccattgctttagaagaatcacacaatg

SEQ ID NO: 1130 - DNA, 3000 bp, Unknown
  misc_feature (1)..( 3000): cDNA_ID_1712051_gDNA_ID_1620362_Annot_ID_154679 3000 nt of promoter + ATG
cagtcaacggacaaaacgttgactatttttattgacgccgtggtggatctctgtctttaaccggtatttaaccgcgaaccaggttggtaggccgggttgggttttaagagaattcatgcacttacgaaatttattaatttacctagttaaataaactaaatttggatgtcttttgaatgaaacataatcccaacatatggcagataatgaattcatgaatctttgaatgaaacataattccaatatgtatatgtatgtatgtctatataaatgtacacccaagaccaccacaaatcattctcaataagtattaaaatattacaaatacaaaaggtaagttaaattacaaatatttagaatatgctcctcttatactagattttcgtttttgttttaacaataactttgaaactcgattttagtaggttttgctttttcctgagacttaaatactatagtttgagaaggagttatagaatcctctacaaaaataacaaatgacaaccaaaatggtttcatctcatcgactactcacgttgatggtgtttgctctcctcctcatacctatgatttctggtaacatgtttatttgttatatatattatattttttttcaatatttgttcattttttatcttaaaaataaaactctaaaatattaaattggacatttttgcttttaaattttttgttgatgaatttgtttatgaaccgaataggacaatcatcaaaatgtacaaaaggatgtacgagcacaccagaatgcaatataaaatgcatgaagaaaggcggagggcattgtcaagcatatataggcagaagtcacggccgattggctattgaaaattattgttgctgcaataattattcaaattctcccatctccagtccggtcatgaattgattgatctcttattctatatgtactctcgattataagaatcaaaaacgtatgttcaaataataataactgatattatctcatccccccccctctcatcatgttgtttgatgtacatgtataagaaaactacatcgatcggctcgacttatagttttgtttattgtgtcatcaggacatcgattttgtcttacctctctaatcttcgcaaccaaaaaaactacttctttcaatgttcacttccaaagatgattttgtaaatacgaaaacttatgcatgaaactgtaaatacaaaatcaatcgccaagcataatataagatcatgtatttactctttttatatcaaggtacatatatatttctgagattcctacgttttcatggaatatagaaataaattgactatatatatatacaataagataatattttggggtgttttctttatatgtagagaggatgtgcgagtgggggggagggaagaaggaagagttccttcgacggcggaggagttcacaagacaaggtgttgctagccagacaatgatgataagagattgtagaaggtttatgacggagctgcagcggctgcaaacgtctctggtgattctgagatggaggtggagaaagtaaaccgaacttgtttaaaggaaacgaatatctagtttgttttgcacaagtacaaacgtcccatgtctttgaatcaaaattactgctagaaagaaaaaaaaaaaaatcgacaacatctccaaagttttatttcaaggacccgaaacgacaatgcctaacttccatggattggtggacaaggctaacgaaagaagaaaatattgattagtggagaaattggttgtcgttcccaaaaaaagttagtaactcttacgatatgagaagaaaattagtacctcttacattttttttaacaaagataaatgttgtgattagttctgtttgaaaggactaaacccttacatgaaaagtttaacatgttctacatagtttggatttgtcacttaaaataatattggtgcttaaactcttacttttgtgataatatttttctcgagattgtagtaaaagatgaagaaaggatatcttgtgtaatctggatacaacacaatctggatatcttattgtcaatctctatgtattgtgagaagttgatactaacaagatgatttgtgcaagtagatacaaatcttgcatgtgtaagttgatactcgacgataccttgaaactgattgactgtttgttgatcggatcataaccaaaaatttggataggcaacaacactgaactatagactttaccggctatctcgacaaaatgatcatcatgacgagatcaacatggatcataatcaaagtatacgtcgtcgtaccgttcaactgccaccgtatcctggagcttagcttcgagggtcgaaataaagtgctctatttctgtcttcttgagcttttaactcttccaattaccgaacaatttccgacgaatctccgacgtccgactccatcacgacaatgtttaaagagccaatagtagaaccctagaggttaaagcagcaaagaagacgatgtcagtcaacgggacaaaacgtacgttgactatttttattgtcattaaccggatttaaccgcgaaccagattggtagaccggttgggtttttaagagaattcatgaacttacgaatttatttatttacctattaaaataaactaaatttgaatgaaatataatcccaatgacagataagaataaataatgaaacattttgactaaaattattatctgacccaaataagactataaaaaagaagaaaaaatccttgaataatatggaagatttattatttacatatatatatatatatgtatatacgtatgtctatataaatgtacatccaagaccaccacaaatcattctcaataagtactgaaatattacaaatacaaaaggtaagtcaaaaataatataaaatatttagaatatgttactagatttttgtttttgttataacaataactttgaaattcgcttttaataggttttgagaagcaggtatagaatcatcttgaaagaataacaaataacaaccaaa

SEQ ID NO: 1131 - DNA, 3000 bp, Unknown
  misc_feature (1)..( 3000): cDNA_ID_2130832_gDNA_ID_1620362_Annot_ID_154682 3000 nt of promoter + ATG
atttgatcttaaaccagcccaatagcccattacgaatgcttgattaaacggcagtgttttcatgtacgaattccacgctctcctagccgtcggatgataagctacaatgattatgagccgttcgatatatcaccacaagaatctgtagatcaaaagtgagtgcgatcaagaactggtttcagtcacttttttgacaagtctctctttctcaaaagtcaaccccttattttgcaatactgtattgtgaatctctctatcaggccttcgtatttctcacagactggagtttttgtttcataaaatctgataaaaggaaagatgtctaaccctcaagatgacaagcccatcgaccaagaacaagaagctcatgtcattctcaaggtcaagagccaggttttttcactgtgttccctctttaatctccttgaaattttctgtcgttgctgcttggttgataatactatatatacagtttcttgatatgaaaactttgatgatactcttttccaaactgtgatgatctaaagtatagagtgattaaaatcttttttcttgattggtgatactaaggatggagacgaagtcttatttaagaacaaaaaaagcgctccacttaaaaagctcatgtatgtttactgcgaccgccgaggtttgaaattagacgcattcgctttcatttttaatggagctcgtataggtggcctggagactccagatgaggcaaatcactctctttttcatttcccttttacaatttatatgtttgtcaaaagtgtatcatttactaaaccaagattctccaattttaaagcttgatatggaagatggagatgtgatagatgcgtgccgggcgatgagtggtggtctacgagcaaatcagcgtcagtggtcttatatgcttttcgatcataatgggctttaattaggaataatttggctggctttgtgatatttgactactttcttcaagcaaaattacttgaagtttaaatcatggtcggttatcgtgtgtgtaaatgactcatgagtgattggatcttatgaattatgatattaatggtatctggttacggatttttagaatctttgtactttgttaattttacaaccgtgaataaacaactcatcaaaacctctaaaactcaagttggctaattgtaaaaggtcacacaacaaaaccatattaaacaattgaaatctttactggtttgatcaaaatcaaacggttcactttgaacatcttcacttttcccaactcaaacaaatctactcgaaagctgagattttcacattttaaaattcttgggtagacacagaagtaaccagcccatttgagcccattaagaatgctaaaacgacatcattttaagttagagattatactcactcacagccgtcgaatgatatagatcaatgattatgaaccgttagataaacaagaatccgatgcgaccaaagatagtggtttcagtcttttttattctctgccgagtctctctctctccctcaaaccctcaagttctgcaatcccgcgaatctctcttagggcttcgcttatatcgcagatcgaagttcttgtttccaatcgccgaccgtataatctgataataaagtaagatgtctgctactccggaagaagacaagaagcctgaccaaggagctcacatcaatctcaaagtcaagggacaggttttctatttctcactcactctctcgacttctatttcttgcattgtgtaacgattcgttgtctggttaaagttttgagtgtgattaggatctttatagcttctgattgcttcaattctagggttttgagtttgtctgcgttattcccaatttctattctggttagcttgtctatgaggtagtgattattgtgtaagcgtgacttttaattggcttaaatttgaagcaaacaaaagttatctgagaattgtgaattatgttttgactcataattgtagcaaacaaaacattactactcttgtatgtgtgagggtgtgtattggtggagacagtgattatcttcgaagaaattgttgtaatgttgtgagttgtgactaagctaacaatttataaccttgaactctcactatagcctattgtagttatgcttttggagtatggagcatttgtttcatgaaagcttttcgttgctatgatttgttttgcttatgtttctgtacccattggtaggcatttttcgttgttggtacttggttggttatagatacagtttttggtattgagaaaatcgtatataatactcttcttgaagtaacaatcattggtaatttttcttgtgtaggatggtaatgaagtcttctttaggatcaagagaagcactcagctcaaaaaactgatgaatgcttactgtgaccgtcagtctgtggatttcaactcaattgctttcttgtttgatggtcgtcgtcttcgtgccgagcagactccagatgaggtaacatcactctctgtaccccattctcttttactgttttccgtttttcaaagttgtatgatttccttaaccgagaatcttcaattttacagcttgaaatggaagatggagatgagatcgatgcaatgcttcatcagactggtggtggtgctaaaaatggcctgaagctcttctgcttttagtggcggttattttaatggttttccataagattgtgtgatattaatggatttagtgaatcggctttagattaaatttggcaggctttgttttactttgaccagtttctacttactggtgaaagtctatgtgaatcatgaaacttattggatcttaaaatattaatgggcttgtttatggattttggaatctttcgattggctttagcttaaagtaaacgcacaagttgccgagtatggtaattagtcaaacttgctccccacggttccttggatcccaagtttctactggctatataagaacagttctcttcttttttttccataagctccggtttctctgtaccctcgtaaataatg

SEQ ID NO: 1132 - DNA, 3000 bp, Unknown
  misc_feature (1)..( 3000): cDNA_ID_3060823_gDNA_ID_1620362_Annot_ID_154686 3000 nt of promoter + ATG
tcaagaaaaaagattttaatcactctatactttagatcatcacagtttggaaaagagtatcatcaaagttttcatatcaagaaactgtatatatagtattatcaaccaagcagcaacgacagaaaatttcaaggagattaaagagggaacacagtgaaaaaacctggctcttgaccttgagaatgacatgagcttcttgttcttggtcgatgggcttgtcatcttgagggttagacatctttccttttatcagattttatgaaacaaaaactccagtctgtgagaaatacgaaggcctgatagagagattcacaatacagtattgcaaaataaggggttgacttttgagaaagagagacttgtcaaaaaagtgactgaaaccagttcttgatcgcactcacttttgatctacagattcttgtggtgatatatcgaacggctcataatcattgtagcttatcatccgacggctaggagagcgtggaattcgtacatgaaaacactgccgtttaatcaagcattcgtaatgggctattgggctggtttaagatcaaatatgctcatatgtgggcttaattacttctacacagtatataaagttggaacccattttcgtgaaccgaccaaatagtttttagaaaatttataaatcatatttaaaaataaaatctaattaccacggtaatctaataatttcaaaaaaaatacaacagttagaaacttttaaaaatcttagcaaacataacttttgtggtattttaaaaagaaactcaaaattatgatattatttgacaaagtttagggcaagctctctttataaaatttatatatttcttgatgttctaaacttctaatgcatgcatggttattatttaatattaaaaaataatgtacgtcgaccgtcatagtgtgtaaatggttagtctatgtttcgtgacgacttctatttcggcccgacataatatatttccagtttttaatttgataaactaataggcattgtatcgtaacgtaaagatcagggacaatgctaacattcctatctaaaactcaatttgttggacagcatccaagtgacctaccacattgaattctttctcttggttgataagaaactaataatgatgatgttatatttatacgaatatattagttaacgtttatatttagaaattcgtcataaactcataatagttacaaataagtcaatctgaaggtgacacacctctctggatattataatgttttcaattttcatatggacttgtcattgtgtttcattttcaatttcatgtaccgacttaagacttaagggccttgtcgaaacataccgtacgatgtcgacaacctccatagatacattattaaattattgttactttcataatccaaaaattaaattgttatactaaagtatatgtaaaccagcatacattgatacatataagattaccacctagtggacaagttgatacacaaacaaaaacatgtatataatcatcaaatacaatattaccaaatgatgatgtctattattttctcttttgatagtggagttattatgatgtctactcttaattagtttcattattcaggtctcaatcaccgaagataaaactatatttcaaactgtagtagtaattaccgtatgtgtattaacattctatgcctatatgtacataaccgttaatattcggccacaattattaaattcaaataaatctaaaaagcatctttcaccaagtaattagtaaaactagccgtaaatgtcatccaaaattcttggttttacatcagaaggaaacattaattgcttagcgatagagttctatttgtataggacaactaaactctacaaatatcgttttttgtttatccatggacggagatggaccatttagattaattcattattatactactggaaaataatttgaggtgtttgcttagcttagctaaccttaaaatgttcatttttcctccgcacatctaaacgcgttcattagcccaatttgctaagtcaaaatattagttacaaccaacttgtgaatcagtcaatgttactatcaaatatttcatataaatctatacttggatttacaaatttatcgaaacatatctaaacacaattattaacataataactccaaccattcaaaataataataaaaaggacggaatatttaggacgtacgaaaaagagacgttggaaatcagagagctcaacgttcaaaatttggtacatgtatagaacaatgaatgacacatggccccattgtagattcttcatttctcgacgagacccagttaccattaatttacataataattctaattccgaccaatcaatgcatcacattatcgattaataattatcactcctccgaccagtttttttcacctattaatcctaactttaacggataattagcagctgttttcaaccagtgattaataggtatttattaccagctgatactacatgttttatttgcctcagtgcccaaatcccaataattatggaacgtattaaaagtgttgttgcaaatgcaattgtatgtctaaacaaattcgttttgttatacaattcattttatgcagaacataacgttaataaaatcccccaaaaaaggaaaaaagctgcagtaaaatcgaccctaattaattaaaagtgaatgctaattttggcacgtacccccacaatctctgacaacatttggtacaacaatctccaatcagtacacgactgaaacggtcaaatccacaattaaaataatatttactttagacacgtcatcgagttgaaatatttacatcacaaaaccgtacagttaaaaaaaacaaagtcatccccaatatctcacgtgggtcctacccactacatccacctccctcgttctccttcttcttcgtctctctatataaacaccatctttagcttctccttcaccggaatacaaaaactgaaacctttctctatttatctctctatacacaaca

SEQ ID NO: 1133 - DNA, 3000 bp, Unknown
  misc_feature (1)..( 3000): cDNA_ID_2109489_gDNA_ID_1620362_Annot_ID_154675 3000 nt of promoter + ATG
atgtaagagattgtctgatatgaacagaagactagtgacgatggaaggaacttagccttacaaagcttgctcatgtgtttctaaagtaaaaacttttatttattgacttatatagattattttcatattattctattgttacaagttacaatgtaaaaatggcctttcatatattaaattatataatcgtggttgattgggcgtatgcggatcgagaactttagaattcaagttaaagcaagtgtccattagaggcaggatgtatatagcttcaatttgctttatttagaaatatataaattagtggttcgtggttttcacgacaaataaaatcaataagtaattttcttttaatcaaaatcacgcctttgcgtctccttgcatctcgcctgaatcatctcagaccgtcccatgaggcaaagcgatggattccgtcatggtttgtcacgcatatgcagtttttattttagtttatatttttttggtaaaaagttaaatttatatcatttttgaaatttacatacagagaacataaaaaaaaaaaccaccaaaaactacaatacaacacaaacaagaaaaacataaacgaaaactcgattagcggagatccatgaaaaaacaccgattctgaaccgtaaagttcagccatttgcatggtttcctttggtcgaaagagttagaatcctcatctttattttctatttttgttatatgttgtcattataatttgaagtttttttaaaaaaaccgatatatatagaacactctgattaacatggtatcaataaaaaaataacatgaaagttagcattggtaagtgctaacctataataatgaattcaaatgatcaccacatgtaaaatcaaccatattccaaagatagttctctcacacctggtaacatattacaaatgcattactacattattagtacgagaggctgtctaaaattaatatgttttgattacgtatatcacacataatttatttttactcttatgttgtgaacgcgtaagcgaataagcatgtgcatgtacatgcacaaaattaattactgaaatgagaaggaaaaaagaacacctctccccaagaaaagatcgatcgcttgaaaccttacttaacctttttcaccacatttcacgcgtcaactcgtctcgatcacaactataaaccctaagtccaccctctcctcaattcttcacagctcaatctctctctctctctcccaaattctcttcctagctctctacattcacataatttaaacaagaagaagaagaagaaggagacaaagaaaggaagaagaacaatatatctcgctgtaactcactaacacattcatagatcaagagaaaatggcccatttcatgaagctactcgtgacaattgcattaacaaccgtggtcacaatcgccatcgtcaccaccaaaaccaccaccaagaccgcaacatttgctctcgaagaccctttcaaggaccttacaccaccaggaacgatcaagatcagaccaagtcggttcttggcagaaaaagtcgacaagggtaaagaaccaaaagcccgtaacccaaacgcagctgaccattgcaacaaggacaatgaaatctgtagcagcagcgattacagcacaggagcaaacgctacaatggcttgttgcaacaacaagtgtatggatttatcaaccgacgacaaaaactgcggtttatgtaagaacaaatgcaagttcgggcaaacgtgttgtcgtggtcagtgcgtttacgtggcctacgataaacgccattgcggtgagtgtaaccatcgttgcgatctcggcgagttctgcgtctacggtctctgtaactacgcgtgatgaatcaatcattcattcacgccaacgtaaaaaaaaaaaaaaaaaaaaaatttaactaaaattatacggatgatttatttacatggacgctgattaaaaaaggtcggtccaattaattatttacttaataattaattaaagtgttgtgtgtatttttggattcccataatgttttgaggggtatataaaggagattattttttctattttcaatgtctacgaataaaatggaacatcctcgttccaatatatactgctgttttattactaaggtttataattggagtgtataaaaacactccaaaataatatcatgaataatgtttttatacgtataatacataaaataaaatctctttcctcatagctggtcctctgattactatcaaacatatgattcaattgcaaatttgcaattattaatgcaagaagaatgagtggaacattaaagttagatcaaaaactcttcattacaaacataaataaattcattttggtgctttctaaattaatttattgatcattttttggtatgtagctaggggttaactcatcaggaagaacattacctagatgatgtcattgtcaaagtcaataggttgacttatccgatggatactaatccaacgggtcaaaaagtgccaaatcgggtcaaaatcaaaaacctcaaagatgacccgtgaacacttgtttttatcttcctcacaaaatccacacgtccaaatcacaacctcaaaatctcacacatcaaacacgtgaatttgctctctttctggttcactcacctaccattactataagtctgaaagagtgattgaaacccacctcgaaaaatctatccttttttttgttttccttctccggcgaatccccggggagattggtaatcggtaatcacggctatttacgggataaagccacggcctttgagctttcatgtccaacgaaagggttgtttaatcataactaatcctttgcctcacggaggacgtggagctctgccgtctgaaggcggcagtccctccgatctcctcttcctcgccggaggcggttccacaaatagccactaaccctaaccctttttctaattaggtttttagttcttagagtcctgtattaatctgttatttcgagattataatatttgtgagca

SEQ ID NO: 1134 - DNA, 3000 bp, Unknown
  misc_feature (1)..( 3000): cDNA_ID_2130798_gDNA_ID_1620362_Annot_ID_154668 3000 nt of promoter + ATG
taccttttctatctctgaagtcttagtgtttatatccttgtaggaaggtccgctgttgacggaagatcttattagagaaacagaggaattagtacttcggacagggaggtcagtgccatcttttatttgttgtagtttgatataaaatttacactccacagcgattctggtgattgaaagtgaaccaatctgctaatgaattctgagttggtgattgaaagaccagtaacagtcagttagattgaaataatagacgtattatctggctgaataatatataattccgtttcgttattcagacatccaattatcttgatagattggattattgtctttcttatggttcagcatgggggctggatgttctcaactcttgtctgacatgcaggctttcaaggtgatcatcttaatgaataatcttattactgtttggtatataagcactcatgtaaggaaagaaattgtagctgatatgaaattgataagatctgtacctctgtattaggcagcaaatcctggctgtattttggaagattttgtgagatggcactcgccaccagactggactgaaaatggtaacatgtctggagatgactcttcacccgttcgaggtcaattaagtacccggatgcagaaagaaggtgtgaccatttctcagtttctctatgttgttaaaccattactgtaatatttcaagtcgtattctcaactggtcttaccaacgttttaaaaaaaatattattaggtaatttatggcgtgagctgtgggaaacagctaaaccactccctgctgttaaacaagcacctctctttgatgaagatttagctgtgtaagtttcaatagcatgtcctcttaaacgtagtgaaatctgtatttgatcactcatggagatcttgtccatttctcatttaacttatacagagaaggaatcttgaattatttggaagacattccagctgctgaactttttgagcagctgtttacttcgctagtaagtttttcccaacaaattgcgtatttttctttttgtgaagctttctatctgtaaggtcaatctcaaattctctcacttgcgctacgttaaatggatgtcattggttacacagttaaggttttagctgtaaatagcactttgacgattggattggttaaaaatatttcaggtttccctggggtttgtgatggtggagccagttttagctacaaacgatgacttgtcaaagcttttctttgaatgcaaggattatgtagtcgctatttgtcaggggggcgcatggaccgataagcttgatgatctatgccaggtactttactagagagctttgcacagattcaaaaacgtatctacatgcttggaaatctatcactttaatagagttaagaatgttttatcagatgccaaagtaaggccatgtggatatgaacattatgctcactaatcatacatcctaattgcatttatttggtcataataggtatacgagaccgtggaaacaatgttattacgtccagaagaagttttgagatcaatgaaacaaacagaggagtcgccatcaagtggcagcgaaacgaaacggcggtttaagcggctaggtttcatctttcgtggtagtaaagaaagaaagcagacaagagttccatcagaaactgaacagaaaagcaccgaacctagcccacgccaatcattctctagtctttttgatggcaagtcgtctctgttttcaaagagacctcctagacctgaaaatgtgacgcttgtctgaatccatattatttatttgatttgtttcatctgcttttaagtcatttctcagttttttgtattcttcttctggggttttaggttgttaagttgatcaattggttggtaactgtaaagttatcttatttaaaacatttctgaaggtatggtgaaatgcaaataaatggaaatgaataagatgtgtaaaagcttttagaacatttgtgtaaattattagatttctgagatgctgttttagatggttgcctaaaattaagaagttgaaagagttgaatgaacattcaaaccaattttttaccatttaagataaataagttggaaaaatgattcaacctaaaaagttgaaaaaatgaattaattataaagaattttttctcaacttgttcatctcctattttgcagagaaatgaactgaattttattcatttcttttttcaactcaaatttttcatccatatgcaaccatttgcaccttaaggtttctacacaagatatacataagaaaaatcaaaactctctagagttggttactttcccacaataaacttttcctaatgtttaggttgttgtttgatcaattccttggtaactgtaagtaaattgtttcattataacatttctcaaagtgatggcaaaaaaaaagaaaaaaaacatttctcaaagaaaataacatgggccgttgggcctatggactatttgatgttactaaaacgcagacgttttcgagagttcatattactgaatccaaatttagaagcgtaataataatcagagatcttataataataatgttcatattattcgttttacacaaggaaataagacacgtgtaaaatcctctgaattttccatattctttcgtgacttgctcaaagcagagaaaggtcatatgcttttctccagttcctctctctgtctatctctctcctccttcaataatttctgcaaaccctaactttctcattcggcgctcaagtttctctccaccccttcggtgagatttcaattcctcggttttctcttgttttcattttcgtcttgttgctgaaagtcacgaatctgagcagtttttatgttttgaaagccataatagcaggatttaggtttctgattttgagaaagtagtgttgaggatgaacagattccattttccgacgatttttgattgattgtgttgcgtttatgattacgagtgttgaatctcaccgacatcttgttgttacagagatttggtgcg

SEQ ID NO: 1135 - DNA, 661 bp, Unknown
  misc_feature (1)..( 661): cDNA_ID_3060879_gDNA_ID_1620363_Annot_ID_154713 3000 nt of promoter + ATG
gatctctcatcttgttcataatacttttttctcctctaaccaactagacagtctatgaaactcaaataatataatttttaattttcggtcaaaactgtaaaaacatgtcaaaatcaaataatattttttttttgccaaatcagaaaattacatttttccgccaatgtaaaaataatttttagagtgacattgtcagtataaatcctaatttatgttttaatattatagctaaagtctataattatttttggctgcttcttgcatattattattctaagtttggtttttgtttttatctgagaaatttctactatataatgaatatttgaaactgtagtctatatatttagatttaatattttatacaacaagttgatatggccgagttggtctaaggcgccagattaaggttctggtccgaaagggcgtgggttcaaatcccactgtcaacattcacttttttctctttttccattatttacttgctgacgtgtactcaccttatcttacattatttgatgacgtgtaattttagtggtcactaatcgagagagtgagacgaaacgataaggagaagaacttcttcttcaacctcagaaaaccctaatttctccatttcgaaactccaacgaattctctggtgattttaccaatggcgatg

SEQ ID NO: 1136 - DNA, 3000 bp, Unknown
  misc_feature (1)..( 3000): cDNA_ID_2131097_gDNA_ID_1620363_Annot_ID_154725 3000 nt of promoter + ATG
gaaccaagtcgttgaagatgttgagtgatcagaaaacgaagcttctcttcgccgttgatggtagagccaagttcgagcctcaactgccaaaagggtacttcggaaatggaattgttctcacaaactccatctgtgaagctggggagcttatcgaaaaaccgttgagtttcgcggtgggattagtcagagaagccattaagatggtaactgatgggtacatgagatctgctattgattacttcgaagtcacgagagcaagaccttctctttcctcgactcttctgatcactacatggtcaagattgggtttccacacgacagatttcggttggggagaaccgattttatccggtccagtagctttgcctgagaaagaagtaactctgtttttgtctcatggagaacagaggagaagcatcaatgtgcttcttggacttcccgctacagccatggatgtgtttcaagaacagtttttacagatataatatgaacaacgacaaaatacaaatatctggcaattattgtcaaaacctattcgttttactctgtttttcttgcttccttttttttttatctttttgatttatgctgaattattattgttatcttcatcttaaacttgtctgtatcttgcatcaagtttcaaccataaatttatattatttcaaactatattgtaataatattattacttgaactgtttcagagatgttgatgtttttaacaaactaaaactcatatataaataaaataacaaaagtctaaagataaaatacagaggacaagaagacagaacagagtgatcctgttcttgtcttaaggacaaagttagagtagaaacaaacaaagacttagattattgcagtttgttctctattacttgccacacaaatgaagattcttctctaaaggtctgaaatttaaagcagtaaacccatagacacagagattagatatcttggacttaaacacaacctgctccgttgtagttctgaagccaggaacgttgcaggaatctttggacctaccgatcaagcttgcttgacaggaagccattagagaatctttctttgcttcagcggcgcaagcaacgccttccagagacgttatgtctagcttgtagagtccaagctcatttgtggttcgatttgcagagaacgtaatcatctctctagttctcgatgaagctgaattgaatctgcagattattctcacttccacacctgtatttttttgttcagttaaaacaaaagtgagagacattttaactataatttcaaacaatgttgataagattctttaccgggaatgaaatagctgtgattggagaaactgttgttggagcagacgtcgcagtaaacaagacccattacagtgatctttccatttggtttggctgaagaatgtttcagagacagagagtttaaggacagaagttgcagaagtaacagaagcattatcagtttctgcttcatgttcacaagtttcagtttttttctttatccttggataaacacttgtttacagatgaggtttcctttttgtttatgtggttgatgaaagaaacagacaaagaatgggccaagtggttaaagacaaaagaacaaacaaagatcaaacagtaactccattcaaacaaagcttcaagcttgtcttttttataaaactcaagactcttgtggaaaaagagatgagtaaagagaggcacaaagagatgagaggccaattaaaggaaaagtagagaaactgagagattggttggttaggtttaacatttattgagctctcatgctctctattttaagggtttttgtctatgaatccccttataaaaaatggctaaaactggaaaatggaagggagaaggtaagccactagtgtgtatatatatgtgtatggaccactgaaagtgaagtgtaaacatcatcaattcatcagcataaacaccaagaaagtagtcagaggatatggctctttaaatatcaatacaagaagccaaactatgatattttcccggtttactctcggttgtggctgaattctggaaagagaatttcaggttaactaactatacaaagataagctcacattatagacttttgttcgtcacattatagaacagcataagactttattgcataacaatttcaggtttaagtgtactagagaagataagcttacattacaagttcatcagttggaaacaatatatgggcttgagctttaaagaaggcccattaagcttgaaattgttcttcatgtaagattgctgcagattttactttaattttttttttctttttttcttttgcccttaaattcttgtaatgcttctaggtgactccatccactttatgtgttgtttcccaatcatttctattttcaactttattttttcctttcacaaattattttaagttttaacattattttcttcaacatacgaaatttatacagtagtttttttttgcaggtacatataaatcaatagttgagaaaaagtggaaaacaatagagataaaaaaaattagatgtaaattcgctgtaaaacaaaatgtttaaatttcttttccgttatcgaatctcttttatgaataacaaggtcgagtactcaaggtaaggaaacagaccattagaaaagtgccacgtcagcttatttcgttcttcacttttagcttctgaaaagtactttacctgaactaaaacgacggtgacagactgactccagtagctgctaacagtcgatttttaaaatattatatttatttgcaggaaaaaaaaaaagtgaaggaagaagaagaagttggagaagccaagagcaaatctaattctctgactactctcattttcatgtcggagacttgccgaaatctaaagaatttcttcaacggagactgaaaagctttctcttttcttctttcgttatcttcgttttagtgttttcccctttgcttacatttgaagaaatcgagagcaagcgatagaaagtgagagagagag

SEQ ID NO: 1137 - DNA, 3000 bp, Unknown
  misc_feature (1)..( 3000): cDNA_ID_3060869_gDNA_ID_1620363_Annot_ID_154727 3000 nt of promoter + ATG
gtatatcttcatgtcactctttatacaaggatgagacagggatttacaagaacctgcttcaagagacagcacatagagctggtcttgatctaccaatgtacacaagtgtgagatcaggatcttgtcacttcccaggtttctcttgtactgttgaacttgctgggatgacgtttacaggagaatcagcaaagacaaagaaacaagctgagaaaaacgcagccattgcagcttggtcctctttgaagaaaagtatatataactatcttccaaattgttccatcaaccccaaaaaagcttctcacttttctacttgaaaccatttttctgtttctctactgtgcagtgtcaagcttggattcacaagatgaagagaaggaacaagaagcagtagcaagagtactctcaagatttaaacccaaagaagtaagaagacgagagacaacaaaccaatggagaagaagaacaagtcaacaagattcaaacaaggatttgttgattgagagattgagatggatcaatcttttgaccaatcaagcttcttcatcatcatcaacatcaacaccgaatcaacacaaaaactccagtttcatctctctaattcccccaccaccaccacctaaatcctccaaaattttgccatttatccagcaatacaaagacagatcatcacaagaagctaagacagagacagcgacagagatgatcaacagcaaagccaaagtcaatgaaacatcaaccagattgagtaagcaaatgcccttttccgacatgaacagatacaactttgtcggagggtgtagcgtaaacccttatagtctggctccagcggttcaaatgagatcagtgattccagttttcgcagctccaccaccgaaaccaaaccccaaccttaacccatcatcattatcatcatcagtcaatgaattcacctcatccaataattcctgctctgttctgaatacgccgggattgggaggccaagagaagaagaatctaactcgcgaaatgatcaaacttggttcagaatcgagaattttggatcaaacccatgatagttagctaaatttggttaatgggttaatctcaaattaaatccttgtcaagtgtttgtcacatagataaattatagaccagtatgtttccgtttcttgaatgtgttcttgttttttttgaagtgtttgaattttctaaaagtccgacatgaactttgaatgcttgcgaattgcacagagaacgaaaacaaagagagagcattaattagggaagaagatgaagaagagaaatgggagtttgcaagaaaacaattaatgggttttgttttgtcttcctccattaatgcgccgaatgctctgctctgcttcccactcttcatcattaatggttttgctctgtaacgtcggttccaacaaataaacttaataattcgaaattataaatttcacaagttacatttttctttgtgtaaagattttggaccatataaacattatggtttgcgagaatgacgtttgtgtcattatccgatttagatccgtataatctatgttgttaggaactcaggattttgctcaaatattcaaattggtatattttgactttgatgaaattattttggtcagaccacgagacttgattgcttctcaattatttgggccggtccattaatttggggccatctaacttttacgtgggccgtaacaaaccgaaacataaaactagtgacctacctaaccatattaccccaaccggacaggaggtaacgagttaaccagccacttgttcggcttggaaatttttttaatcgtctgacaatttatgacgtggatccaagtagcaagaaagctaacatgttgttggatctgatctgatccacgaacctaccataaatcaattttctcattatcttgacaggtatatcttgcattattatacgtcagattttcgtggatacaatatttttaaaatgcaatccatatttacttgatttccaaaaatgggttttttcaaaagcacaatttccaaaaatggatcacaatttattaacggattctcaacttgcaaatcaagcttaaattataatcttttttaactcagaatttaatataatctttttttactcagaattgattaaactaacagttatattgatcttgaaatcacctttaatatcttgttttaaatcttgtgtcttgcaaatcacggttcataaatattggagaatcgaataaataaattatttctattcctatattgcgtaattttattttttgactctctattgcgtaattacactcgtcagatttcgtggatgagtactcagtaaatcttattttaattaaaaagcttactagtctaattgctgcaaatttgaccaactatacagttgtgttgcattacaatatttcaaaccattaataaaacgtgtaaaacatatttggagttgaatgaaactacattttcctttatgtcaaacgcacttttcaagatatatctcgaacaatttacgtattattttcacaaattttgttccacaataatttaggttattttggtttttgttgttgttttttgagtctgaaatttcaaatttgtatttttttttaatatatatttaggcaggaatctttaaaatgaaaccaataatatattcactaagtttggaaaaaaaccaaaatttcataattaacgggacaatgactaagctgtggaaaagataacataatctcccaatgactcaatgccacgtataagatgagaaccgtactcttctgtgttcgtaccagatccctcaaaaggcgggaagaaaccatcaagaaaggcacattgctgacgtggaatggaatattcgaacacgcatatccagctccttcctcctttttcctcatatcccttttttctcaatataaatactctgcaaaaaaacacccacaaatcctcacacaaaaacgttttcgaaatccctaatctactctctcttctctatatctctactcttgagaa

SEQ ID NO: 1138 - DNA, 3000 bp, Unknown
  misc_feature (1)..( 3000): cDNA_ID_2131128_gDNA_ID_1620363_Annot_ID_154732 3000 nt of promoter + ATG
ttctctagatattctaggccaaagttatgtaagaacgatggttcaagctcaaatatgtgtcatgagaaaattacgtactttatgatttaagcgtgtcgttttgtttgttgcagtcacacgtgtcaacaacttcatgttgcaacctttatcgagtctattggaaattttgccagacggagttcccagcttcctggaggagaattttcggtttgaacaaggtgaactttcaactccttgtatatcttccagtcgaagacaaatgagatgcagagacttctttatttattcgatctccaagatgggtttccagtgtcaggatttggttcaaatcacagctaactgtgttcctattatataggttatccgtttgcagcaatgttcgagactatgctgaatgaaactgatgccgcacagatcggtggagggctattaggagacctctttgcaacttcagttaacctgccggtaagactttgttttagaaaagcaaatgatagatgcatgtttgtcttgctgattatagagttaaactagtaatgtgctcttgtttgttcttcattttgttgtttcagctatgttttcatgtgattaactcacgaaaacaaatttcttacagactctggctaggatctttccaaaggacacacttctatggaagcttcaactgcttaagtctgcttcagcatctgctaagtctcacatgtacacagtcaaagcccaaacacttatacttttgaggttaataaacttgtaaacttccctgcttcaataagtagaagttcagcgatctcttttttcgtcaaaaaatttcttagctggcagctgagttgtagctttaataagactgtatattgcagtggacgcgatcagtggttactaaacaaggaagacattgagaaactccattgtacattgccgaattgtgaagtccgtaagttcgagaattacggacagcttctctttttggtaaggtgctctttttcctgatgtaagaaagtttttcttgtatctgtttataactagtagttagctcagcaaactttcagattgataattttatgtcatgtcaggaggatggggtagatctggtgactatcatcaagtgtacttattattatcgccgtggaaaattgcttgattacgtttctgatttcattctgcctaccccatttgagctcaaagagtatgaagaatcacaaaggtaaaatgaatatcctctgtgtaatacgctttcttgacttagatgtagtgaaaatatttgtatagtactacttagctagaataggatatttccttctgctactgtaagcaaatactgaagtgctgttattatttttctggtccagattgctaactgctataacctccccagtctttctctcaactctagataacggtacagtagtaagatcacttgcgggaataccttcagagggaccggttctctatgttggcaatcacatgttgcttggtaccgaattgcgtccagcagcaattcatttcctgaaagaaaagaacattctgttgcgaggacttgcacatccagtgatgtttgccaaaaaatatggctcaaaactccctgatatgcatatgttcgactcagttaggatgataggcgcagttcctgtctcaaatatcaatttctataaactacttcgctcaaaggctcatgtggttttgtatcctggaggtgtccgtgaagctttgcacagaaaggtaatgattagatatctcatatttggccttcgttttaactttgaagcgttacatagaatgacacatttctacagggtgaagtatacaagttgttttggccagaacattcagagtttgtaaggaccgcatctaaatttggaacaaaaatcattccttttggggttgttggtgaagatgatctctgtgaagtaagcaaaatctcttcttcttcgttttcgtttcagtatctggaattctttaaaactcttttgaaaaatggaattgattctcaggtggtcttcgattacaatgatcaaatgaagatccctttcctgaagaatcttataaaagagttatcacaagactctacttacttgaggtatttagtttttgtttctttgttttgttttcgactctctgttaaatgtaattatatgaatgttatataacattggaatgatgataatatatgtttaggaacggtgaagaaggagaagtaggaaaccaagatttgcatatgcctggaatagttcccaagatgccgggacggttttacgtatactttgggaaaccaatttacacagaaggtagagaggacgagctaaatgataaagagaaagctcatgaggtttacttgcaggtcaagtctgaggtagaaagatgtatgacctatttgaagatcaaaagagaaggtgatccttatagaaacattttagcgaggtccctctatcacttctcacatggtttctcttcccaagtcccaacctttgacctccgaaatcaataattttagttactggatttgtgacttaattaactttgtggaatttggatatgttattgtaacttctaaaagtacaaggctgttgatgtagaaattgagtaagttcggggtgttatgttaaaaattcatgcaagtttgtgttcttacaacatatctagaacgtttacgttgaagccttgaaggtttgtgtattttgactattttctattttaatagaattgagtaacttttgggagtgttgggtgaagaatattgcaatgtacaataaactgtgtaatattcgaggttagttttattaataaatagttaaactaacccagatttggtttaaccaaaccgaaccagcttgtcgtgtttaatttaagcaaatttatcaaatttgaaaatattcaaactgaaaaaatcaacgtggcatattataatcgtttttctcgtgtgcacgagcttgtcgtgttcgacctatcagagatgaagaagctaaacaacaaaaaccttcttccaactttctctgatcgtctatg

SEQ ID NO: 1139 - DNA, 3000 bp, Unknown
  misc_feature (1)..( 3000): cDNA_ID_3060860_gDNA_ID_1620363_Annot_ID_154737 3000 nt of promoter + ATG
gtatcttaactttatatatatattttttattttcttagaaaaattgtgtatatttattattactttttgtttgatacattttcatataaatttgtacttttaactatatagcattcatttatacattttgttatctatatcatcatttgtttcctaaataactgtcaatttttgtttttttgtttttttcgaggattgtatgtcgttaacataacacagtcttaaatgtttgtgtctgtttatcataatgttttaatgagtatatttatgtatttctatcataattgtttaagaaattaaaaattgcgtctactcattttatttttttctaataatttttacttatggttgcattttttcaccatcatggtttctaatgtaatattataaatcttaataaatgcttgagagtcagagtaagctatttgtaacattaagcattttacctttaattttttaaaagatataaggcccaatagtagtaagagctcataagaccgtttgtatttctgaggtttatttcttctctcaaaaagaaccgcggcgattcgattgaaccaaccggttagaaaaaccgaaccggtgaagtggctcaaaaaatggattaaaggtgcttcacgtgggcagattgggttgtcgctcatgtgagcactacttgatatgctcgtaatcattacacatccttttacttattatttattttctcactacatcattaatctatagcactaaaacatttgacaaaaagaattatacattagattcttcatcagagccacactaatagtacagtttgtttaatctttgtgcaaaagaaaaagtagtacaacagtttgtttaatcttcgcatatgatttcatttgccgatttattatatgaactaaatacaaagttatgttctttttttttttttgagcaacaatacaaagttatgttctttatgaaaacatagtaataaataaataaaatacttttgtgtggttttaaccaaaacatcttagattataaaaatatattttgatgattattaaagtgatgaattcaatattactatagtaataaaagtcactagtgttttgagaaatttccaaaaaataaaaaagtcatcaacgttgtaattataaaaataaataaaatcatttccaactaatcctttttaggtatataagtatattcaaacaattaatttgatcggtgactttgtaaaactgtgaaatattgttttataatgtgcttagtgaattatttaccagtcacattctgcatgtctcaagagattagatgagtgacattttatgacgtaacacaataatgttatttatacgtttacaagaatgaaaaaaaaaatatctattcatcatttgtaagcacacatgagaggattaaagctttacagaggaaaggaaatgtcacttttactgtcacatgctgaaagtgagaaatggctgagagagaattatttgttgaattatacttatcttatttctcaagccatcaaccaataataagaattaagaaataaagactagtatcaaatcttatattggtggtgtaatgctgatgacctcttagccactccgtttggcttcttctggcatagagatatcgtgaaatatatatgtagactaatgagtccaaaaattggattggtgcattaattatcatgttaaaaatttaagatgcaacctatctagagtgaaacatatatatactttgatatagaactatggttggtgtggactcgatactgaaacatataaatatgattaattcgattgttaggtttggatggtgcaatcaatatgctaaatgattctagtataagtaatctaattcttactaactttgtagctgcaaaatgtatattctagtataaatatatttcttattatacattctcaaacatgcacatcgtaaaatgttaattttgatatattaagatgtttaaaactaaaggcaccaaaacccaccaaaaaaatttaagagtctataatagattgtgtgtttcacaaatttggtatactgtgtttgattgcttggattaatgcttatagaatattaagacaaaattaacatttatagcaatagttggtgtgtcatgtcaagtaaacttatgttgttagctgtcagattgaagcagatagatagagaaaaatcttttgcgaagcagttaggtatctgacgttggggcactccgtgacttcatttatgatttgtttttatgaactctggtctatggcatcgaattatagtcgatttttagagggaatataatgtacaaacctacaagaaaaattaaacaaaaacacaactctaattattattcaattgtagaatttacaagaagacatttttattaggttttgtagtttttttttaatgaaaacacttaaacctgccctaaaaaccaaacaaacaaacaaatgaaacaaaaaaaaaaatggatataactactacgtacgagcttttttttttttaatacaattacatacgagctatatggactataacatattaattgtttttgtgtagctatgtaaatctttatttagcatatagaagtgcacctaaattaggtaacatatcctcctttttagtttcatacattaaaaaatagtaatttcttaaagatcaaataataaataagaagtccgaaataaagaaaaaatggaccttaaattctatttttcaaatgaaatactttcataaaattaaattcaactaataccacaaagacaccaagtttttggtagtatcccaaaaggcctatcaatgaattattttttttgttattaatttttagttaattttgttgtataagctaccaagaaaaatacagctgcttatataccccacaagtattggaatttagaacgaaaagacaaaataataactataaggttttgatgtcacacatcttatgaattggcatgttccatgtccgatctaaccaatgatggctttaattgcttttgtaaaataaaaaggactggcaaaact

SEQ ID NO: 1140 - DNA, 3000 bp, Unknown
  misc_feature (1)..( 3000): cDNA_ID_2131149_gDNA_ID_1620363_Annot_ID_154739 3000 nt of promoter + ATG
atccagaagataacgtaaaattctggttaatagtttcatctacttggtctgattcagtttaataatattaacttgttttagcaacgctatcactaattgagttgttctaatgtactttcaaatcaaaactgtatactttaaagcaggaaacaaaagtcacacaggcttcgtttcatttgaaatgttgggaattgagtttcaaacctgatcaacgggaataatcatcgaagacttttgcctgatcaatgattcaaacgcttcattttctcgacgtatgcttgcttcaaacttctgcacttctgtggactcatcatagaaaataaaataaactttcagctttctgagagggttctctgctttgtaaacctcaagttctctgacaaaacccatgtcaggatggtagacaatgatcacagagggtttcaagatatctagtataggttgatcgctttctaaggcataaaaatgcacaggcggtagctttttagcaccgctggggcgaacagcattggcttcttgaggggctgacgtgctagcttcattggctttttcttcattctctgggcctggtaagatttcaggtttactgttcgtcgttttcttattgcaacttcttaaggatctccggagacttgttggatcctttttagcttttcctttggtacacgaagccttatcaacatgaggctctgggttgttatttccagaagccatatctgttgtctttcctagcttgcgaatagaagacgcagcagccataagagcctcatgctcttgtctgccaacactgctaccttccgagttctgtattgtagttaccggaacaactccatcaagaatcccaaaacccttgggagtcttttgtttcttcttttgcggtgtctgcatactgcggagctcaattttgctcagcaggtacatttcccattcttcccgcattacctgcacacgtgtaggtaaaatgggaacttgaatgctagtttctagtgacagggtacatatcggttgttaatgaatgatgtaagatctagcaaaacggagttatctgactggaccttctgtggattgtttgtgatgcaatcttcaagctgcatgcaggaccgttcatctttgcaagccacaagaactattccattgttgtcactgttatcttcctcagaaaaagcctgctttagtctttcttcttgtgtctcctctaaaatttcctgtattaatcacaggcataccattacgtttaaggctaatccatgaaaacatagagtgtggcgaccaaatcaaagaggtaaacaacaaagaacagatatggtcactagctaaaccaacttccatcatcaaattaacagtaacagagatacggcattgaaactgaaactcactcagtcactcacacgtaagactttccattttggtgcctcttccagaacttcttctacaacaacgccagtagccacatttgttgccgtttccccaccaactgattcaagtccaattatcaggaaatttttcgaatgcttataacacacatgtcactagatgcaaaatacaaccattatagatcaagaattagttacctgcttctacagagtcagtttcgcccttcgaatttctctttttaccactcttattcttaacatgttcttttgacttgacatcacttgccttcacgagacgatacactcgtttctttgcaaaatcaaatattttatagctggactctgcaaataaccaaacagaccgatagctctctgatacccttagtgtatccaagaacttgagaaaactcacagcatcatacctacacagaaataccaacttgaaggttttgcataagaacattactgatctacagagaagagagacagagctattattacctaacaagataatcaagcaacttccttaaagtcttcaaatcagaaacaagctgttttgtccttttccccaaagtatgccaaataggatcaagctgcctcctcacaatctcatcaaaggacttaaacaaaccactctctacagtcaaatcatcaacatcaactttattagtcttcttcatctccttgagacaagcatccattacttcaatgatagctttctgtattcccaccatgtaattcgacatcgaaaccctaatatccacaacctcaggtggttctcgctccaattcctgagacacatccaactgaaaccttggccatagatggattttacggaggaagagagcacgcatggtgcgttcagtcttggcgaaaccggaaaccatagcttgcggtctatcggaaaaagcgcgtatataagcagagctatttagggatttgacaattcgtataatgaatgcttcagtggaggtttcggaaatcgaatgagcattgaggatgaagattccggcgagtgaagaaactggaatccgttgagtcaacagatcgacgatgagaatccgcggcgtgatgaagaaaggagaaccggaggtgtaaagcgagtaacgctgattcgccggaagatctgcggtgatttccgtcggagtaggagaatcaagagaggagatgtaatggatgattctggattttagagattgagcggcgggggagaggaggagaagtagagttccttgcgacggagagtgaaggatgaggagagaagcgattaatttagcgagggagagaccggaggaaaggattaataatccgccattagagtcctcgagaaggtctgatatgatctgttggtgatatttcagcgccattgaagaagacgacgacgcaaatcggagaaactgattgatgaagagtgaagacgatagaaaaaacctttcctgggtcaaaaacgttcaaacttcaaaacggcgtcgtttaaataaagtatttttcgaaaccggtttcgatatttcctatattaattctttcttaaccggtttaggttagctaagaaaaagaagaaaggtcctgagacttgtcttataatcctcaaccagacttgatccattagtcaactcttctcttcaca

SEQ ID NO: 1141 - DNA, 3000 bp, Unknown
  misc_feature (1)..( 3000): cDNA_ID_2131145_gDNA_ID_1620363_Annot_ID_154738 3000 nt of promoter + ATG
tgttgtaatgtatacaacaatcattgatagtctttgcaaaaacgggcatgtgaattacgcgttgagccttttcgatcaaatggaaaactacgggattagaccggatgttgttatgtacacctctctcgtgaacggtctttgtaactctggtagatggagagatgctgattcattgctgaggggtatgacgaagaggaaaatcaaacctgatgtaatcactttcaatgcattgatcgatgcgtttgtgaaagaaggaaagtttttggatgctgaagaattgtacaatgagatgattcgtatgtctatagctcctaatattttcacctatacttcattgatcaatgggttttgcatggaaggttgtgtagatgaggccagacaaatgttttatttgatggaaaccaagggttgttttccagatgtagtggcttatacttctctcataaacgggttttgcaagtgtaagaaggtagatgatgcgatgaaaatcttctacgagatgtcccaaaaaggattgactgggaacactatcacttacactactcttatccaaggttttggtcaagtgggcaaacctaatgtcgcccaagaagtttttagtcatatggtttctcgtggcgtgcctcccaatattaggacctataatgttttgttacattgtctatgttataacgggaaggtaaagaaagcgttgatgatatttgaggatatgcaaaagagagaaatggatggtgtcgctcccaatatttggacttacaacgtcttgttacatggtctatgttataatgggaagctagagaaagccttgatggtattcgaggatatgcgaaagagagagatggatattggaattattacatataccatcatcattcaagggatgtgcaaggctggtaaagtgaaaaatgctgttaatttattttgtagccttccttcaaaaggagtgaagcctaatgttgtaacatatactacaatgatatcaggattgtttagggaagggttaaagcatgaagctcatgtgttgtttaggaaaatgaaagaagatggggtttcataattaggtgacaccatagcataactgatcatagtgttgaggattctctgatgatgcttcttcaacttacagagaatgatggtgtagtagcagtttacacggtctttgcgaagcgagggtttcgtgaagctgtgaggttgttttgttagtgaaaatgaagaatgactaattgaatagtgtttattccagacagtgtattgaacaaaaagacttcgtaaagaatgtgcagagaagcaaatgagttggtagaccacaatttgtaagttacaaattcataagttattgaacagtataggttcctttagacagtgcacaaagattgaactgtattacgtaacgacaaatttaagtatattttggagacatgcaaccgagaaatattactcaatgtcaatctttagagcttttttagtagagtttaataaatcattcggcctgagcttctcgtgctctttgtactttcaagtcatcaagatagttctggtagatataaaacgtgaatcctgtgaaggcgatgggcatcgccaccatcttaacctcagtcagcttgtcatggaacaccgcaatggccgcgagaggcgtaacaatgagtgagagcgtactaataaggtttgaaaacagcgaagacaccagaaatataagcgacacggctcctacacaacccaattgacacgaaaccgctgccccgaccaaagtcaaaacataaatgacttgaccttcctgaaactcttccatctccacactcaacaacatccattccccgcttgcgaacaatccgataaccgctacacaagaagccacaagcgacgtatagatttgcatctcgagaaccatagagagagtctcactcttgagaaccttctcgaaagaaaactgcataagagagagctgaagagaatagataagagaagcaaaaactgcacagaaacacccaatcaagtaactccacttagaatctcctgatgggctatttgaatcatcgtcaagagaaaccaacacagcagagatagagagaaacaacactgagaagaaaatcaaacaagtgattttctgagaattgatgtaataatagaagacaccattgaaagctaactgtgaagcacatagaatcgaataagttgaagcagagagatacaaaagtccaacagagtataaaaaattatctaaaccaatagcaaaaccaagagaaagataaatccaaaccagagtcttgaaagaagaagaagaagaagaagaagaagaagattgtgaagcaggaaggagagaaagagggagataaagaatgggaaagccaccagtttgaacaagagtagagatccatttactgtttccaccttcattgtaataaaaccgaccaagaagaacagaaatggcttgagcagagatgagaaagaagatgcttatgaaaacaagaatccaccattggcttctatttagtttcatgagttgtgtaggaacactagttcttcgtcttccttcatcttcttccttaagcagcaacattgcttcttcttcatctgttaccaacaaaaacaacacataaaagttcacatctttcaagaaattttgtcccttttatgaaaactttgataagaatctgggaattgggttttgatcattacacaattcactacatttctagaatctaaattgaaatgaggaaaattagagagatttacccattgtgaagagaagagttgactaatggatcaagtctggttgaggattataagacaagtctcaggacctttcttctttttcttagctaacctaaaccggttaagaaagaattaatataggaaatatcgaaaccggtttcgaaaaatactttatttaaacgacgccgttttgaagtttgaacgtttttgacccaggaaaggttttttctatcgtcttcactcttcatcaatcagtttctccgatttgcgtcgtcgtcttcttcaatg

SEQ ID NO: 1142 - DNA, 30 bp, Unknown
  misc_feature (1)..( 30): cDNA_ID_2994873_gDNA_ID_1620363_Annot_ID_154744 3000 nt of promoter + ATG
ccacaaaatcagacgaaaaagaagatgatg

SEQ ID NO: 1143 - DNA, 3000 bp, Unknown
  misc_feature (1)..( 3000): cDNA_ID_2131161_gDNA_ID_1620363_Annot_ID_154742 3000 nt of promoter + ATG
cctctgaatccgaaagcagctgctgaagctgagcagttactaacaaagtctctgtccactctagagactttttggcttaagggcaatgctaaattcttgctcggaagcaaccaaccatctatagctgatctcagccttgtatgcgaacttatgcagctgcaggtactcacttaatttcactgttttgtgcgtttttttaattcatcgaaataccaatccttgctatgttttggcttttgattgtaaaatttatgcaattttgtaggttttggatgacaaagatcgtcttagattgctcagcactcataagaaagttgaacaatggattgagaatacgaaaaaagcaacaatgcctcactttgatgagacccatgagatccttttcaaagtcaaagaaggattccagaagcggcgagagatgggaaccttatctaaaccgggtcttcaatccaagatctaagaacttagaacaaaactttggcaaaaccggtttcaggggtcagtcactggttcgttgaagaaaagccgattatctcctattctccattgtaagaaaaataaggaatgtaataatcacttgttttttgaactatatgtaataatcactttatcaaaggtttttaccgaacccgagcattttgaacatcacaacatgaaggtttagatttatatgtaaattatagttgaaccagctcgcagtttgtgctgtccatctcactggcttacttcctttgggccttagactgttaggatcgtttttagctggtaaaggtcgagaaaagtgggtagctgcactgctaaaactcaaaggaaagcaaggtggaaatataatggaagtatggaaacttatggaaccatcaggagatagaggccaagaggggtgggaaactgcagctgacataatggaaggggagggactatcacaagataaaggtcaagaggagagggaagttgctgcagagtgcagacattatggtagggaaggaatcatcatcacaagacaaaaaataacagtagtgtgaagagtcacctgcacaatttatctttaagcttgcaaacattagtgtccaaacaccacccccacccccccccccaccccacccccacacactgttctcatgtttactgaaactgtaatgcttatgttgttccgtttaataaacatgcgatgattattatttcttagaacagagaatcactgaaacaggtttgaaaagagaggatgttatatctgtgaatagaaaagacaaagacaaagtggaggaatcagaactcagccacggttattgctctgttgagagtctattggaaatttggctttattatgatagagagcaatcagaaatagataaaattggcttttagtaattaatgtttctagggatgatgattcaaatttattacaatagctgaatacagatcaacaacaacacatcaaattgattcaagatgttcttaataaatcataagaatttaacaaaagcctgcataaccgtaaccgtaaagttcattctgcattaactgattcaaccaggggttcttcacagattcttctaccgccgagtaatgttgtgtgtttgagacgcaaggattttgaaagctgttgctattgatgttacccatagacatgttttgatcacaaccataaaactccttgtacatcaattgattcaacccaaagttgttgacagattcttgtaccgcttctttgtttgagacgcaaggatcttgaaatttgttgtttgtgatgtcacccatgctcatgttctgattctgatcataaccacaaatctccggcttcattaactgattcttcaactcagattcttcaagtaacgctgagaaataatcctgattgaaatttgatgcagagactgggatctgagacagagtattgtctccatggttatacataaacagcgagaactggctagggttcaaagattgggtgtaatgattcagagaggatggtgttaaactctgatgatccggttttgtctgattctgtttctgcgactcaagaaatcgaagcctttcttggaatttagagacatggagttccaaggactgaatcagtggagaaacttggtcgggagggtaatgatcagcgagtggatactttaaaatattcacgttcttaagactcgtcttcatcttcttgttcggattcttcaaacccttgttcttcttcttgttcaggaacccatgaagattaacgcttttcttgcgtctcaatgcttcgttcaatagactatacctaagagcaatgtctctcactttctctttctccttaggccatgtcttaagttctccgtctggtccgtaatagataacgcaggcttcgatatcacaaagagtgcaaagctctgaagctttcttgaagatggtctcaagcctattgctcaaacttgtgaaagcgagtgaataagaagaagaggacgaaggtgaagatgatcgcatagtcatcttcttgttgattgcaaagacaaactctgtgttttttcacgctcaaagttaagagaaagcacgaagacaaactttggctttgtgaaaaagatgatgaactatgaaatagttagaaagaattagatatatttatagatgatcggtgataaaaaaacgcgtaaagatgtgtgcatagatagattcgtttcgatttccatatatttgcatagattcgatttccatagattttacgttctagagccgttaagggttgataaaaaggaaacacaactataatttgatatcattaacccttgatatgatctagtttggtttggttaatactagtcttcaaattctagctctaatcagatagtattttatacatctacgcaattatttgggccttgtgaggcccatttaaaattatggacaaaaagcgacgtcgtctcggatctgacctaggtttttgtttacactcttcttcttctctccatctctcagtctcttcgttaaacccacccacatttgaagcggcaaataacgaaaaccatg

SEQ ID NO: 1144 - DNA, 3000 bp, Unknown
  misc_feature (1)..( 3000): cDNA_ID_2131157_gDNA_ID_1620363_Annot_ID_154741 3000 nt of promoter + ATG
tttcactttaccagccttgcacatcccttgaatgatgatggtatatgtaataattccaatatccatctctctctttcgcatatcctcgaataccatcaaggctttctctagcttcccattataacatagaccatgtaacaagacgttgtaagtccaaatattgggagcgacaccatccatttctctcttttgcatatcctcaaatatcatcaacgctttctttaccttcccgttataacatagacaatgtaacaaaacattataggtcctaatattgggaggcacgccacgagaaaccatatgactaaaaacttcttgggcgacattaggtttgcccacttgaccaaaaccttggataagagtagtgtaagtgatagtgttcccagtcaatcctttttgggacatctcgtagaagattttcatcgcatcatctaccttcttacacttgcaaaacccgtttatgagagaagtataagccactacatctggaaaacaacccttggtttccatcaaataaaacatttgtctggcctcatctacacaaccttccatgcaaaacccattgatcaatgaagtataggtgaaaatattaggagctatagacatacgaatcatctcattgtacaattcttcagcatccaaaaactttccttctttcacaaacgcatcgatcaatgcattgaaagtgattacatcaggtttgattttcctcttcgtcatacccctcagcaatgaatcagcatctctccatctaccagagttacaaagaccgttcacgagagaggtgtacataacaacatccggtctaatcccgtagttttccatttgatcgaaaaggctcaacgcgtaattcacatgcccgtttttgcaaagactatcaatgattgttgtatacattacaacatcaggtttaatccccatctccaccatctgattcaccatagacatagcctcctccattctattcccgagacagaacccattgatcagagaagtaaacgtgacaatatcaggctcaaaaccaagtttcatcatcttcccaagaaaagatgaggcaagataaggctgagaagattggcagaaacaattcatcaaaagattgcaagtatagagatcatgtgaaactcccattatctgcagatggtcgcagagattgatcacaacatcaaacttcttcattttggcaataacattcaataacttagtgaaatcgataattgaaggaagaggacgagactcaaccatgtgagtgaacaaatcgagagcttcattaaactgaagagagtgaagaccatttctcaaaatctctcggtaattacaaaaagctcgaacccagaaactaagatctaaaaggcggctaaaggagagagcttttccagaattacctttcacaagacgatttcggtgaagttgaaaaaatctcatcgccattaacgcaaatcccagacgaaattgattatgccgttgatcgatttactacaaaagctacaaaaaagtttggatgagatcgaaggtcgttgtatttaagaagcctaattttcgtttacttggaagatacgaagaagatgaaatttgagatttgagtaaagaagcggcggaagagaagatggcgaatatttgtacacgtgtattggtttgacttttgtataatatcgttgacttcacgtaaccagtctacaacgaccggttaactaaatcggtttgttcatttacagatccctagaccaagacttcatgttatgcctgattgcgatcacttgcagaagaattcctcctattattgaaaggaagtataaattgaaattttgtctaatttggtctcaattttgattttagttttggattgtgttctttgctattcaaaattcttaagagtaatttggtctcaacaatatcttaaactttatatgatccgatttaatccaaaccgttcaataaaattaatttctatcaatctaaaccgttcaacaaaaataagtaaataacaaccaaaaaaaaattaaacacattttaacacattcctcttatcactagataacaaaaaaaaaatctcaattattatttagttatgtttgattaaaaaatttatatttataagtttagtatatcaaatttattcaaatatttagtataaaaactaaataaaccgattgtacgcggtaaactgcgggtataattttagtataaaaccaaaaatgaaaggaaagatcttcacaataattaaactctatggcttaagaatcttattaaacgctaattccgtaagaattatatgaaacgctaattcggtaagagtttagtaaaccagattgtaacaaacgtgtaaatatttttctggttatgaattttttaatgaaccggattaaaccaggaattaaactgtgcgtttaattaaatatgaatttaagtactcaatcagcaaattggtattgactcaacatgatggacataagaggtttgtgacttctcataagagctttgtattttattgatttgaacacttttcttagtagtaaattaaattcatggtcgaatctttgtttatatatgagtagttttatcacatagccgtaccttgcctttggttggttttgttctgcttttctaacgaaccatattaaaaccatgtatttagttatatattaaaaaggtttaagtataattaaatagcaagaagattaccaaatccggcccaaaaaaatggtagtgactcagcttgatcagagagtctcaccaggattcgaatagggatattgatattcttaacttaattataaattatatttaggacaaagaactatatcttaaatcttaatagaggtggagctatggagtgacttttgggcgactcaatcaactaggttctcgagtgagatctcttttcacaaagagcccttatcaacataacccaagactttaggtgaaagtaacgcgtaccacaaacaccggtgaaaagaaacctatatcttaagggtttgtgacgtgaatatgatgaatcca

SEQ ID NO: 1145 - DNA, 3000 bp, Unknown
  misc_feature (1)..( 3000): cDNA_ID_2131132_gDNA_ID_1620363_Annot_ID_154733 3000 nt of promoter + ATG
atatacattttgcagctacaaagttagtaagaattagattacttatactagaatcatttagcatattgattgcaccatccaaacctaacaatcgaattaatcatatttatatgtttcagtatcgagtccacaccaaccatagttctatatcaaagtatatatatgtttcactctagataggttgcatcttaaatttttaacatgataattaatgcaccaatccaatttttggactcattagtctacatatatatttcacgatatctctatgccagaagaagccaaacggagtggctaagaggtcatcagcattacaccaccaatataagatttgatactagtctttatttcttaattcttattattggttgatggcttgagaaataagataagtataattcaacaaataattctctctcagccatttctcactttcagcatgtgacagtaaaagtgacatttcctttcctctgtaaagctttaatcctctcatgtgtgcttacaaatgatgaatagatattttttttttcattcttgtaaacgtataaataacattattgtgttacgtcataaaatgtcactcatctaatctcttgagacatgcagaatgtgactggtaaataattcactaagcacattataaaacaatatttcacagttttacaaagtcaccgatcaaattaattgtttgaatatacttatatacctaaaaaggattagttggaaatgattttatttatttttataattacaacgttgatgacttttttattttttggaaatttctcaaaacactagtgacttttattactatagtaatattgaattcatcactttaataatcatcaaaatatatttttataatctaagatgttttggttaaaaccacacaaaagtattttatttatttattactatgttttcataaagaacataactttgtattgttgctcaaaaaaaaaaaaagaacataactttgtatttagttcatataataaatcggcaaatgaaatcatatgcgaagattaaacaaactgttgtactactttttcttttgcacaaagattaaacaaactgtactattagtgtggctctgatgaagaatctaatgtataattctttttgtcaaatgttttagtgctatagattaatgatgtagtgagaaaataaataataagtaaaaggatgtgtaatgattacgagcatatcaagtagtgctcacatgagcgacaacccaatctgcccacgtgaagcacctttaatccattttttgagccacttcaccggttcggtttttctaaccggttggttcaatcgaatcgccgcggttctttttgagagaagaaataaacctcagaaatacaaacggtcttatgagctcttactactattgggccttatatcttttaaaaaattaaaggtaaaatgcttaatgttacaaatagcttactctgactctcaagcatttattaagatttataatattacattagaaaccatgatggtgaaaaaatgcaaccataagtaaaaattattagaaaaaaataaaatgagtagacgcaatttttaatttcttaaacaattatgatagaaatacataaatatactcattaaaacattatgataaacagacacaaacatttaagactgtgttatgttaacgacatacaatcctcgaaaaaaacaaaaaaacaaaaattgacagttatttaggaaacaaatgatgatatagataacaaaatgtataaatgaatgctatatagttaaaagtacaaatttatatgaaaatgtatcaaacaaaaagtaataataaatatacacaatttttctaagaaaataaaaaatatatatataaagttaagatacatgaaagtttaaatagacaccatttgtaaaagatataagtattggaacgaagagtttgtgattataaacacgagtaaaacatggtgacaatatacaactctaattgaacaaatttaactttaattgatatcctcaaaaatattttataaagggcaaatattgcaacgattcatcaaatataccaaaatttgatagtttatcaaataaactaaaggttacaagtgtccaaaaatatatgggattaacatcactgagatgacaaacatgcttcttaccaacattgaaactcttagagaggtggtgtgaactgtgagctgcctcttcttgtatatccaaaaaggattctttacaaatttaccaactatatctgttttgaaattatgcccttttataacagaccacaacatatcatcacccaaaaccagtgtccctttttagtatacttccaaaatcttggagaattggtgagaggatatagctgcaaacaacttttggattcctatatgtgaagaatcgcaaaacgaaaagatgactgtcgattagtttgcaacggactttaagcttttgaatctcatattttttgcaatataggtttttacacccgaaaaccaatgccaagaaaaaatgtcagtttttgttttagcatagatccaacattctccaacaagactgtagatacactagccagatatggattacctaataattatagcttttactttcattcttacgttccctctcttcttcttttttttcatcgattcttatgttccctttctaattgttaataatttacatcgtgaccatgttacaacaaatatctaatacaaaagctaatgtcaaaaaaaaaatatatattttgatatttatatttctaaaatataaaataatataaattataatattaacagtcataagttaccctaaatttaaaccgtgccaaattccaacagcagcatctaaattgattttaaaattcaaacagaaatgcggaccctcgataaaagaatggcggagtagtcactgctgttttctcgtgtacacgagcttcttgtgttcgttccacctcttgaagatgaagaagttcaactacgaaatcgttcttctctcgatctcggatttttctgatcgatg

SEQ ID NO: 1146 - DNA, 3000 bp, Unknown
  misc_feature (1)..( 3000): cDNA_ID_3060865_gDNA_ID_1620363_Annot_ID_154729 3000 nt of promoter + ATG
agtttgcaagtaaaaaccacaaaacaaacgagtctgtaggcacgaccgcacgagtgctaaagtccgctgcatattgatagttcgaagacggtgttttgtcgatattattcactatttacgtgtcgcggattgattagcgactaaagaattagccttaacatatgttttgttgaaatatattttgagtcaagattattcttaattcccaatagaattttgaagtatttgtctttgttccaacctttaaaaggatgcttgaagttccaatcaaactacaactcatgctctctccctcttctgccttaactatgaagaaaacaaaagacattcgtttttatttttctcttcagtatcaaattcaagaatccaattccaatagccacaacataaattctctttgatataataatctaaaattagaaactgattcacgtctctaaattaaaatttctgatctattcaagtaactgttcttatatgagttttgtttccatacatgctttgatttaaacgttttctactacaattatatctacctctcaacactggaatccaattttctttatacggtttatatcaagtattgattgtttttgtccaaaacaaaaaccaagtattaattgatatagctatagtacactcaaattttaatttgctcactataattctgatattactttgaatagaaattcaaaattatctaatcacaaagttcagtttatttataatatggaagctttgagcaaaataatgtaaatataattataaaaaataattagaaataatttaggacaactgaaaaaaatatggatttcggtctataagtttctattatatatcaaaggaagtacttttttttttttgataaaccctaaatatcaaaagtacttttcgtttttgccaaatatgtttaattacttattttcgagatgttatcttccatttttttcagtatcattgtaatcaatgataattataacaaaatcacgatatgaaaaaaaatattccattaattgatgtaaaaaaaaaagtcaaatatcataacattaaaatgtaactttccccttatttactaactaaagctcatgcatgcgtggcgtgatattatctattcaattccttttctaaaaaggttttcctagtcctattaggattaggaaacagaggttgctatataaatacttgattcgctcgcgtttatctcagtcacaaaatccctacttcttcgtaacaacttactaatatataggcagcttggagcttattcattggacgacgaactctttttcttcatctctttctgttttctttttctcttcttttgttctgagaataatgggcccaacatacagagctttgccagtaggtatgaggtttcgtccttcagatttggagttggctgtttactttttgatcaagaaagctttaggacttcccatgaaagctcttactgtgcccgacgaatgtaatgatatcttctcaacacatcctcgcgacttgcctggtgagaatactttctccgatccttttgacaaaacagatttgatagagtttttgagtttcttgatttaactttggctacttctttcttgcgtgacaagctttattttgtgaacttgtttttgctctgttctttcaggctatggaagcgaagagcattggtacttctactgcaagaaacccaagaatcaagttactagaacgaaatcttataacctctggataccaacgggagaaaaaactgatgtgttagatccaaagaagaatggcggcgaattagtcggtatcaagcattcgtttactttcattgagaacgaagaagaagaagaatctgataacaagaacggcgatgaagaagaacctccacaatgcaattggttcttggatgaaatcagcctcccattgacagttgtggatactgattggactctgtgtcatatcttttacgagaaggttaaacctgaatttggtaatttgcatatagtcgaatctgaatccgaatccgaagaagaagaagaagatgaaagtgttgataagcctgcagagagtttggatagtgttaaagagaaagatggaactgttcttcctccacctcctgctacaccttagcttcttcatgatatagtgttttactgttagtgttggtggattgtagattctctcaaaacctgtcaacgtccaaatctttattacctctagttgcatacctattgttttaaagatgcttatttcacttcaatatatcggttaggttttttttctttttctttccacaatatatcgattaggttatgtggctcgagagactcacttgctcgctgatacaaaagttccagaacaaagagatcatccctcatctaatggctcatgttagcaattgtccgcctaccttgctaaattgcgctcctacacctaaagaaaactattgatatgagtcgtagtaataatcaatcgatctctctattccaataattgttaggagggtcataatatatagaagaagatagatgatatatgttatataatatgatatattgatatgtccaaaaatcaaattgttcaaaagccttaatgaaaaagagaaagagatgtttgaccagcttaaaaacttccggtcaaacacctaaaaaccttttttccgcctttgtcataaatctttgactttttgactttttccctctcaacatctcttttcgagatttcaccacgtgtcaaacctctcatctgaaccgttcatcttacacgcgtgagattatctcattttctcctcctccgtctttctgctgtttcttcgatctgtttctttgaccagaaaaacaaaagcttcaaactttttagcttcttcttcttccttcaatgtcgttgaacacatcccacgatacttgacaaaatatctcactctttcgtctctctgttttcgactcgcaaaccatcgaagcgccgattaatcttagaggaatttcttcgtgattagggttttgtttagttctatctggagat

SEQ ID NO: 1147 - DNA, 3000 bp, Unknown
  misc_feature (1)..( 3000): cDNA_ID_2131101_gDNA_ID_1620363_Annot_ID_154726 3000 nt of promoter + ATG
cctttgcttacatttgaagaaatcgagagcaagcgatagaaagtgagagagagagatgtatgtggtgacgcctcctcaaagatccggttttggatccgattgtgatttacgggtttaccaaacatggaaaggaagcaatgtgagttttaatgtgaaagctttaggttttggaattacttgcttctgtgtttatacttgagctagttttctgttatttttcctattattgtgtataaattaattattaatccgttcatgggctcagtttactctgtttccaatcttgtaaagcttaaaaattgggacttgggtttgtgttagaagtgtagctttctgggtagttgtctacatttaatcatgaaatctttacctttaatcaataccttaggacattatctgaatatgcttgctacatttataggaatgcttcttcatacaaaggttatatagttgatgctgtctgtatattgctttcaatgtcgaatttaaatctggtttagtagtaacctagtggaattaaacattttgaggtttgttccttaaatccttctacccaaagtgttaacatattttctaaatttgtcccatttctgcagatattttgtcttcaaggaaggtttatcttcgggccggatgtaagatcacttggtctgaccataagtcttattgtggcacctgttacaattttctgcatcttcgtcgctagcaaactaatggatgacttctctgatagttggggagtctcaataatccttgttgctgttgtcttcaccatttatgtgagtacaaaagtttagctttgcattgtaaaacgttttgtgactggatcattcataacaattaatgcttccctcaggatttgattttgctgatgcttacatccggaagagatccagggattatcccaagaaattctcatcctccagaaccagaagttgttgatggcaacacgggctcgggaacaagccaaactccaagattgcctcgtgttaaagaagtggaagttaatggaaaagtattcaaggtcaagtactgtgatacttgcatgctctatagaccgcctcgctgctcacattgttcgatttgcaacaactgtgtagaaaggtttgaccatcactgtccttgggttggtcaatgtattgctcaagtaagtttctcggtttttcgttttcctgtccgttagtttctgacatcagtctatataattcatctcattctccttgggaatttgcagagaaactatcgattcttcttcatgtttgtcttctccacgactcttctctgtgtatatgtgttcgccttttgttgtgtctacataaagaagatcaaagagtccgaagatataagtatcttgaaagcaatgctcaaaactccagcttccattgctctgatactctacacattcatatctacattcttcgttggaggcttaacatgtttccatctctatctcatcagcacaaatcaggtaccctaatcatttgcctctttctgaaaaaacctctctcattcgatatgcgtgtttaatcgtttgatctttctttattctgtagactacatatgagaatttcagatacagttatgatcggcatagcaacccacataacaaaggagtggttgataacttcaaagaaatctttttttctccaatacctccttcaaagaacaacttcagggctatggtaccaagggaaaatccaatgccgtcgagatcagttgttggcggttttatgagtccaaacatgggaaaggccaatgatgatattgaaatggggaggaagggtgtttgggcaatggctgaacatggtgatggcaaagatggcaataacaatgaacggtttcatgttaacgacaatgagttaaacgagttatcaccagacatggggaacatagtgaatggtgatgagcaaatcaataggccaaacaatcacccgaggaacgcaaactgggaaatgtcaccagaagttatggccttatcagcaagaagagcttagaagcaggttaagagaaaattgaaaggtgttttaaatgtttgatgtattgatgtgttgtgtgtttacacgggaatcaattgtgaattggtgtgatattttcagatgttatgagtatttttagttgttcttcagacatttaaatcgtaaatcattgtgtgttagtgtaatctatgacttatctttcacagaatgagaaaacaaaatgaataccgacgattttcatactgtactttgcatatgataaaaattgcagaaactgaattttcagacaagtggaccagaagaccagacaactcttattatagtcttcattgaagcacggctctgtaataaatgcaaaagagctctaaaggcttcttatttgttcttcaaagctctaaagtctaaaggttagagatttaacatcacaagccaacatttttggtttaggaaattgaagattagcaataatataaagtttttttggcattgaacaaagacaaaacacaatgaacataatcaacaaattggtcaaactaaacattaataagtgcctcaaagtatcagactaaatcattttcactaacatttatgaaaaaataactgttattaactgaggacgaaggtaactgaccagtcaaacatcatagacaaagacaataaagagagtcaatagcattgttcataattgttatttgtatgcacatgttataaattatataaaaagactaaccttatttcaattgagatgtcactattactgttttagcatcctcttctactctttatttagaacctttagtaccttaccatgtgagtgaagagttcaaaaacctctgcaaaaactttcttttttatctctctctcttctttaaacttactttcaaacactaaatagccaaaacttaagataccaaatttcaacaggtcggctttttcgtttgtcttctcttaagactttaccaaaagagatttgtggtttctggagttgactttggttgattttggtgtatttacaggggaaaaa

SEQ ID NO: 1148 - DNA, 3000 bp, Unknown
  misc_feature (1)..( 3000): cDNA_ID_1011560_gDNA_ID_1620363_Annot_ID_154723 3000 nt of promoter + ATG
ttaaacacgcatatcgaatgagagaggttttttcagaaagaggcaaatgattagggtacctgatttgtgctgatgagatagagatggaaacatgttaagcctccaacgaagaatgtagatatgaatgtgtagagtatcagagcaatggaagctggagttttgagcattgctttcaagatacttatatcttcggactctttgatcttctttatgtagacacaacaaaaggcgaacacatatacacagagaagagtcgtggagaagacaaacatgaagaagaatcgatagtttctctgcaaattcccaaggagaatgagatgaattatatagactgatgtcagaaactaacggacaggaaaacgaaaaaccgagaaacttacttgagcaatacattgaccaacccaaggacagtgatggtcaaacctttctacacagttgttgcaaatcgaacaatgtgagcagcgaggcggtctatagagcatgcaagtatcacagtacttgaccttgaatacttttccattaacttccacttctttaacacgaggcaatcttggagtttggcttgttcccgagcccgtgttgccatcaacaacttctggttctggaggatgagaatttcttgggataatccctggatctcttccggatgtaagcatcagcaaaatcaaatcctgagggaagcattaattgttatgaatgatccagtcacaaaacgttttacaatgcaaagctaaacttttgtactcacataaatggtgaagacaacagcaacaaggattattgagactccccaactatcagagaagtcatccattagtttgctagcgacgaagatgcagaaaattgtaacaggtgccacaataagacttatggtcagaccaagtgatcttacatccggcccgaagataaaccttccttgaagacaaaatatctgcagaaatgggacaaatttagaaaatatgttaacactttgggtagaaggatttaaggaacaaacctcaaaatgtttaattccactaggttactactaaaccagatttaaattcgacattgaaagcaatatacagacagcatcaactatataacctttgtatgaagaagcattcctataaatgtagcaagcatattcagataatgtcctaaggtattgattaaaggtaaagatttcatgattaaatgtagacaactacccagaaagctacacttctaacacaaacccaagtcccaatttttaagctttacaagattggaaacagagtaaactgagcccatgaacggattaataattaatttatacacaataataggaaaaataacagaaaactagctcaagtataaacacagaagcaagtaattccaaaacctaaagctttcacattaaaactcacattgcttcctttccatgtttggtaaacccgtaaatcacaatcggatccaaaaccggatctttgaggaggcgtcaccacatacatctctctctctcactttctatcgcttgctctcgatttcttcaaatgtaagcaaaggggaaaacactaaaacgaagataacgaaagaagaaaagagaaagcttttcagtctccgttgaagaaattctttagatttcggcaagtctccgacatgaaaatgagagtagtcagagaattagatttgctcttggcttctccaacttcttcttcttccttcactttttttttttcctgcaaataaatataatattttaaaaatcgactgttagcagctactggagtcagtctgtcaccgtcgttttagttcaggtaaagtacttttcagaagctaaaagtgaagaacgaaataagctgacgtggcacttttctaatggtctgtttccttaccttgagtactcgaccttgttattcataaaagagattcgataacggaaaagaaatttaaacattttgttttacagcgaatttacatctaattttttttatctctattgttttccactttttctcaactattgatttatatgtacctgcaaaaaaaaactactgtataaatttcgtatgttgaagaaaataatgttaaaacttaaaataatttgtgaaaggaaaaaataaagttgaaaatagaaatgattgggaaacaacacataaagtggatggagtcacctagaagcattacaagaatttaagggcaaaagaaaaaaagaaaaaaaaaattaaagtaaaatctgcagcaatcttacatgaagaacaatttcaagcttaatgggccttctttaaagctcaagcccatatattgtttccaactgatgaacttgtaatgtaagcttatcttctctagtacacttaaacctgaaattgttatgcaataaagtcttatgctgttctataatgtgacgaacaaaagtctataatgtgagcttatctttgtatagttagttaacctgaaattctctttccagaattcagccacaaccgagagtaaaccgggaaaatatcatagtttggcttcttgtattgatatttaaagagccatatcctctgactactttcttggtgtttatgctgatgaattgatgatgtttacacttcactttcagtggtccatacacatatatatacacactagtggcttaccttctcccttccattttccagttttagccattttttataaggggattcatagacaaaaacccttaaaatagagagcatgagagctcaataaatgttaaacctaaccaaccaatctctcagtttctctacttttcctttaattggcctctcatctctttgtgcctctctttactcatctctttttccacaagagtcttgagttttataaaaaagacaagcttgaagctttgtttgaatggagttactgtttgatctttgtttgttcttttgtctttaaccacttggcccattctttgtctgtttctttcatcaaccacataaacaaaaaggaaacctcatctgtaaacaagtgtttatccaaggataaagaaaaaaactgaaacttgtgaacatg

SEQ ID NO: 1149 - DNA, 3000 bp, Unknown
  misc_feature (1)..( 3000): cDNA_ID_2131080_gDNA_ID_1620363_Annot_ID_154718 3000 nt of promoter + ATG
cggcattttccgaaaagtaaaattgaagggacgcaaataatatttatacttatttaggtattttattttatatccgaaaaagtaaaattgaagaaataaaaattgaattttggaaaataaaaattgaatttttgaaaataaaaataaataataaattaattgaaatatgagtgaaactcaaattatatgaagtctatgcaaatgaaagttaacttgaattattcttcatttaaatgatcaattatccttcatttaaactcaaatattaaaactggacttttaaatagtatctaacaattcacaaaaaatatctaggagatgtgaggataaaaagtttggcacattcttaaataatttaatataaatatgcaaactcaaatttaaaactcaacccaaaaactttttttaccactatcaaaattttgtagaaatatttaagaaatttgtatttgataatcagccaaactaaaaagataattgttgtgtgattacatgaacatggtacatcaatagaggagcaaaaccaaacacaaacaatctaaacaagatggactcctcaacacgaaacattaccaccaaatacatacaacttcgtcaaggaccttaaatttaagactactctatgccgaaacatagatagtagaaaacagagcaaggaacataatggcgagaggttagatagagtaaagtttaggtaaaatgaattttatatagctcctttacgtctttgtcaatttcatacttttatcaacaagacatatttccgacttcgattcaaagtcgtacattggaaaattatgctttagaaaaaacaaacttgacgaccaaaaatattttttaaaacttaaaaataaaaaaaaactgttaataaaaaaagtttcaaaaatagcttgagcaatgcatgaaagagagctgggagtgatagtagaagcaaaaaaaaacctttcaggagatatatataacccaaaggccaaagctctatattagaacacaaacattaaacattaggcatggaaaactctcaattagtttcgatcactttcttagcttacactataatcatatcaatcggctccatcaactgcatagacaacaataatcttgtaacaaaccaatccgctctgttcgtgtttggagattctgtgttcgatgctggaaataacaactacatcgatactctctctagtgtccggtctaattactggccgtatggtcaaacaacattcaaatcccctactggaagagtctctgacggacgtttgattcctgatttcatcggtaccaaaattactttttcgtttccttattttattttaaaacattttctttgtaactgatcgataacatggcagcggagtacgcatggttaccgttgatcccgccaaatttacaaccattcaacggtaacagccaatttgcctatggggtaaactttgcgtcaggtggcgccggagctttagtcggaaccttttctggattggtattcattagtaactactttacattggttttatttatttgttttcttttgttgaatccatggtaattgtttgtcttgtctatttttttttctttttcaaaaaacattttcaccactgcaaggtgataaatttgagaacacaattaaacaacttcaaaaaggttgaagaaatgttaaggtctaagttaggagatgctgaggggaagagggttatctcaagagctgtttatttgtttcatattggactcaacgactatcaatatccattcactacaaattcttccttatttcaatccatttccaacgagaaatacgtagattatgttgtcggtaacatgacagacgttttcaaggtaaaaaattttcaaaagggtttttgtagagtttctattgtgaacaacttttggtctgaaaaatgagagatgatgttgtgttcttaggaagtgtataatcttggaggaaggaagtttggaatcttgaacacgggaccgtacgattgtgcaccagcctcattggttatagaccaaacaaaaataagatcttgtttccagccggtcactgaactgatcaatatgcacaacgagaagcttctgaatggtttgagacggctaaatcatgaactatccggattcaaatacgcccttcacgactatcacacttccctatcggaaaggatgaacgatccttcaaaatatggtaacaaaacttggttaataattgcaatatatataacagagtctttactataaactttttgatcgttttgaagggttcaaggaggggaagaaagcatgttgcggaagcggaccattgagaggaatcaatacgtgtggaggccgaatgggactgtcgcaaagttacgagttatgtgaaaacgttacagactatttgttctttgatccttttcatttgacggaaaaggctaatcgacagatcgctgagctgatttggagcggacctaccaacattactggaccctataatctcaaagcgctgtttgaacttaattaaagctcactatctcgtcgtgtcatcttgtttggttttcattcaaaattttttgtgtatttgaattgtcaccagaatctttcagttttcttagactcttggtctccaaggctttacgcgagcgatatatatcactcgtttcgattttgagtttttgaccgtttgaactttgaagagtgtttcttcaaattaaaccaaaccaattttacaaaaccaaaattcataactgattcttttggttcacactaaaccgagtttatcaaaactactttaaaatatggtttggtttaaccaaattatacgtcttaatcaatgattaggagactttattaaagtctataaccgcaattcgtcatcaactaccatttccttctccaatggagttcttctctgagagtgagaggaatcactgaaaaaataatactgaccatttcccaaaaagttatgtacttattctgacgaaatctgcaggaaattctcaatttttttaaaagaagtagctttttggagtt

SEQ ID NO: 1150 - DNA, 3000 bp, Unknown
  misc_feature (1)..( 3000): cDNA_ID_2131093_gDNA_ID_1620363_Annot_ID_154722 3000 nt of promoter + ATG
catgttgatttgattgagctttggattggaatttttttttttatttttttttttttttttttttctttggattggaattcattcggtaagtaagaatatttcgtgattatagaacttctaattatgtaaaaaaaataaaataatgcgtgaaaataataaaaagttgttaccctttttttttacttaggtcaagaggtcacaacacacgccccaccttgaatctgagagagagagagaagtacgtccccacaccttgacatggtcatggagcccaagaagaaccaaaatctaccaagtttcttaaacccatcacgacagaatcaggacaacgacaagaagaggaaacaaacagaggttaaaggtttcgacattgtggtcggcgaaaagaggaagaagaaggagaatgaagaggaagaccaagaaattcagattctttatgagaaggagaagaagaaaccaaacaaagatcgtcaccttaaagttgaaggaagaggtcgtagagttaggttacctccactctgtgcagcaaggatttatcaattgactaaagaattaggtcacaaatcagatggtgagactcttgaatggttgcttcaacatgctgagccatcgatactctctgctactgtaaatggtatcaaacccactgagtctgttgtttctcaacctcctctcacggctgatttgatgatttgtcatagcgttgaagaagcttcaaggactcaaatggaggcaaatgggttgtggagaaatgaaacaggacagaccattggagggtttgatctgaattacggaattgggtttgatttcaatggtgttccagagattggttttggagataatcaaacgcctggacttgaattaaggctgtctcaagttggggttttgaatccacaggtttttcaacaaatgggtaaagaacagttcagggttcttcatcatcattcacatgaagatcagcagcagagtgcagaggaaaatggttcataaagctcaaacctttaaatggcttttaattagatatatttagcgagaatgtgattgctagtgaaatctcaaacttgatagcttattcatagcttattttacttcgatcagcaagagaacaatggttcctaaagctcaaaccttttttggcgtttgctttagattgtgcatacataaagtgagaagatgaaatatggttttgctgaaatctcaatgtgctcattcatagtttattttgctcgacctttctttaatcaatagctttgatgtactgattactttataaagttaagaagtaagttctgctctttaaactgtactgaatggaggcttctctgcataattaagcaaacactctgatgattgagtttcgttgtacaaaggaaagtttttgccttagttagaaattcatcttgtttctttgcccagaagctggcttgctgatagaatttggactacgctacgttttcttgggtgaaaaacaatccgcgtccttccacgagaacagtgaaactgtacgatgttcttattgtattgtgtcaacagcccataatcaatgaaatgggcctcaatgacagtataagccgaaaaatattcgaatgcgatctagaactaatctgaaaccaaacttctcaaatcattaacatttgattagggcctaaaagtccatccgtattttaaaaaaaagttgataacaaatgcaaaaatacaaatatacattactattaaaactcaatctttctgattatatgtggatggagaagctgttttgcagtgtggatttgaattttgaagttcttgttcaaaaaagaaaagaaacttggtcaagcttcaaaagaaagaaagaaataaagacaagtatacaaatacgttgacttcaattaatatgaagatagaagagaaagatatagaaatgcgttttaaattggcggtgggagatatgtgattcccttggtcccgctttctcgtttgattcggtaacctaaaccttctccatccaagaagacacaaacaaggaagaaattaacctacgtacgtacatcatttgaactacttatatctattataaatggaaaatctattttcttcttctctctcttttaaccgaaaaaggaaaagtcctcgaaataactctttaatataattcatgtggaaaccttctatatattttttgcatgcttttttgaaattaagtaatggcatactaattagaagaagacgaaaaataatatgtctaagtaattgagtttcgtggtcaaggcaaatcaagattgcattctttaattaagtgtacaaattatgatgtaagaaccgttatttggcataacctaatatatattaaaaactgattttttttttttttaacttctgtaagaaatggttttcttaattaccaatcatgatctattattgtaaaatgtgtaattttgtgttgcgattgaagtgttcttagataaagatatgtcatatgcatgatatcatctatttgattttgagaaaataaaaacataacatgagaacatcgtagagagtaagatacatgacaaagagaaagaataagctaagaagtcatccaaaaattgggaggcctactctcaactaccaaaaatacaagtgtttgttgtgttaggtcatttattcagtcacctaaccctaactatatgaaatacgttaaaattcatatatagaaaaataaagaagaaatactattagtcaatataattttttttaacaaaataaaaataaagaaagaaacactattagtcaatgaattaaaaaaaaaaaaatccatctttcgatcaagaccgtccaagtattctcctttcacataactcttacgttttacactaaacaagacgagatttttatgagcttgtggctcccacaacaatcctcattgatttctccatatatatcacatgagaatccaactcgacttcatactaacattcatcccaaaagttccattctttttcacaaagccattgtgctgttttctccatttggatcaaa

SEQ ID NO: 1151 - DNA, 3000 bp, Unknown
  misc_feature (1)..( 3000): cDNA_ID_3060888_gDNA_ID_1620364_Annot_ID_154755 3000 nt of promoter + ATG
atctctctttgcagaaacagaactatccggtttggttatacctggactctgtctactcacactccccaatgacttccttgtcgaacttggtgtctcaactttgatcacaactgaaccttcaacactctttctccttgcaatcttccacggcttcacagcatcatcttgatcacatttcttcccatgtttacataaatcatgagtcgaacccacacgatgattcccacgataacgggactgaacctgcggtttacttatcgttccagtcgaatggcgtctcaaagtcccaccttgaggcttaggcacttcaataatctctggtataatctcttcttgatccttggctaccacagctataacatcttccacattttccacatcctttacacgtactgtttccaaagagccttcttcagacatcttcggagggtttgtatcggaagaattctcaatatctttgacctctgaagtattctcttcagccattgacaaaataaacctgtagaggaaacagagtgcattaccaaaaagatctcgacgtttatgaacagagcatattagaacaatttaatggattctaaactgattctttgtcttttattacctattcactaatcagattctagaatttgacatcataaagaacaaatctttagacaaaaatctaccaaagatgactcaatacattcaaagaaggacaaatgttgactttaagagtcatgatcaaatatgtgtatatttcctcgttgatcatcaatgacattaatacctaaacgacaaaattgaattttgatcatgatccgttacgaaaattaatcacttgtattacaaaacaatgaaaaaaactccgatctttttttagataaaaaatttgacttctgatcgagattgaaggacaatgacctaatttctacacagtaacgcaataaatactccacacgcttaaaaccctaccaacagtttcacaattcaaacaaacacaaaaataaccaaaaacgtatatcaaaaaagaaatcaagaattaagaaaaaagatacctttagattgctgcctaatctaactctcagagaatttccacagaataagaagagagaaaaaacaaagaaaacagtaaaatatgagaaaaatgtatatatgtgtaccagaaaattgctttcccaaattatctttagttggaaacaaatatgaagaaagaagaaaggtagatttgattagttaggaaaagaacacgcaaaaatacacagaggagggaagaaatcttcttgtgcagaagtcttgtgagagagggagattctgatttttatattaaagaattttgttatttaatttactttggctcgatttgttatttaatgttttacctaattttataatctatttattcatttatataaaactgatacacttggatgcatttaataaaaaatcggtgttgtttaaaaatctcattaatctctcttatatatcaaaatcatgaaaaatgcatgaataatcggtcacgaaaaatgaatttgacaaattcaatctataatctccttagatcactatattaaatctcaaaagtatattatcatacaaggaattccaatcgctcggaggatattttggctaaagcacaaaatccataatttttctttaacataaaaacaaagagttattagttttgtaactattttctttttttacataaactgactttactttgtgagatcatattcatatgtatgacatttaagggatccgataccttaagttaagtctttttggtactttttctaaagaatgattcttgccaatgaacatctctagattcttttcgtaatttctttagaataagataagatcaaggtgttgacccacgaacaaaaaatatatgaattgttatatcgcaagaaaatgattttaaatatagataatgtggccgtcgaaaaagataatcatgatttagcctaaaataaatctttgagatatggaatttggcaaaacaaaaacaaaaaatgttttattgagaagacagagcccacaataatacaatgtcaagatgggttacttgattttattctttatgggccaatgaacttgggctcattagattcaaactgtgtgtttgggctccttagattagaaactgattctcctaaatgtgtgtttgggctcctttgtaacatttgctttctcatggttttcaatagaatatcaattaacaaaaaaattggtacagtttcggtttggtgtaaacggtttaattagattaagcatgcttaaaagagagagactttgatgaagtgttgtcaactccaagaacaaaaagcacctctgctctgttttgagatccaaccacagttcaaactaatcaaaagtcccaatttctaacttcagtctaggctttttctctccatggatccttgattctgaggtcagtttctgttcttgaggttttttttcattctgctttctctctcaatcagattttcatatcatctcttcgagaaacataaattataaatatttagttatgacttatgaaggttacaagattaaaattagaaattaatgattaaatcatccaaaaagtcaactaatgcccttatccatgcttctctgacaccaacatttgactaatctaattaaattaggaacaaaattattatcattaacaaatacacctccaacattaagtaaaatttctatatacacaaattttcaaacactaatggtttacttttcaactcaaaattcgaaataaattttccaagaaatataattcttatatcattgaacaagcctccaagttttcttaataagtttttcctctgtaatcatcatttgcttgttaagataagcaggtttcagttctattattcctcttttctaatttttttggattatattttccatcttcttgatatgtttttggttgtaactgattactaattcttgatcgctctaaaagttcacttttctttcttacagatcaaccaatcgaaagaaaccaaaatg

SEQ ID NO: 1152 - DNA, 3000 bp, Unknown
  misc_feature (1)..( 3000): cDNA_ID_2131006_gDNA_ID_1620364_Annot_ID_154763 3000 nt of promoter + ATG
caaattgttatctgaagaatttgctatatatacgaattcaagaggaagaatcctaaaagcataacaaaaaaaaagcagagaaagaatacaagaaaaatggcgacatggtttcacatcttctgcgtctctttcacagtcaacttccttctatatctcttcttccgcagaactaacaacaatcttcctctacctccgaaccctaacttcttccccatgcctggtcccttccagtggctccgtcaaggcttcgatgatttctactcctatctccgctccatccaccaccgtctcggcccaatcatctctctccgcatcttttccgtccctgccatcttcgtctctgatcgttccttggctcacaaggctcttgttttaaacggcgccgtattctctgatcgtccaccggcgcttcctaccggaaagatcatcactagtaaccaacacaccatcagctcaggatcatacggagctacgtggcgacttctccgtcgtaatctcacctccgagattcttcatccatcccgtgtcaaatcttattccaacgctcgtcgctctgttcttgaaaacctctgttctcgaattcgtaatcacggggaagaagcaaaaccgatcgtcgtcgttgatcatctccgttatgcaatgttctcgcttcttgttctcatgtgtttcggagataagcttgacgaagaacagatcaaacaagtcgaattcgttcaaagaagagagctcatcacgttaccaagattcaacatcctcaatgtcttccctagtttcaccaagttgtttctgagaaagagatgggaagagtttcttacgttcaggagagaacacaagaacgtcttgcttccgttgattcgttcccggagaaagatcatgatcgaatctaaagattccggtaaagaatacatacaatcgtatgtagatactctgctcgatcttgagcttcctgatgagaagaggaaactaaacgaagacgagatcgtgagtttatgctctgagtttctcaacgccgggactgatacaacagcgacgacacttcaatggataatggcgaatctgtgagaaaccaggaaattcaaaagaggttatacgaagagataaaaagtgtaatcggtgaagaagaagagaaggagattgaagaagaagagatgaagaagatgccgtatcttaaagctgtcgtgttagaaggtctccggttacatccaccgggacatttgttgttaccacacagagtaagtgaagacactgagctaggaggatacagagttccaaagaaagggacgtttaatatcaatgtggcgatgatagggagagatccaacagtgtgggaggagccaatggagtttaagccggagagattcatcggagaagataaagaagttgatgttactggaagtagagggataaagatgatgccgtttggagcaggaaggaggatctgtccagggattggatcggccatgttgcatttggagtattttgtggtgaatttggttaaagagtttgagtggaaagaagttgaaggttatgaagttgacttgtctgagaaatgggagttcactgttgttatgaagtatcctcttaaagctcttgctgtgacaagaaggaaggagaagacacatatcgtcatggcttagagacagagtagcagattgatttcttggggatgtttttgttctttagtttttcagttttttttttttttggttttctagagtgtttttggttcaatctgttgtggtagaaacgttgtcgtttcaataaaggcagccatttattgaaacgttgtcgtttagatgcctctcatttttgttgaaagccctagaaaatggaattagacgtataaattgatttcatctttctcagcttttgctaaacgcagataaacaggtttctttctgattcttcttcgtattggaacatacaattatacaattgggtataaccattttcttggatttcagtgtatgattccttttaatgttcaaagttctctgctttctcttgcgtaattttgctctctgttttttttttgtcttcatctgtataatggaatctcccgaaaaaactcgaagtttataaactggattgattcctttcttctccattgtggtcttaggtttcgaaagtttctcactttagacttgtgttagctctagaatgcttgtatgatatgtttgtgacattgtggtggagatgatgaatgttaagtaaaaggtctgagtaggttatgagtaaagtgtgtagcttttgattttaatttagtttcgaggagacaattttttaacttaataggagagggcccttgtccatgccttgagtcatggcatctgtggctccgcaacctctccaacaatgaacctgattcaccacgtgcttgtgtgtgcaatctgatgggtcgatttttaaaggcttggggttgctttctattattgattgccaatctagaattctccctatatacattggtctccttgtgcttctttatcatcaattagctgccctcataagtcctgcactgatcaaagacctccttgactgatccacgcgaaagtatctaaatagttctttgtattgctatgttgaagtttgaagctttttgacaaagcttgtttgatataggcattgcttgtggatgatgtttatgattccctcattattgtatgtgtggactacagaactattcatgtattagcatttacccttttgtggttaagctgaagaagtataccataccttctagtgtttgtttgattgggtttttcactgtggccattagagtgtttaagataagtactctgtttgtcgatactctaggatctctctttcaagtgggtttgatttgaagacgtattatatgtgtatatataaccgaagaataatgttatgttttgctaaatgttgatgtttagattatcaaagagaatggatttttgtatattcatgatctattgcaatgtttgattggtttagtgtgagcaggagagtggcaaagagatg

SEQ ID NO: 1153 - DNA, 3000 bp, Unknown
  misc_feature (1)..( 3000): cDNA_ID_2131018_gDNA_ID_1620364_Annot_ID_154767 3000 nt of promoter + ATG
gtattgtttttgtaaagtactgtttgtctgtctcttataattcgataattattttaaatattgctctattgaactactacttgttcgtcttattgtatgtttctaagtcaacttaactttggataaactctaagatttaatttatacactaaaccatctgcaatatagttttattttggatcgatcccactgctttacagatcagaagtaaataatccagccgtagttgcacgtgatttttaacaattttaaccattctagttatataaataagtactcgtgttgacaaagactaattatatatagtcaatcattagaggtaactttgttttataatctctatcaagattcggttatagagtctttgatacggttatatacatcaaggaaatatattctaggtcaatgagtgaaacaaataacggttttgctttattaatggttatacttttctattttgttgtgtattctaattatgctatagagagttacatgtatataagtataaagttgcgacttgtgatttcatttaccagtacatactcaaatgtataattgattaggtagattacatgtcacaatactctggatcggttgataaaacaacaccatccaaaatcacatataaacaatgattgattggttcttcgttattcaaattatatgtggtaataataatgatgatggtgatggtataaaatatatatagagagagatttagtatttaatcgatatctaattgtacattaaatgttttgttaattatcgttgtgaatgtagatttaaataacatgaaatataatttgtaagtttctcgttataattgtctacatcataattcataagtttaacctgtggcatgtaattcaaattttgtagttaataaaagaagaaccaaaaaaagtataacaaagttgtgatgtgaggaatgttgactttagatttggttgtagcatattgtccattctagtttttggaggtccttctaattgcaccataccagagtttggaagtatttcctttattgcaaaaacagaatttataggatccatattcatcctttcgattttgactttctacaaaaaaatgtgaccaatatttattgatcaactaaaaagtaactatatgagatcatgatatccgacattgtttgtgttaaagtcgtgttgtcactcaaattcagaatatgtatattgttgatgaaaataaataaactaggtcattatgggtgttgtatatcaaattagttgattattaaggaaattatatatatgttttttatgataaaacaaaattcagaacacaaatggtcaactaacatcaaaattaataaactttatgttaaaaaaaaaatgagaaatcacttaattttaaacaaaaatttccaaaaacattatttattaagaaacagatggaataactaataaacactttttctcaaaaaaacaaatattaatagaacacttaaatgaaagtcgtgtaagaaagaggcatggcaacaagaaggattaattttggtaatttaccttaaccatagtgttgttagtttgttagatgttcggttgtactaagcaccaacactacaaccttttctgttggattctaccatccttatttttaaaaattctaacatcaataaaagaaaatatatactcattttgtagaaatacattattgcgtctattgatgttactaaattataaaattgatcagaatataatttaaaaattaaaactgtgataatacaatgtcataataaacaaacaaaaaaaaacacatcaacatttcagcaaataaccaaaaatagacgttcaacagtcatggtcgacgccaaaatatcaattattattgatggacatatacttttctctaacattacataatctttgtataaactaaagaaaatagaatgaatattcgtaagagaccttcagtagatatcacatataaaaaatgttttgagtctatgttcttgcttttacacatatgtacggtcgagttcctttttgttggagtagcttagaatcaaacattatagctcactttataaaatggttataactccaattattagtagactaatacctaattacaagtagactttatacctataactattaagattattccatttaagattttagcaagctttttctagatttatttctccatggactatatgtagatttatataaaacaagaagatgtgttacctggtaaacgttaaaccattcaactaaaaatagatatgaaaataaaattgcaaatttccaggtgtattttctcgttgattttgttcgtctaatggaaactcaataataatggttcacgcttaaactattaccatatgccattaattaaagtatattattgcgagtggatatatttctatatataagaaaatcagaaatttcaaacaaggaaatggagaactccctaaccaccaagtccaagtcaataagactgcacaccaaatgcatgccacaggttggacaaagtttgatgatttcttctatctaatttccattttctcttgattattttaaaataaattattaacttggttaacatattattgtattggtacaagaacacaattggtaattaataagtattcaagtgttctaggatagagtttttttttaaacattcttatttttcattaaagctaaacttagtaggtttggtaagcatatatatgatcaagtcgcctcaagaaaagttaatagagtttggaattttctcactcaaaaatcatttttgttgtttacattatgatcaaaagcataacaagagtaccatttttaccaatataaatttggttattaaaaactttactcttttgagctcttatcattattcaatttcttgaaagctaagcctccagtttcctcaaacctatcattattaagctttcaattgaatactaatacatgactcactctgtcacaatttaatatatatatatatacacaaacacacatatatatatatacaatg

SEQ ID NO: 1154 - DNA, 3000 bp, Unknown
  misc_feature (1)..( 3000): cDNA_ID_2131039_gDNA_ID_1620364_Annot_ID_154773 3000 nt of promoter + ATG
gtgaatgacgatcaccagaagtcccagatgttgtcgttgtgtctccattcgccataacattcacaagaatcaaactcaatatcttcaaagtaggctcctctatactattctgtaccattgtcttgtaaattgaggatatgcagattccatacattttgcaatgaaacactgtgataagaaatatgttgttacatatgtgtttttgacttataataaagcatttcatttgtcttgcgactcttgcccaaaaacccagagataatcactttgctctatctcctgtaaaagttttatccttatatacaacgaagagccgattaacaaagattgactaacaggaattgctgacagttttcaaacgacttgaattggtcaaaaaacaagctgattttacatatccattcgcttggtaaaacctggctagcaattgattcaccaaaaggtttggcaatatcccagttttgatcatgtcacactgcaacatcattgtatcagtaatacgcttttcttggaggtggccctttaacattgaaacgtaactgcatatgtcaggggttatcccgcaggatctcatgtctgagaagaatctgctagctctaagaatgtagccgttctgacacaacccttcaatcaagcatgtaaaccccacatgattccaacagctcctctgttgattgttttcttgataaaaatcgatggcaacagagagtcgtccttctttccagaatccatctactaggcaagcgaacgtgtgatcattggggtggattcctgcctctagcatgtcactatacagcctgagtgcttctttcatgttggcctccttgaaatgtgcatcaatcaaagctgtgtaggtcacaacatcaggaactatacctttgatggtcatctcgaagtacaagcccattgcagcttttatgtctctcacattgcagtaaccatcgatcaaagtagaaaaggttatgatgttgggttctacaccacttgctgtcatctcagagcacaaatccagagcttgctccatattgtattctttacaatacccatgaatcagcgagttgtaagtcgcagagctcggaaaaattctctcattcttcatcttctgaaataatcgatttgcttctgctacctgatcttcaatacatagcccgttgataagtatagtgtaagtgaatacatcaggcgaaagattcaaactttccatctcagaaagtaatcccactgcttccaacatgttccctgatttgcaatgtccatgaattaaacagttataaacatataaattaggatcaaccccaaacttcaccatatgcacgaaaaggctcctcgcagttaccaattcgcgagctttgcaaaatccatcgaccaatgtaccgaaaacaacaacatttggcagcaattcagcaacaagaatctccttatacaatccgtaagcttgtctcacgttaccggtcttgcagtaaccatcaatcattgcactgtaagtatacaagtttggaagaacaccatgtttcttcatcaactcgaacattttctccgcttcctccatcttattatccctacagagatcaaggatatatatggtatagatataaacattcggcttgatccctaacgacgtcatttcatcaagaagtttctctttcttggagtaaagaccttgcttgaaacagcattgaaacaaaacaaagtaaatgtggacatcagggaccaacccacgagagatcataagttggtaatcaacccaaactgaatcaaaccgtctccttctaaccaagccattcaaaatcgaaagacaagcttttgaatccggtgaacatttcatctctcgactcacccaaagagcttcttcaaacaaacccatctccagaaactccataatcaatagactaaacactccgatactgaattttggactctgaatatcttccagagcattgaaaagtctatgagacatgttactcggctcactgtggcgtttcagacgttctatgaggctttttatcaaacatctggcgagcgtatacttgtgagctccggttaaaacatgaatcactgccgaaaaagattgaagatcgtttgacttggagactcgagatctcgaagacgtttcgaacagcttgaacgcttcttccgctgatctgcatttcagtattgcttcagccagactcgaagaagagaaagaagatgccgaatttgacagagaaggagattgagataagaatctaaagttgaaaaattgaaacttgaacaagtaaactgatgttctatgttggggaagcagaagcttcaacatctggagaggagattgtacgaatctactggtcaaaactgaaaactacgttactcttcttcgtgtaaatggtacagtactctcattggtttattattccggttaatattggtttattagataattcttataaccaaaattaatcttcgtaatctatgttcgttatagatgttaatgatgttaatgatatagactacagaagtaatttgaagccacatgaggaggttaaaacagagtgaaaataagtaatttggtgcattttggtatgtaagaaaagtagccaaaattgttaaactcagtcaataagtcaagggactttgattacagacgaaggaagtagcatctaatctaaggggcgatccggcgatgcactaaaaagtaaaaacaacacaatgtacttagttctgtacttatgttataaaatttgattgtttgaccagtaatatattttcccttgatttgagagaaagaatcttttttacatgtaaaacgaatctaaaccaaaacaataatatagaaattcctgaggaaaccgactgagaaagagaagccaaatttagaagatggccttttcctagcaaattgggcaaaggaaacccaccttaccaagttatcttcatacttcatataaatctctgctcattttcgataaaaagttgaatccttttcacattttccgctcaattcgatcttacatgttaacaatg

SEQ ID NO: 1155 - DNA, 3000 bp, Unknown
  misc_feature (1)..( 3000): cDNA_ID_2131052_gDNA_ID_1620364_Annot_ID_154778 3000 nt of promoter + ATG
tgagaacacaactgacagcacaactgaaatcagtgatctcccgtcgggccgttaaatccatttcaaaataaaaagtagacaaatattcatttcttattcataaagaaaatcattatttttcaaatgttaaaagtaaaagggggcagtctaaaagaaagaccttttaattttaatttttggggtgagtggatatttctcatggtcccaaattccccaattaagaatcactgaagttctctatcacctcacagataaaatcattttattattctgttttattttaatctaattgtgtaagtgtatccatttttttttatcagataagagtttccataactcagaattctaattaatgagtcctaattctacgtcccgattcagaatcagtagtgcctttgggaacgaaactataataattggcgtgtagaagtgtttaagcatgatataaagttaaacaaaaagatgattaactacaagaacattaaaaagaaaaagaatttaacctcgtgtgatgtggggattaatataacaaaaagtatattcgcatataatcggaacaaaacaagagtgacaacagtcaacaggaaagaataaataaattgtcgaaaatgctagagatcacataactgtggttttgagtggataaagcaacctgtccaagtataaaatttacgtcactagaaaaaagttaggacacaaaataaaatgtagagcaacttgttttgcaaaatgatagtggagaataagataaaaccgcaacaaaaaaagctacaaaatcacgaagagttagaagaattgaagcaatgtaaatgctcggaagtgagtcgttgcgaaaatttaggtttgtaaaatgaaggattatggtgagttttagtttgcaaaataactaaaatattatgggaccaaggaaataatcaagaataagtgaagatacactatgggaccgtttaagtaggttgacatatataactgactggaaccagcggatcttagggatataatcaatacttattgactaaaattttcccaaaagaaagaagaatcaaatgattactctatgtagtaacccaaactgatcctaacaaaattgtagaaatgcagatggtttaaatatgtggcgctctcataaaactcctacttcaggtaatctttttacacagtttggagctatcgtagctcttaacattttcactccagcaatgactagaaccaacagaacaatgagagattggcttctatccatagaaagcttcaacacgaaaaccgaccaaaacgaaatgttaaacccaagccttcttcaagcatagctgtatcatattctatcttccttgtaagagttccttttgttaaaaactaaatactaaatccgacttaaagaataataatcaagaacttcaaaatagcaaagtaaaatatacacacgcacaaattgataagagttcacttagcttgcagtacgagaactaggcaggggcagacctagcttaagagtgtaggtgtggcaggtgtttaattatatagaatttactttgtggcactaacatatttttgttttataatgcaaaataagatgttaaatttgattaaatttatatacaatacaagtttgtgttctatgtaaaatatttttctagatcaaacaaggtctagttttaaacgatccatgggagtataaattttatctttttcactctaccttgaaaaatgcgcatgagataaaatcataggtacatatacatacgtgaagaatagcatcagaaaatattgttctaactattccgataactaacaaaaccttaggaaacctcatcaagactagttcgaattaaatcataaggtttaggttgagagagtcaaagagggaatgatataaatagaagaatattttttgtttaagaatgatttttagacaatggaaagaagaatatgttaaggtggtatagacgacgagcaataatacaacagccacaaaagtggcaaacaaaaaggacctacgctggaaaaaaaacacgtgatgttacaatcaccctttcattctcaatgatgaacaataatgtttattattgataagaaaaacaataatgtaaatttatactttctcgttaaccagatttgttttttcattatgcgtttgcagtataaaaatagtaaaatacgttttaagtattaaactgtttgatagtttttttttatatatatacctaacagaaaccaactatttaaacaatacaaaaatatctgcaaagatatatatataatacaatcgaattcttaaaagttatatatatttgcaaacgtccctttagttattcccctccaactctccatgttggatcaatcattcaatttttttttaataaccaaaagttaaatgtacaaatatgcaagaacctacaggtacgtttacgtgatatataaattaaaatattgcatctcgtaccgaagcgcattaccgtatttaaaatacctgaaagtaggaaaatatagtactatacaaacaccacttttcggacattattttcatagaaaagttacgaattatcctttttaactattgatctatttaaataatttactaaccataactatcttgttacgttttcacaaaaaaaaaaaaaaaaaaatctcattacgtacgtgtatatatatggaatagctcataacctcaccactaccacagaaatcatgcctcttggttcttttccataagcttataacatatattttttttaaaatctactctgcgttaaaaaaatgaaaacacgtagcagcagtgtgggtaagatcaaagggtgtttctcgatcagtttcatattcagatgtatcagagttctcattaacagatctgtttctttttccttatctgattaaacaatttccttcagaattttacttttttgaacatatatagtttttctctgttcctatatcttgagttttgtgagaggttaattatatgaaattttacgcattattgttcatctatatcgaaaaacaatg

SEQ ID NO: 1156 - DNA, 3000 bp, Unknown
  misc_feature (1)..( 3000): cDNA_ID_2105020_gDNA_ID_1620364_Annot_ID_154775 3000 nt of promoter + ATG
gaaaaagacgttgcaataatagtgtatttgtgtggtcaataaacaatttacatgaaagccaaaagatcacgaggtgaaacagaagtctaattggatttacaaatcttgtctaaacacaaaatcgaatcttaataataatgtaattatattataatatataaagtatttatgtgcatattatttgaattcgctctagcagtcaaagaattagaaataaattattcgatttctaattttcactttttaaatgatttttaattctttatttcaattttttcgaatgatattgtataattttatgtggttaccacacacaaaaaaacgtaatatatagtgatatagaaacatgatttcatatattaatacactcattgattccaaataaagaaaaaaacgataagaattaagatgttttagagtttttttgtttgaccaataattctgataagaagtcttactcacttttcataaatggcctttagacccactcatcgctcaaaaaaattcagaaaaaaaaatgaattgtacaaatgcccctaagatcttacaaagaggcacaaaacaatgcaacttattacaagaccaaatcatcgtgactgctctcaaccccagtcatgctatgtatctcttgcatcgatcgtcaagagcgtaattgtgttacttcatatcagaactccaccatcgtccacgaatggttcgttactcaatattgtttgcaaattttgttttggttacttttgtttgtattacgcgaatgaagataagacacaatttagggtaaagtatataattcagagttacaattaatcaacaattttatatataggtaaattcaatcaaaacatatgttgttgatatgcagtgtattaatatgatcactcgttagtatagtatctgaaattctctttccaactactatacatttggagtcgctatattttaaaaaatataaataaaaaaaattgaaaacttaaagccaacacattgtttatctgaaattgtagtggaaaataaaagatgaaaactttgttggtcaaaaactccttttggtattataggtttttttttacattaagcacgtttttgctatatatgggagcgctttatttttttgtcggcatgtgtggagattttaatctaaagtaatttgatacttttcttttaatttcactggttgtcaacttgcaaaaaaagagcccaagcccactcaaattacgataatcatatggcaatattattaagccaaaccaatactgtatataatccaatgtcttcttttgtgacaaagacactttatttaatgattaaacgaatacattatatgcatcatctaacaaaaagtaaaagtgctgacatatcaaaagactagattcttattgcgagcatttcatgctaatagatcggtcttcttccgatggaatccactacaatccataaaatgttaatcattggagttctgtaaacagaggataagccacacaaaaaaaactatatagatctgcatataaataattaggcctcatgctaatgggctttacttaaaataaagcctaaaatagtattgtgacgaatatggagagacgttttggattctcattcaaatttcaacccattaatggctaatcactttgtaaatgtaagattgtactacttatatcttttacgaggtgatttgaatcaattaagtaatgcagagattacgatataattttgggaagcacaacttttgaccaacactccgaatcgggtctctttctctataaatagccatttcctaaacacacaattttcatactctctcaaacctccaaaattcttgatcaatatcagataagaagaatgagtggaaaacgcagcaatgtcggtggaggaaagagcggtggcgctggaggtaagagtggtggtggcggacaaagcagtggcggaggaaaaagcggcggcggaggagcaggagcaggtaatatggtagcaccagggacaaatgggggtgcttacatctcaagaggtggattcgagagtaaccctcaaggttactttagtaacttgcatggcagtggacaaagcaagaagtgacttgagtgttgttgttatactacaaccatgagccatcttctttgatctattctctatttaataaaatgctatgaagtacaaacaagtattgaataaatgagatttttatttttatgaggtgtttgttgctttgtgcttaacccactcttcttatttcttaatcaatctcgttagtcctcgtgaactatgtgcctaatcctatggatcatgggccttcttttttcagtatggccccatgatataaaagcatcatgtaaatagattacgaaatctatcaaatgggactaaatttggtattctgtttttttctataaaatgacctaaaacattttttgtatatataattggttgacaaaattataaaatttaaaacgatgagtttttcatgttaattaaaattttctatcaattgttttagtcatacatctcaaattgaatcttgattttagtatatacattcctattattttttatttatcaaatattttgtaaaaattataaatgacctaaaatttttttttttattaattaactttttatttaaacgacaatttatttagaaattatatgttttgtatcactagtaaaaatagatttattattttgcaaaattagcatattcccacaaatgtacaagacccgtcatcaaaagagagccaaccgtttgagatagcgataagccgctgcattggatcatccgaacaaggaagacgttacccacgagaccgtaatcacacgtggcggattctcagatattctctctttttcttctttacccggaaaaataaagtttctgttcttcttttttcttctctgggtttgagaattggtgtaagagaaacgattgaggttttctcttattatctaaacccaccaagtctttcaggattttagccagagaagcttgagtctttgattagggacatg

SEQ ID NO: 1157 - DNA, 3000 bp, Unknown
  misc_feature (1)..( 3000): cDNA_ID_2104953_gDNA_ID_1620364_Annot_ID_154772 3000 nt of promoter + ATG
ttctagcgtgaatcttcaagttaagagcacgacgatccaccattgcagcttcttctttcatcttcataggtttgaaaacctctgtgacagatggatcaagcaaactaatggagcaactaagtgtaacatcaattgacaatgcctcttcccaaagctctcttcctttctcaaagtttcctcctttacatagttttggtatgagcagatcataaacctgaccataaccacccactgagcttctcttcatcttctcaaacaattgaagagcaaagttaacccgctcgaccccacaaagaaccccgatcagatcataatagaatttgcgttcgggtctaaatcctctctcgatcatctcatccacaatttggttgcctttaccaaaccttcctgtcaaatacaggaccctcacaacgaagtaatagctccctgtatccggatcacatcccgatcttttcatctgttctaaaatctggcaggactctctcaccctcctagtccttcccaaacaagagagcaaaatgttgtaactcatagacgtaggttggattttgtaagacctcatctccaacataatattcaaagcttcaggaacaagcccagacgggtttcgattcacgtttctttcgcaaaggcaggtcagcaacgagttgaaacagaacaaatccggtgtaatccctgctgatttcatatcttgtataactcttcttgcttccttcacgtttctttgtaccgaccacccgaataaaagacttctatacacagacaattcattcccggatattacatccttgtgatgatgcataactcccaatgctctcttcacatgtcctctggaacaaagagcgcttataatagccgtcacagtgaaaccatcttgtgggcaagaaaatttgtccaagatcttgaagatacctattgcatcttcttccttaccaaccttaaccagagtttcagcgacaatgctaaacgtttgcttgtccatcgcccgattctccttcctgagatctgataagagtatctgcatagctgtgtgatccttcttctcagccaaaactcttaggacatagttgaattccttgtcgtgtaaactagatcccaagcttttacacgaccaggagaaaaacctcaacagccttctcggtgaagtctcgttcttgcaagactcaatcacttgggtaacaaggtttgatgatggagaaacagaaacctggttcaagttttcttcaaggtcatctagaccaccaactggagaagaaactatccgaataacttcatgcaacgccgtttccgatcggtcaactaaatggtgagagcaaaagtaacgtgtcagttttgcagtactcgttagatacgtaaacctgtttaatctgactgtggtggacatcatcttctctgaggaatttcatcaaacacttgatatgcgtatgcttcttaaaagccgccaaatataaaccatagaagggactctctcctgacttacatgtttctcagagtatttacaacttcgttgtaaattctttcagcaacatgaaattcagatttctattaaaagacctaaatttgcagatttcatgagatcgctcggctcaacaacaatatatattcatttgttggaaacattgcccgcgtgtctgaaaagggcattttagtcttttacattccatcacgcttcaaattcagaaccggataaaaccgataatcgtgagatacgatggttataacttataagtcactaaccggaatgattactctcgaaggccgccgatgcatattggaaaatcgaactcccgataaaatagttctgaaattacacgaataattaacatcataaagtcataaacaagttattggtcaatggtcgatggcaaaacgtaataaaagttggaccgggacaaaacgtgtcttacggtggatgaagttgagaatatatcatgcattattggtccacttgtactaacgatattcgcagctactaatatgagccaatcggtaatacgaaatattttagcttgtcgactacttactttctatataaaagtttagcctactaattatctctttttatgattatgacaacttgattatttgtttcccaaccactgatgatgagattaaccatcttttttgctaagaaggtaaatatttcatcttgctaatgtcctgtttacaagacaatttgcacacatacacttataacattagaaaaaaacacttgaaactttgttacaacatatcatttagcttgatttttcaatcactttaagaagttaatgaatcataatgcctaaataagtcctctataacaaccatgaaaggagtgttatatctataaccctgtgcttttagaaagaatcataatttttaggagtcttttgtgatgagaaattgagatgtaataaaagtaaaattttctatatctgtatctttcgttttttatttttattttgtttgtatctttaattcttcagtacctaaagataacagaaaaataaaattctgataatagattttcttgttgttataaatatattttaataaacgaaacgaagccgaatcctaaaatttggtttctgatggtttggtctgatctggtcatatattttaaaagaatttgcaattttttctttctgtcgaccttttgatatgtttgttgattttgatatggagatgcatcttcttatcttgtatcttaccacaataatatcaaaaacaaaaataaatatcatgagatattttctccaagatgacgtggccttttctctatctcaaccaaactatccaacacaacctttttttttatggcctgcactttttattgtccacgtcatctccttggcctaaaatatcccaagtcccaccattaagctacacaacaacgcgtaagaaaaagacttaatctccaccgtccaattctatcctctttcaacggtctctgatttaccatctctctctctctttttcgcgtctcataatttgaccattgattgacaaaacaaaaca

SEQ ID NO: 1158 - DNA, 3000 bp, Unknown
  misc_feature (1)..( 3000): cDNA_ID_2781970_gDNA_ID_1620364_Annot_ID_154766 3000 nt of promoter + ATG
tcaagaaacacacatattcaaacttctccaaagaaaagaaaatagcaaaaactagaatgaagaagacaatggaggatccaagcaagatcatgagaaggtcaattcacactttcctccaaaactaccaccgtgtcaccaccgcagccgccgtggccctccctttctccgccggtctcctcctctctcagcctttcttctcttcttcctcttccacccttcacatgaggcttaacatgctcttccgcggagcgggtttctcttcttctcatgacttcttcaacatcttaagccttaaactctcacaaaccctatcttcctctttattcactcttcctttctccctcacattcctccttttatccaaagcttacgtcatcaaacttctatcaaacaatcactctgcagattcctcctctgttttctacctccggcttctcaaaacttacgtttgcaacttcttcttccttctctctgcaaacgcctctgcttttgctctgtttttcttagcatacaatacccttgaagcctttggattctcttcaagaaacttctacactttcctctccctatcctcagcaatcatctactcaattatcatcgcaaacgcctttgtcatctctaatctagccttggtttcatcaccttcttcttcctcgggaggatacacaaacatcctcaaggcgtgtcttctgattcgcggaagaaattcaacagcaatggctcttgctctgcctaccaatctcggcttagcaggagtcgaagccttgtttcagtaccgagtcatgagatcttattacaatggagacagagatatcatatccatagctcttgaaggaaccttcatagcttacttatacgctctcttcttggttcttgacaccatagtcaacttcctcttttaccagagctgcatcaaaaacgaggaagatcaaaatatcggtagagaagacgagtattcaatcaagatccaaatcagcgaaacagagaacacaaagatacacatcaaaggatcaaagaacttgcaagaaatcttgtgactctcttgtgttggttgatgtaattattacttatacaaaaaaagtgaaaaactttatgagattattgattctttaaggataatctcaagtagctttcacttcaaagaagagcaaaggtacacacacagtaaagaacaatcacaggatctgcaaaactttttcttcttcctctgtttctgcttttctttattttagtctcttttttttccacattgtaaagtcaaatataccagaaattttaattaatgcaaatcttggaattcacatttggttaatcctacagtataatttcattgccgacaaaatatattaattagcaatgattttgattacttccttaagttatgaagatgttgactagattcacactttaacaagagtgaagagtcttttgtttttgagcaaggataagttcaagcaaaatctttcattacaaagagagaagaagaaatgtcacaattatctttaaatagacggtagaggcgaaagcaattgaactttttgtatttttcgttgaatgaaaatcctaataatacattgaaattgtgttaatgataaaagctcaacttaaaaagacaaaaaatggctagtgggtggtctacatcactaatctctctacttgaacctctttaacaaaaagccctttaatacaatagttcagtactacctaaaatttcttctaatggagaaattatgaatgaatctaatttacttttataggttaaaaagagtggaatccggaaatgttgcatctaaagagatcaagaaacaattaagcacaaaaagatgaattttataacaagcaaaattttgtagctttccaaacatacaaaacaatgtaatcattcatggtccatatttaggaattaggatcaagggtttataatcccaggtccgaccgaccgaatcgtataatctggtcctatcaaaccaaaattaaaacatttaaaccggatttttggttgaaccggccggttcatgggttaagcgaaacctctagggttttaatatttccagagttggttgagagcttcttcttacttttacttttcctctgctcgtagacagctttgtgcttgagacgattcccagtttctgcgattccaagtcgaagatataacctctcctatttgcgtctcagcttctacagagcttttaggtaagctcctctgcttgtatgattccttttaattttcaaaattcactgctttctcttgcgtatctgctcaaagtctctccctttttcatttaatcgtttctcttcctgaaacattcgaactcataaactagtttgattcaaaagttttcttgctttaaacttgtgttagctctagaatgttgttctttgtaatctgtttgtgacattgtggtggagatgatgaatgttaaagtaaaaggtctgagcaggttatgagtaaagtgtgtggcttttgatgtttaatttagttacgaggagtcaatctttgaactttataggagagggcccttgtccatgtcttgagccatggcatctgtggctccgcaacctctccaacaatgaacctgatttgtgtgtgcaatctgatgggtcgatttttaaaggcttggggttgctttctatcattgattgtcaatctagaattctccctatatacatttgtctccttgtgcttccttatcaccaattagctaccctcgtgattctgcactgatcaaagaccctttgactgatccacgtgagctgtttttatgagattatctataggtctctgttttttttttttttttttttttttttttttttttttatgtttgaagcttttgacaaagcttgtttgatggtatggttacctcattgttgctctatatttggtccttctttatttgtttcaatatttttattgcttaatccactgtataatagtttctccttcctcaattgagttagtttttcgtgattgcagcattaaaagttgttaaaatg

SEQ ID NO: 1159 - DNA, 3000 bp, Unknown
  misc_feature (1)..( 3000): cDNA_ID_3060884_gDNA_ID_1620364_Annot_ID_154758 3000 nt of promoter + ATG
aattcagacgactagctaatatattattttgttttataaagagtgaattggagaagagaaaagggattaataatcagcattataagtcaaaattagcaaggattcaactaatagctgatggagccaagaaacagcttgaggagaagagaaggagcaaagaagctcaagttcatggaaaagtaaagaaaatgagtcgaacagggaaagttcctaataattatttctgctttcggtgttactaaaatcaaaattacttatatcaatgaaactatatttgtatgtgttaaactcaaatcataaataaagagtaagtacctataattataaattttggtagatatcatcaccatggataatattgcagttttcaattgtctctcaacctaattccctattttcttttcttttctaaagatctgtctaattcttaagctttaattgttatgtcaaatatcataataaaatggagttatactccataaaaatcaaatattgatgtgatagtcgatgtttacacacgctctcgaccatatttcacacatgaaatgtatcatattatagacgagtaaacaccaaaaagggaccataaaggattttgatagatcgttaaactcaatttgtgatatgctctcaaaaggaaaatgaggcattctttggtccaaccaagttactctcttacccgaagtttctttctccattggtacgtagcaacacctatgtggtggccaggaccattcacatttactatcctctcttcttattaggaaaatttgtaatatatattgtcgttgtacaagtctcaatcaatagaatttcgacgatttaaattttattcaccaactattgatgtgtgtcctttcaatttatgatgcaaagagtaagttcaccgatcctatgccatggatacgcgttgcgtgaccttgtaatgaattcaaatgttatatacatttataaacataatacattctatataactttctcatagttacctagttaaaagtagaactcacttaacttgataaatatgatgttttcttcttatataaaagctatctttctcactttgttaaactcgtgtgttcttgaaagacttaagaaaaatagaaacttgaaatgaaagaacacatgaatagttaacaagtacgaatccttaaaataaatcctaaaaattcttcggaagatccactgattaaactttgctcaatcaagctttcaatctcttcactttttatctacctctttatctctcacacgtacgcacacatacatgaacacatgcatgtcctctgcttttatattacaaaagtgacgactttaggattctagctaaaacttgttatgataaattgaaaccatattaatattctttaattttgataagtaacaattgtttttcgggtttgtgttgagttgcataggcaaatttgtaaagtctcacggaaaactacgagtgttaattgaaagagtacattcaaatatcaaaagaacattgacagtgacatttaattttaatttgtagtttaatgtattttttatttatttattttttagttttatgtaaatctataacatcatttggtcaatacagtcattaccatcaactagtgatcaaagaataagttatcataaatcaaatgattagcagaaaacaattgatgtgaagaatctaattcgtataaaagagagtttgaacatcaaagaaaaaaaaaagcttgaaattgaacagataactctgaggagcgttaggattcgctgtcaagaatctaatgcgagaagttgattggctgaatttcacagatcaacactgggtcccaaaaaaccatccaataagatctttccacgtgtcattatgacgacatcagttttgaagctgtcggccgtaactcgagagcggagtgggtgaaatcacttaagattttgatgtgacatcaaatgattgggaaagaaaatctcacaatacaaaggggttgatccgtatttatccatttctctgtactttatagttttcgtattcttttcttctgactcaacatcacatatttcattcatatcaacttgttgttccactacaaacaaggcttataagcctcaacttatggttgcaagttgtaaccaatctgatacaaaagtactgaaccaatgattgaaaaagtcgtctatttttacctatttacgtacaaaactacctagacggctatgtattaggtaatctctggaccagtgcacatgaggtcctataagaaatttaataagtgatgctccattttgaagagtacatataaaaatatcttagatagcaatataaacactaactacagtaagaaatcaaaatttgaaaaacataatatgtcattttaagaaacaagtaagaacaatctttgcttcaattattcatggaaatcaatgagatatctctttgagaaatctaaaaaacttcttcttattcttgttcttctttctcccatggtagactagaaactttcttcccatacattactttttgtaaaatgaacttcttaaaaatgcttttcttttttttttactttttaaaaatgtttttatggtgatcatatgaacaagtcatttgatatattgtgagatgggaatggacagagaaaaattaaagaagtgattaaaagaggctgagaagtgagaacatattgattgattcctagcaacttgcatcaaatatctctagttgatgcatcaacctcacatctcactctcatttttgacattcgaataccatactatagtttcggattcttacgtgtttactccaataaatatatcttgttttctattctttaatgcgtctacatatatgtatatatttcaactacgtttattatactgtataacgataaaaatttacatttttaaataataataataaattctattattagaaatgtgtttgtttctaaatcggtgaatcacacgctttgctttgctatgctttctaccgagtagtcaaatgcatgcaataacacattcatg

SEQ ID NO: 1160 - DNA, 3000 bp, Unknown
  misc_feature (1)..( 3000): cDNA_ID_2131002_gDNA_ID_1620364_Annot_ID_154762 3000 nt of promoter + ATG
taacaaaatagaccaaattaacacccactccttcttgttaacctcacgttataattatttcaagaaaatttagatttcatcatttcctgttgtttaaaaaaaattataatctcatacgtgttagtccacagcttcggaattaaaacaaggttcgctctgttttaggactgagtttcgacgtttctcctgtagactgggttcttcttctttctctgttcttcgtgctctgtctgcaggtggaagacgagtctgtgctgggtttttcgtctgggcttctgagctctctgctttgtttctttttggattcaaggtttttcttgttttattttcgggcatgtgtgcttggttggccctagtggctttgtatgttttcagggcctatatgtccttttgggcttttggccttgtaatgttttaatggaaatataaaattttaaaaataaaaaaaaatagaattaatcataaagctctctcaaaaatatgtcatttacaatcacacctaaacgattctgcaccaattaaggtttcattgctgctcagcaactcttttcttctttcttttttttggttttgcaagagttccaaaataatttgagtagtctattgagcttgttaccgttacgcgctcatgacactctgattatagtgaccagtgaggcagtgaccactctcaactaataatgatatcaatgatcttgctacaagttgtctgtattaactcatccttgtttgtatccaagtaattattttagtgactaaggcaataacacatgcagattcacgtcaatcagtttgtcccattcctgacagataacttatcatattcgttacaatgttgtcatttttttaaaacaaacacgtacgacatgtataatttagaaggtaatactcaagaagttgtcaataaattcagtatctattattttatgaagatgatatgatttgacctaaccaaattcttcagcttggtgacggacgtataacgaatacttattggttgtcatctacaattatatatgaattgcttcataaactatttcgtcggcaaaaatttctttccaatcctgaagcgaaattattcatgttggtaatagactaataggctaattaacagcgcttaacgcgtgaattttcttaaatcatctttcctttaattaattatcttctcaaatactctacaattatataaatgattaattatgatccatgactttgtctattgtatataaaaatatatatattataatgttgttaatatttacaagaaagaggacttttttgaaaaggaaacttttttgtctcctctataattttggtgcaaagaataattatatatgaatgtaaacgtttagtaagacatgctttgatgaaaaaagctcatttggtagcttactggaaagagctttttaacggggtcaattataaaaccttaaaataatatctaggcatccctcttggaggacaaccaaaaaaaaaaaaaaaaaactactctgtagagaacaaaaagatgaagtctagttggtaaaaatttaaagttttcgtgttaatattaggttgaaaaaactatattctgttaaaaaaaaaaaacatacacacaactaattaaattggacctacagttattttttcaacgtactacgtatttacgttaggttagattatgattgatcaaacgggttctatttattaaaattaaacaaatttaattgatacattaatgtgtcacgagttcaactaaggaattaaaatactgtgcatggaaatattgaatttgcatatactgtacacgatgagaattaaataaattaaaatatatatatatatatatataccccagcctcgatttgaagtggacaggttattttatttcaaatagaacgatataaatccactgtatatctattattttttaacagaattggacctacaaaaaaaaatctgaaattgttgtatcgaagtgagttggtcagtcagagattatgattgatcaaaccaggtcccattcatcaaaataaatgatatttttagttttttttgttgttggaggaaatcaaaattaatgaatatacaatgtactagaggcattcaacatatttaatcggatatattaatgaattcaaatatattgtttccatgaaaagaatttactatttagatactaatcgataatcatactattgaacttcgatattcacggagagaaattatagaatattaaattttggataaggattagctccgatttgaattgtggctgagaatgatatcggttcatgctggtcaaacaagtcccatggtttacttaaaaagggagaaattagcaaaatgggtgaaatagtctgttttctttaaaaattataatttatcaaacgacacatatataattactttttatcttaaccatgcatataacacataaaacaaaaacaaagttttccaaaatgtgatcatagagtaattatgtatatacaaatcaacaattgtaagaaaaaatgaatcatctcataatatataattaaccaataatgattagcaaatgatgtaaaaaatcaaaattaattaattaaatttcctaaaaatataaactaaacaagtacagtatttagcttgaaaaaagatatttatgaacaatcaatatatcacatgttgtctgtcgacaaagacaaatgtaaaaaacaatcaatgacctttaatttcatcattttgattgtacttgactcgtgttttttgtctaccacgtctcgtcgtctctttgatttattattgattgattcattcatttataatttccacgtttcaaaaatgtcactagctagctaagtttatgtagctatattcttttaaccttagttctcaatgcagtaataaccaaaaaaagcaaaaaaacaattgttgaccaacaacaacaaccaaaaaaaaaaaaccactatataagcatgccccatgacccatatatgacaccacgagaagcaaatcaaaatcagttactctccgtccaaa

SEQ ID NO: 1161 - DNA, 3000 bp, Unknown
  misc_feature (1)..( 3000): cDNA_ID_3060955_gDNA_ID_1620366_Annot_ID_154836 3000 nt of promoter + ATG
aatgcgtctcattcggatgatagtttaaggagtttggaggttgagctaaatgaacttagccggattaaaccgagaaatagtatattaaaccgaactgaagataaaccggagcagcttacccctacttcggcttggagagccgccgagaaattagctaaagtggctattatgaggaagcatttaaatcgagtcagcgatatgcacggcttggaaaacgccagattttaattttaatttccctttttttcgaaaattcgatttcaatgatttttgaatatataatggtacataatttatataaggaggataagcaataatttagtaaggtataaataatagaagtatgattattcagaaaaagacccacataggtgcatgatagcgacaagcagtagccgacgggtgtggccttttgtattgcagagagattgagaccctacattagaaggaattaattggtcttttagcatttttatcttcttcttcctttttgtaatcttcaaaaactccaaattaatgactgaatagttaaaaaaagttgtagatcaaataaatgaagtctgctttttttgtgtactatatagaattaaaagttgaggtatagtggattagagagtgtgcttgtaatgctggacttcaaaatcaaaagttaagtttatattatcatatgccgtttaacttaagaggatctataatatattatatctttccaaatgaatgatcatgattagtcatgtgatcatcattatagcctattttgttatagaaggcaccgggtttgaatgatttgaatagtgcgtggggattgtctttgttggttgttggtgaatggtttggtgggtgcaccgtggtagaaaccaggtcatgcgccgttgcaaagctttcttctcgcttaaattcattcattttatatcattaagacatttactaattatatgtagctagcgccaagttgcaatttgttttgaatgcaatgattttgtatacttttaaaatggatgaaatgattaactattgtcaaaggtccacttctcgatgtgattcactaaaatgatcagtggcagaagaatctcgaactatatatatggtcaaatcataactaaaaaaactaagctattattttttcacaaaaaaaaaaactaagctatcattcatcacgcagttacatattgcatatggacaatgttaatgtcaactaatgaaagggaaagaatctcgaactatatatggtcaaacggtttgacgcaccatacttaaaaaaatactaatcaaggtgcattacattcattgatgttacaattacttgtactaatgaactctgtgaaaatcagaataacccggtataacacactatttggagttataatggctgatccaacttttgggagattttgtcacagttgggctacagtttgtgcaatcggcaactgtaaagcccattgagaattccaaaaataatgtaaaccaattaataaagcatttacctttggcgcctgggacgaaaataagataccgaaaacaacctttactctacaaacataggtccatgtaaaataggcttaggcccaaataatgtaactctaaaacaaatctatgaatctattaatcaccaaagttatcttttacataatgtaatgggttatttaaggagagatttaataatttcgaaaatgtttggtcaactccgaaaaggtgaacgtgttaattaaaaagtcctggtactgcggcagagagagagattagcccatatgacgtggttgtgatgtgtccgaaagctgtcaacattgaaaatcaacggtccagatcagtatactgacacttggctttgtaaatttgttaattttcttctctggtcaaaagtgaaagtgttaattataattaaattttatctagttttcaagtaaccatccatttagtacagccaagattggattatctttaagtttttaagttattctaacagtctttattgatgactttgtatttgcaagagttgcaaccaccaatatcttctattacatatttacatcaaattcagagtatatgtcatccatacaaaataatacattatcgtaataaccacacaaactccgttaatccatttgttttcattggcggtggactattttaaagaagaaaaatatatttatttttttgtcagaaagtaaaatattataatggtgttgaaactgttaacaccattataatatatatataaaatctaagtcaaactactgtggggaaatttgattaggaaaacaaaaaacgtgctttaaaaactatgtttgtacgctgtacggataagatatttggaaacgacacactatatttataatccaaacatattttaaaagaattaccggactgtattagttgaaatgttattggaactgtttcttaattacatatattaaaagtattaccggactgtataatctgtattatttgaaatgttattggaattgtttcttaattacaaacgtgaagacatgaatacgacgacaagtattatacaaagttatccacacccatgtgcacgtaaagtatgcttaataagatttccaaatctatctataatcaacgtaatgtctagtcacctaattatcacaatagtggacaaatagttgcattatctacaaaatcaagattatactctctatatgagtataacgtgagtgtcatcatttaattatagaaaaaacacgattatgcaggctaattaaaacgcgttaattactgagtcaatgaacctataaaaccggcttatgctacccctcccaatctcatcacaaccattagtctctctttcagacaattttggttctttttcttttgtatttatacattcttaatcttctacaaaacaaaagaagaaagacacatttcggtactaacattgttcttcatacctctctttaaattcatatacgtgtatatactttgtttatacgtgtgtttgtgttaattgtgttgtttaatcttaatcccaagttagtagaa

SEQ ID NO: 1162 - DNA, 3000 bp, Unknown
  misc_feature (1)..( 3000): cDNA_ID_2045650_gDNA_ID_1620366_Annot_ID_154851 3000 nt of promoter + ATG
ttgtctttggtagcaaatcccagtcacttggaagcagtagatcctgttgtgataggtaaaaccagagcgaaacaatattacacgaaagacgagaacagaacaaagaacatgggtattttgatccatggggatggtagctttgccggacaaggagtggtgtatgaaactctccatcttagtgcacttcctaactactgtaccggtggaacagtgcacattgtggtgaataatcaagtggctttcacaaccgatcccagggaaggaaggtcttcacagtattgcactgatgttgcaaaggctttgagcgccccaattttccatgtcaatgcagatgacattgaagcagtagtgcatgcttgtgagcttgctgctgagtggcgccagacgttccattctgatgttgttgttgatttagtatgctaccgtcgctttgggcataacgagatagacgaaccgtcattcacacaaccaaaaatgtacaaggtctggctattatatcatccatctctgtgaaataatctaataaccaattcaagtttccatttcatacttttcttgtactttttttttgtttaaaaacggatgttacttgttggtgataggtgatacgcagtcatccctcgtcacttcaaatctaccaggagaagctcttgcaatctggacaggtaacccaagaagatattgataagattcaaaagaaagtaagctctatcctcaatgaagaatatgaggcaagtaaagattatattccacaaaaacgtgactggctggcaagtcactggactggattcaagtctccggagcagatttctaggattcgaaacaccgggtaaaaaacatttttatttcatttagtttgtcaatgccttttggccttttttcttttctttttcaatgtaacattttgctggaaaactattcccttgttcttttgcagagtgaagccagagattttgaagaatgtgggaaaggcaatctcaaccttccctgagaactttaagccacacagaggagttaaaagagtttatgaacaacgtgctcaaatgattgaatcgggagaaggcattgactggggacttggagaagcacttgcttttgctacactggttgtggaagggaaccatgttcggctaagtggtcaagatgttgaaagaggaactttcagtcatagacactcagtgcttcatgatcaagaaaccggggaggaatattgtcccctcgatcacctaatcaaaaaccaagaccctgaaatgttcactgtcagcaacaggtatgcatttttttttaatctctagagatgataaccactcttcaattgtttttacatgatctttacgttgtttgtgtatgcagctccctttcagaatttggtgttctcggtttcgaactgggttattcgatggaaaatcccaattctctggtgatatgggaagctcagtttggagactttgctaatggcgcacaagttatgtttgatcagttcataagcagtggggaagccaaatggctccgtcaaactggtctagtagttttacttcctcatggatatgatggtcagggtcctgaacattccagtggaagattggaacgtttccttcaggtatattatatgaccgatacttaccgttaagattctctccactttttgtatttgtttccctctcatttgaaaattttaactgcagatgagtgatgacaatccttacgttatccctgagatggacccaactcttcgaaagcagattcaagaatgtaattggcaagttgttaatgttactacacctgccaactatttccatgttctgcgtcggcaggtaaaatatctatttatcccaagttcgtaaaatgttgttacttaattttcgtattcttcacactcacatgcttgatatcatccatttgcagatacacagggactttcgcaagcctcttatagtgatggcccccaaaaacttgcttcgtcacaaacagtgtgtatctaatctctcggaattcgatgatgttaaaggacatcctggatttgacaagcaaggaactcgatttaaacggttgatcaaagatcaaagtggccactctgatcttgaagaaggtatcagacgtctagtcctctgctctgggaaggtataaaaaaaaagatccactttttccgtcattaactaacaaagttcccacattctgaaatttaatactttaaatgtcaatgaatcaggtctactatgagcttgacgaagagcgaaagaagtctgaaacaaaggatgtagccatttgcagagtagagcagctttgcccatttccatatgatctcatccaaagagaactaaagcgatatccaagtaggcgtcgaaaactcaagtttgtgttcaatagttttggttgattatggaattctttgaaacttttgttcttgtgtttaacagatgcagagatcgtgtggtgtcaagaagagccgatgaacatgggaggataccaatacatagccctaaggctttgcaccgcgatgaaagcactgcaaagaggaaacttcaacgacatcaaatacgttggtcgtcttccctcagctgctacagccacaggattttaccagcttcatgttaaggagcagactgatcttgtgaagaaagctcttcaacctgaccccatcacccccgtcatcccttaaaaaaacacagcttgagaggcttgagcctgtataaaaaagacacaacacaaaaataaaagattcatgagagaatctttggttaccaaagagtgtcactggaaaataaacagatgtttgctagacttacaaatttaagtttattcgatttgtttggtttgttataggatttaatcgagataaaaggaaaaaagatttaaaccgtttggtttagtatgataattcattaatttggttcaactttggattgattttggttcggtttggttttatcagtgactgtatcagcttgaggcagttgcaatcttgtaactggagagaaaaagctatcaaagttaaaagtt

SEQ ID NO: 1163 - DNA, 3000 bp, Unknown
  misc_feature (1)..( 3000): cDNA_ID_1822768_gDNA_ID_1620366_Annot_ID_154855 3000 nt of promoter + ATG
gtaaataggcgataacattataataagttcaataatacaaactttataagagtttattgaatttttgttgggaaaattgaaaaagaagggatggcctacgatgcaaagaccaattcctgtttcctactagtgttgttgaaatctgaatacacattttgtcatgttgattagtgattacccttagcttcaaagttcaaattaactttacactaacttttccataagtaaagatattttattcatgacgatacatattttattctacaaaaacatataaacagtgcattgtacctcaataatttgaagactttatatttttccaagtgctttgacttttaactctttattaaccatcaggagacaagtcaacctttatttccctctagaagcctttggctaatttattaaacttaaaaacgaaccaattaaaagttacaattcataattatttttgtttatgattttttcactattattaataggctattcgcatgtatattcaatcgtatttcacttgttttgcaaggaactaaattataataaacaatacacccaaattgaccaacttatcttacacaaaagattaagagcatacgtttatagaagaaggtccaaaaaattgtgacgccatttaataagaggtatagtgggttttcttgttccttaatctcagctgccgtggaaaataagtgttagtagtaaatttattgaattaaattataatagttagatttgtaacatccctatcaaatctttgattaaaatttgattttgggtccatgggacaggcgtcattaggttcaattttaatactgcatgattattaagtggctacatttataaatgaattaaacaaacccatctatcaattcagtattgtcaccgtgagtttgaaactttgtcattttataagttataatccgttatattttattacaattttttctcttaaggagattaataatagataaaatcgtacctgatccagaaaagttttaatatccataaatttgttagtggtaaattttctccgagggttggcaaaattttgttcaccaaccgtaacggaatttacactcacaaatttcaatatctctaccttcttttcatctcttttggtacatatcattaactcctttccttttcaaaagacaaatgtatattaaatagcaagtgattcaccatccaccaaatgtgatcttctgattagtgatatttctttagacaatttaattgatggatttgaaaggaaaaaaactttgatatatatagtatgaagaagtttctttgtatttatccaagaactgttagttcaatcacttgcgctttgtttacgaatgattaatgacgttaactattcaaatacgatgctactctgttgttgaattcatgcgctttgttttcgtctttgatttttaataaatttacatgttcaatacaaatatcttttttattggtataacaaagaaccatgataagactgatacataaaataagatgttgtcatgttcttatttaactactatatacttatattgatcatgctcaatgggagtttgtgtatataaaaataaatttagaatttttctttgtttttttttttttgggcaaaagaatttttctttgttaattcacacatttccatcaccaaacattcgaagtatttgtctctatctcgacaacatttatatatatttttttcttttttttgaacacgactcgacaacatataatacactcctttgtactgtatactacaaaataaactactaaacaatattgactctataatatataatttatatatacatacaatacaagtctaattcaatcacttttggttcaaattggaaaaacattgaattcttctattattcttgatgaccaagtctatatcacatgtaataaaagtacacataaccggtctttctttcttattcgtaagctgccatgcaagtggggcttcaagctttcgtaaaatctctcatgtattccacattattaatcgaatttaaagtattttgcatgttatttagattagaaatgtcgttttcttaatcacactcctaaactgcggatcagatataatcaccaagattaaataatataaaaatataatcactacttgccaagacatgaatcatgaggaaagttctatagcgtgtactaacatacaataaatcatatttatgcgtatacatttactagaaccataggatcgatgaatcagatgcaactcatgcagtcatattacaatatatatttagatatgttcatcttgatctttcaacttaaaactcgttcatattcatcatttaaaaaaatatatatatgaatgtaaaaaaatggtaatttaaaattagatgagaatggggaacaaattaatcaccaaacaaaaaaaacggaatagagtaaggaagagagaaagagtcaatgagtgggggcggctaagaaaacattataagtttataacttatgagttttatgattaggaaaattataataaaacttgttgtcgaatagtaaaattataagaaaactaagatattatttctcagtcaaattataaatgatattgaatatctagattctgatgtaggagcaaagacaaaggagaaaaacattagtctccccccttctctgtcatttcttaactctactaatattttatcacataatttatcatccaattttccaattccataaagtcactttttgattcaattttattttaattccctatactttattgacatcttccatcacatgaaggactatctcctccagctattatatactctctctctctctcctttattttttctcaattcacatataattttcacctttacacacatttccatgtaagtatatataaacctcacacacgcattatcatacaccatcctcctcattctcttcatcatcaacataagagagagagaagaaaaaaagaattacaattaataagaacaagatcaagaatcaagaatcaagaaa

SEQ ID NO: 1164 - DNA, 3000 bp, Unknown
  misc_feature (1)..( 3000): cDNA_ID_2045658_gDNA_ID_1620366_Annot_ID_154848 3000 nt of promoter + ATG
gccgaacatggttcccttccacaaccagtgtagcaaaagcaagtgcttctccaagtccccagtcaatgccttctcccgattcaatcatttgagcacgttgttcataaactcttttaactcctctgtgtggcttaaagttctcagggaaggttgagattgcctttcccacattcttcaaaatctctggcttcactctgcaaaagaacaagggaatagttttccagcaaaatgttacattgaaaaagaaaagaaaaaaggccaaaaggcattgacaaactaaatgaaataaaaatgttttttacccggtgtttcgaatcctagaaatctgctccggagacttgaatccagtccagtgacttgccagccagtcacgtttttgtggaatataatctttacttgcctcatattcttcattgaggatagagcttactttcttttgaatcttatcaatatcttcttgggttacctgtccagattgcaagagcttctcctggtagatttgaagtgacgagggatgactgcgtatcacctatcaccaacaagtaacatccgtttttaaacaaaaaaaaagtacaagaaaagtatgaaatggaaacttgaattggttattagattatttcacagagatggatgatataatagccagaccttgtacatttttggttgtgtgaatgacggttcgtctatctcgttatgcccaaagcgacggtagcatactaaatcaacaacaacatcagaatggaacgtctggcgccactcagcagcaagctcacaagcatgcactactgcttcaatgtcatctgcattgacatggaaaattggggcgctcaaagcctttgcaacatcagtgcaatactgtgaagaccttccttccctgggatcggttgtgaaagccacttgattattcaccacaatgtgcactgttccaccggtacagtagttaggaagtgcactaagatggagagtttcatacaccactccttgtccggcaaagctaccatccccatggatcaaaatacccatgttctttgttctgttctcgtctttcgtgtaatattgtttcgctctggttttacctatcacaacaggatctactgcttccaagtgactgggatttgctaccaaagacaagtggagatgtttgcctcctctagttggacgatcataagatgtacccaagtggtatttcacatcacctgttccggtgtaaagcccaacttcatctactggcctagtaccaccgctaaactcgctgaatatttggcgtagaggttttctaacaacattacccaaaacattaagtcgacccctatggggcataccgataactatgttctctaccccgagatctgcagacctatcgaacatctccttcatgccaggaatcaaagattcagcaccttccagtccaaaccttttagccgtggtccacttagtagccaagaaattctcaaactgtgtgctccaggtaagcctatcataaataaccatccgacgctcactattgtactgtcgaggagttggggtctcgatcttgtctctcaaccagttacatttatccctatcagcaatgtgcatgtactcataccctatagtcccacagtaagcttgctcaagcctcgacagtatcgacctcagtgtttgaaccgggcggttctcagagagaaaacccgacatcctccatacacccagaaagaattcccgatcaagatcagcctcagtaaacccataaagacctggcgtgagatcctctggaatctctctcttctctagacctaaaggatcaagcttggccttcatgtggccattaacctggtaagctctaactagcaacaacaaacgcatgctttcttgaatggtttgccccgagataccaggcgatgtagaagcctgacccacaaaattcctaaaaaagttatcccacgactcatcaacactgttgggatcagcctcccaagctctttgtaactcctctagatacacactgcttgttccatctaagaagctatcagttagcttagaaagtgggacaggacgtggaacaggtgcagcagactctgcctttgatttgagtattgtagagtgaaaacatctggtttgacaaggcaaaacccttgttctagtggcatatgaaccacaacgagactgagacagtgtccttcttatggcaagctttgccacagaagaaccgattctaaaccaaaccatagcttaagtaatctatcagtaacaacgaaccatacaatcccagagtctccgatttttcaaattgtttaatctctgaacctgaaaatgatccattaaacaacacaataaaatactcaacaacataaaaagaaagtagataagtcaaaaatggctaatcaagtaacgacttagttatatatatatatatatatatatatatatatatatatatcatgcaaacatacaaaacatagaaaatttaaaacgaaaataacctataatcccatattttctcagcgatctgacctcattcagatcatcgaaatgtttttgaattcccaaatattttggctttaacaactttcaatttcggagaatttccatcagagaaaattaacaataaccaaaaaaaagtagtaactgaaaaaaaaaattaagcaggaagattcacgaagaagacgaacctggatcaaagatggagacgatcccagtgaagtggcttctaggagacagagaaagaaggaaagaaaagtaagaaagtgcaccgccttgaaaaatccatgtttggctacaaggataactatatacctgttattttaatacttatataaactgggcctcaataagattcattaaatattgggcttttaggcccaacgtaacactcgaagtcctcactcaaatacttgttcctaattattaactgcgccataataagattcatcaaatattgggcttatcggcccaaaacatagcactcggattactcgagatgcagaaagtttcagaggttgaagatgatctgcgtagatg

SEQ ID NO: 1165 - DNA, 3000 bp, Unknown
  misc_feature (1)..( 3000): cDNA_ID_2050499_gDNA_ID_1620366_Annot_ID_154838 3000 nt of promoter + ATG
ttctgaacattatatttattaccactcgtaagtcactttccatttgcaggatttacttatacctaatggtgtcagattgagtttgtgtctcttttacaacagtatcgcaccttctacatccaatagacaactaatgaaagctagaatcaatcaaaacagatttacactagaaagaaaaggatgataccacattgaaaaattgatgaatgtatgaacaggatggtaacaatttaacttagaatcgaaattttggtatgaaatcctctgaagtctgaagagttttaggtttagttgaaaattagagtactgtagtagtttgagatcctctagacgaagcagaaggttccatcaaattctatttgtttcgcgggccaacccgcaagcccgatattttatggacatatgtagagttcaagcccgccctgtgatgatgcttattggggcaagctggtgggtttgtgggccgcttgacaaaagaacattaaaaaaagacaaatttgatggacaatcatgattgttgtggttagtatacatacttttgaggatcggatcatgcaatgagtgaattcttcactttaattaaactcatcagattctctcacagtaacaactaacaaacaaaggaaacaaactcatgaaaagccatccaaggaaaaaaggaaatctttatgtgaccgttaagtgtttcttgtcaaatattatgtgaccgttaagtttatcttgtcaaatattatgtgattgtgaccgttgttaattgtgattagcaatttccttgtttcttttgaacctctttgctccccttataaataaatagatgagagacgctctcacgcagtctcaacaacgcttcttctaattcttccttgagagacaaatcaaaactctctctatttctttctttctcatcttcttccttcagagacaaatcaaaactctctctttatacataaactctgtggattccgatcgatgatgatgatccaagtagaagccgacgacgatgatccaagcaaaagccgatgcaacatccgtaagatttcagactgatcggagccgaaattaaagcatatcatcgtttcatagattgaatgataatctccttcaatccacggccgtcgtctaccgtccaaaacaaaatagatttcagttcaccggataatgatctagccaccgagatgctttcaccggagacaacgaggaactaagaggatggcgaaagaaaacacgaagacgctctcgtttgtggtttcaagtttcagaacaagcacgagtcgccgcctgagtatatcacgacttttaggtatattactttactaccctttttcttttttaataaagattatgattttgattttaaaaagaaaaaaaagattttatgtttttccgttctgatttttctgatttaaaactaatcacaaggttttcacaaatatttttttaaataaattgttttaatttttgtttttaatagattttttagtgttaaattttaaatatgtgtaaactattagatacattatcccgtccataatatgaggtctttaagaggtgttttaggtttaatatgttttgcacatataaatttttaacacttattctttttatttaaaattgtttttaaatttgtattttatgcactatttaatttttgttttgatttttaagtaatattttagataaaatgttttattttttaaaatatacataatatttttgtttttaagtgttaaattttaaatatgtgtaaactaattggacacaacatcccgtccatagtatgaggtcttttagaggtgttctaggttcaatatgttttacacatataaatttttaacacttatgtttttatttaaaaattaaattactactattttaaggttttcgattttttaactaatattttagataaaaatattttttatttttaaatatataatatttttgcttttaaatgttaaaatttaaatatgtgtaaactagttggacataacatcttgtccatagtaagaggtacttaagaggtgttctaggttcaataaattttatacatatataaattttaacacttatgattttatttaaaaatatatatattttttttaataccactattttaaggtttttgatttttaaagtaatattttaaatatatattatatttatgtttttaagtattaaaatttaaatactgtatgtgtaaactaattggacataacatcccgtcgatagtatgaggtccttaagaggtgttttaggttcaacatgttttacacataaataaatattgtaacacttatatttttattgatttgttttttaaaaatttgtatatttttaatacacattgtgttctaggttcatagtaaaaggtgattaaaaggtgttctaggttcaacatgttttacacatataaattttaaacacttataattttatttaaacatattttaaaatttatattttataccactattttaaggtttttgattttttaagtaaaattttatatttttaaatatataatattttaaaacaaaaatattaaaatttaaatatatgtaaactagttgaacataatattcggttcatagtatgaggtctttaaacacttaagaaaattaacttactatgttttttttatgtatttttgggttacttttatttaataaattatggggtcttccctctctcgaccaaaaaaaaaaaacattgtaaggtgagttttgagagtaacaataatattggggtatatttttaaaaatattgtagtggtaaataccgaatttccatatagtttctgtgtggcttatatttgtccttttatagggtgcaattttagagtaaagatagtatctaggtttaatgttaaagattctaataatgatggggcgttttcgtgttttctatttatttaagctccatttattattaccggctgttttctattttgtcgttcccggtaaattttgccggcgaagattgaaacttttccaaacgatg

SEQ ID NO: 1166 - DNA, 3000 bp, Unknown
  misc_feature (1)..( 3000): cDNA_ID_2992487_gDNA_ID_1620366_Annot_ID_154847 3000 nt of promoter + ATG
tcttaaagaaaaaaataaaaatagtattgggcaacttataggcccattatgtatattaacaggccagtttctcataggcttttgatactttcatggactcgaaaatttagggtttcagagacgaccacgttaccaccgtcatgaaaccgccagtgaccgtaacatattcacctctcgcatcttcttcttcttcacggagaagcaatcgaagagaatcaatcaactagacaaaaatcggaagaagaaacacaaaccgaggttttagaaacatggcgtctaaggtaatctctgccacaatccgcagaaccctaaccaaaccacacggcactttttcccggtgtcgctacttatcaaccgccgctgctgcgacggaggtgaattacgaggatgaatcgattatgatgaaaggagttcgaatttcaggtagacctctttacttagatatgcaagcgacgactccgattgatcctagagtattcgatgcgatgaatgcttcacagatccatgagtatgggaatcctcactcgcgaacgcatctctacggctgggaagctgagaacgccgtcgagaacgcacgaaaccaggtcgcgaaactgatcgaagcttcaccgaaggagatcgtattcgtgtccggtgcaacggaggcgaacaatatggcggtgaaaggagtgatgcacttttacaaggacacgaagaaacatgtgataactacacagactgagcataagtgtgtgcttgattcgtgtaggcatttgcagcaagaaggatttgaggtaacttatttacctgtgaaaactgatggattggttgatttagagatgttgagagaagctattaggccagacacagggctagtttctattatggctgtgaacaatgagattggtgtggttcaacctatggaggagattggtatgatttgcaaagagcataatgttccgtttcatactgatgctgctcaagctattgggaagatacctgttgatgttaagaagtggaatgttgctttgatgtctatgagtgctcacaagatctatggaccgaaaggtgttggtgctttgtatgtgaggaggaggccgagaatcaggcttgagccgttgatgaatggtggaggtcaggagaggggattgcgtagtggtacgggggctacgcagcagattgttgggttcggggctgcttgtgagttggctatgaaggagatggagtatgatgagaagtggattaaggggttacaggagaggttgctgaatggggttagagagaagcttgatggtgttgtggtgaatggttcaatggatagtcgatatgtagggaatttgaatttgtcgtttgcttatgttgaaggagagagtttgttgatgggattgaaggaagttgcagtgtctagtggaagtgcttgtactagtgcgagtttggagccttcttatgtgttgagagctttgggtgtggatgaagacatggctcacacttcgattaggtttgggattggtaggtttaccacgaaggaagagattgataaagcggtcgagcttacggttaaacaagttgagaagttgagggaaatgagcccgctttatgaaatggttaaagaaggtatcgatatcaagaacattcaatggtctcaacactgattcaacagttccactcaaactgtgcgggacaagagggaatctccagtctgtggtcagccggggtatatgagagccatactgagatgtgagtatgaacgatgatatgatcctgtgttcttactatgttctgttggtaagttatctatctatattgctttctagagagaattgcatgtgagagtttcttgtgtggttttgtaataaaacagaaacaaaggttcatttctggttagattgtgatatcctttgaaattgaatgattaatttttaggtgttgtgagcttagcttttttagctacggtaatggtgaagtttgttttgtttttcttcttatttatgaaaataaaatacaattttatgtgaatattttttttattcctcttttctcactctctaaaaatgtcggcgagtctcactaagatgttgaagtaacaaaacatgaaatgagaaatgaaattaatgttcttaccttcatgttaagttgaagtagatcataattatcccatgtgatttggtaccaaagttttttttttcagatctacgtacactcgagtcgacctttgctatgaactcaaatatgatccaataaaattttatattcttctgtgttttttttttttgtattcaaatttggatagaaacaagtatttagtaggtcgtaggtgccataggtggcccttgggaaacatccaatggatacaaacctcatattataaattctctatgccaaaataattaggaccataggttatgttatgtacctcaaccatcctttgattgagacattaaattccttcacgtttgtaaaccacactttcgtatacattttcttccctaacacttcttggcactgtttcttttattaatttgatttttgaaacatatgtcaaaagaaaagaaaagaatcgaaacatttaattaattaatgtttgtaattgcacgttgtacattcattacttttataaagagactgatcaaatgatgattgataatccttttagtgtatattaggcgtgtcaatggtgtatatattatatagtgtctatatgtcataagaaacgtcataaattttatcaaaggaacaacaatttaagtctgattaatctataattctcatccttacattttcattggcatcaaatttaggtaatttttagaatatagcttaataaatgagtaggccaagaggacggctcgcaattagctgtgtggaaagctaaacgatgtctcctaccgtccacgtcagcgtcttaaatcctcaaatcccattggcaacaaaaaaaacattgtgtatataaatacatgcatacttatcactctctactcacttttacaactaactcataagtaaaacacagacagtttttag

SEQ ID NO: 1167 - DNA, 3000 bp, Unknown
  misc_feature (1)..( 3000): cDNA_ID_1822752_gDNA_ID_1620366_Annot_ID_154840 3000 nt of promoter + ATG
gtgacttacgagtggtaataaatataatgttcagaacatgtttcctctctaattctctctgttttcccaatatttaaaatacagtttcgcaagtattgaaagtgttttaaaaagtgatcatacatagtaagagtaactcgtagagagagataagttatgggaactgactgtatcaaattagttggaccatgttttatgtccgtgatggtcggactcagaaacagagtggtgatgtgaagatgacatgtttatggtcccattttcacttttattgggtcgtgtttcacctttcaaatgaaccactagaaaattgaagcaacttttttttttcaaaccaaaggaaaaaagatgactttgttaagacctttgtcttggttttttttgcttcatcaagcgtcgctttcgcaacatgttctctctattattacatgatttcaaaacaagcaaaacatatcactgcctaattcttaactttgtgcttcagtctttccataaataatagttaactttcaaattcctaaatgtactaaaatcaactatggttgttgagctttattattcttccgtttaatcttggttcgaaagaaaaaagatatggtataatcattccattcatatacgtattactaatcatagttatctttttggtgagtaaagagatttgaatcaagattgtgtgttggtaataagaatccttatagagatgtgcatttaaggagacagaaaggaacacagcacgagacgatgcggttagagaataaacaaaacaaaaagaaacttggtaatggatacaacgtgattccatcgttaaacaactttgcttttggctttggattcttctctattttaactcttaacccaatgttatctcattatccttcatctcaatctatttttctatttacttaaatttgagttttcaagacactttttaaaaaaatgaaaaagggttagaaatagagaagagagtaagaaagaagtgtaaaatcaaataaacgaatctcattaagcacctacttcccacatctttcttaaagtttcttacataaagctcccttcacacgtgcttaccaaatcagattgtcaataattcttgctcaataatttttcgaaatttatttgaatttatctaataaaaatacattgtttgagtatgatattttgcttaagaaggttgattattctccctatcaaagtctaaaaagaagattacaaaacaattgtatggttaaattcatataaatttgtgactagtattttaatatttacatatatacaaatacttatagatgaaacgagaatgcagaaatgattatagatagatcagtgacagtgaactgtagcaaccggcaaagaaacctcgttagctggacacacgattacgatcatgcccccagtctcctctgtccagacggctgcattaataacaacgagctagagggtgttttcgtcttttcgatacttatcccaaaaccgacaatctctggtttggactcgaaggctgatttggtcaattcatagcaaccgaacgagcagtccattcaagtccaaagagctccttagtggtaaaagatgtaattacgtagatgttccatggtcaagaatgtattcagtcaaaataaatatttgaccaaaactttcggttaatttcctaccaccagcaaaattataactttttctaataattatcaatcattttcaatctcttttaattttctttttcacttttttttattaattaaagtcaattcacactatacaaaaagaaggaagtctaaatatttttttactttcatgttgcttttctaacttttatattttgctcttctcaacagattttgctggtttttgtattagaaatattattatgtttccagaaatgaattttttatatgtcgtctggattcgtatatatatattggaaagtgaaattaattcatttgatttttttctttgatatatcgaccaaatcaaataaatacgaccccattgtggcattgttaatgcaaaaaggcacaagtacaaaaaaaacataataattcactattttatttacagacacatgggcccaattcatacggcccaattaccataaacctctcttttaaagagtgggttccacagtggtaaactttttgactatccattggaatgattgcatctggaccgttcatctacattaattattgggttttttcgctttaaagcatcaattaacttattacgtataggattagattaccaataacgatctttttagcttttgtcgttttccgataaaaccatacgattaagaatatgacctcttgtatcttttgagggattttagttaatctttctacatttattttgttggatgctcatacaattatcctgtgtctctcaaaataaaacaaaaattactctatttattagtacattacacatgattatttagaaaatgtatattgtggtcatatgaaatgagaaattaaaggaaatttgtcaatacttgagaacatcaccattcaaatgtttcaagaacaacatgactccaaaacaaaataaatgaacctttccctaataatagtatattctccatcgtacaaagttctaaataatacaatattcatttcgtcaaagcatatgatgtgttggaatcagaattatctgcaaatgtttgaatttcaaatgttagtatcaggctatttttactgttttatcaaatatcgtttcttctgcaatctatcacttgattgttttatcaaatcagcactagtattattgattttgtaatttgtgtttgtctacctccaattactttttagtgttatgattagtaatgtaataaaatcacaaatctgacgtggcacctatatacaattccaaaaacaagtggaacgaatataaaacaaattcacaccttcctcatcttcttcttcgtcttcacttaccttctctctacactcacaccatctcacaaccctaatctctcccacacaagagagatagagagaaaca

SEQ ID NO: 1168 - DNA, 117 bp, Unknown
  misc_feature (1)..( 117): cDNA_ID_3061003_gDNA_ID_1620367_Annot_ID_154861 3000 nt of promoter + ATG
gatcttattcttgtggttatttttttggctatctctacaggcttctctttgtgttttgtgttgtcaacttaatcaattatatagatcgaggagctatagcaagtaatggtatcaatg

SEQ ID NO: 1169 - DNA, 3000 bp, Unknown
  misc_feature (1)..( 3000): cDNA_ID_2131349_gDNA_ID_1620367_Annot_ID_154870 3000 nt of promoter + ATG
atgtatattattcaaagattaggtcaatttttgttgttgtaaataaatgtaaaagacaatcttgaagaaattataatactatacccaattgtttctttatgaaaaagtaatctctccgaaaagttaagattctagtggcgaatcatgcaaatttaaaaaaattgcgcacaatacaatggtaaactgataagtaagaaacgacaattagatgattgatatgcatcataaaaatagtggaacaacaaaataattgactagctttcttaaaacactaaacgcgaaaaatggtatatacatttgatttttaatttaaacaaatgaaaatagtaaaataattgagcatatattatgattccgtaaaattatgcagccgagcgcatatgtgaactaaaaacacatgcatttcaaaaacgtttatgtggataaagttttcatgaaactctttaacaaaaaaaaaaaaaaaaggttttcatgacacatttggaattatatgatagagacattgttgtaacgtagttaagacgtaaataacctaattgatatctttgtccccaccatttgctaacacgtaaccatgcaactttaatttgtttttgattggagccaatatatatgtaatattatcctaaatatgtatgtctccaaatgctgcaaacctaactactcattattaaataaagccaaattgattttgattttaataatgtttgtgattggaatttattatcagaccaggctttattgtagtagcaaattagcaaccgacattaaactagtactaatataaaatagacatagttattacttaatgctaattaatccaaaaggagaagtatactcatagtaatagttagagctcacctcatgttttcctgtaaaacaataattaatatttgcagacattacttagcaatcattatctttgtgactttatttagtttaacgaataaagtgtaaatcccttttttacttgtgaattaaatgtgtcctatgcaaagtccaaacaaataaatctactcatttcttctacttgttatatatgtataggtgggtttttactttttagtttatacaaatatttctgaaaatcccttattacaaataatgataataatttgttagcacatgtgacaatacttgcaagttgcaacgttttaaatcctttttggctttttcggttaaagcttgcaacatttctttggcgacactaaatctacatgtaatttttttataaatatacatatatcgtccgtaaaaatgtctgaggaaattttttgtttcttgttttgttttattcaaatttggaaattgtgttttattggtccaagcaaactaaaataaaatcagacacatgcattggatgttgatgtggaaattcgatcgcttatctgttatatattgttgtaatacatattttcagaaaatattcaaatagtaaaatccaagtggtgcatacttatttttaaaaaaattcatttgtaaaaatacaaatattagccttcatatgttatgagtcaaatcaactgtttagctaattggatttagttgaaaaaacctacgccaaaaagtaaacaaaagctataaactacgaagtaactaaatgttttaggactatagaatcttccattactagatggataattttaatcatgcttcccattaagcttatgttttcatcaaattaagtatataaaacggcgttaattgaactaatttatatgtagatcaagtataatgtgaatgagtcacgcgcatgaaaaaacttaaagtgacaggctgtcatgcaaatgaaaacaactgttgaaacttgaaagtcgaaaaccattaagattcacgggctcgaaacaaagaatgcaacttgctcttggacctcgacaaaaacttaccatttgataactaatacgacaccgtcacgggtcactaccaaacactttcgcttattggggatctatgacttttctttttacacacacaacgtaaaatggtgattagttactggaaaactagacttaattgtcacattgtgaacagtatataataacaatttttagggcattcacttttgttaaaagatgtgtctatgtgggatcatcaactggaccacattaagctaaatgattccacataagtttcagtatttcaaagtaatcttaaaacactttgtctttcttgtttacacgcaatagttagccacagctcttaatgatcattttcaaccaaaaaacgacttagcaaactctctctttcatatatgcacacgacacagtccattggactcaatcgtgttgagtatccaaaccacatatatcgaattgaccataccttaacgcttaaccaaacatagttatttcaccaattatctataaagatattgctacacttaaagaagatgcctacttcttgataaaaatctaccatgcttttggacgtgaagagatacacagaccaaaaaactcaaagatctcgttattttgaaaaagaaaagcatatgtaaaaaagtttgatatggggtcgtctgaaacattgtactctatagccaaacgaaatctatacttacaattttattttataccgaaaaaggtaagtttatacgttgagacaaaaagaaataagtaaattttatacgtagaatattcgatgtacactttatgtataaagtttaaacccactatgctttattcctttttgttgcaaaactatataaagtaaaatcagatttatgatttaacaaacacatgacagaggtcataaatcctaatactagtatccacaaacaccgtatggtccgtatcattatttctttcctcgaagaccgtatcatctttttcacataatcttaattataataggtcaaaataaataaataaatgtcacaataatttatattaaccacagattctttagtgagagcgtagtagtagcttaccactctttattactataaaaccagtctcactaaaccaaagccaatatcccaagaaatcgaaacacaaagcaatg

SEQ ID NO: 1170 - DNA, 3000 bp, Unknown
  misc_feature (1)..( 3000): cDNA_ID_2131363_gDNA_ID_1620367_Annot_ID_154873 3000 nt of promoter + ATG
tattatgcataccagatagaaaagacataaaaacaaccagaaacctttgaataaaagagtcaaatgcgatcttaggcagagccagaccgagtagaagaaggctacaaggatctttgcacgcagagaagttggagacccataaaaagcaacacaatcatttcaaactcgacccgttcagcagcttagcattcaacgctagctcagcgttccgtgcagctgataagcttgaccaaagccattttgtaggtacagctttaagtagctgttgtgatgcgttttgaggctgtgctaagaaaacagtgaaatttagacatctcataaggtgagcagccaattcgaactcactgtgacccgagaggtctcccacgatgagcatcaagttatctatttcaggattgccaattgcgcagcaaagaaagtctacaataatcttctcaagtctggcatctttatccccgagtggcctgagatgtctcccaggatcagcacaaattttgtttgggaaggtgatctgattgcccggcaaagaaattccactaaaatcttgctctgtctggtacgtctgtctcctgaaaccatattatcaactcaggatcaacaacaagatacatacctatatatatatgtaaaagatagagagagtgtgtgtaattgacctaaaggggagcacatcatcccgattccagcgtgtttcgtggccagagagtaatcaccaaaaccggtgatttcgcaccttccaagatactcaccattattcgcaagggccattctcatgttccgccaaacagcctcagcagtgagaccatcagggaccgggcaatcctcgacatcccaaaagaagactgtactatgccctcctcctaggttttaccatattacaaaactgattagatcgactaacttgctatgaaagatcgatcacatcaaattccaaactgcatcacaacagatctaacgctttcaaggacaaggagattacaatttccagagaaaacatatatatcttaccgctgaacttaggcatcgttttggatcggtcgagaaaactagatgcttgcttgctgaagattaaagagagaacaaggttggcgctaatcttcttctttttatgtttctcggtagcggtgtcaagtgggccacaaacctacgggcttggcccaataaatgggttgttgatgtctgcaaatcttagtaaaacggtaatattccgagtatgatgtctagggaagacaaatttcaaatccatgaacagaatctaatccaaataaatttagccatcttaaatcttaatcatactacgtatattgttcctaatatatgtaaatctccaaagacgtaaaaaaagataaggaacttaccggggtcaaaatattgtaatataaaaccgtatatttctctaaatacttagtcttttatataacatatcacatttaaacaaaatttccaattacagatttttaaatgatatttttatcatcatttaaattaaaaatatttggttaatttataaacataataaatgcgcatgaagaaaaagaaaaaaaaaatcaaaataattgaattatgggttatgaccaaggaataaataatactaaaaacataaaaagagatctaaaagaaggttcaaacttgaactaggtgggtcaagtcatagagatctcaaccaaatgagccaattgacttgaaagcttgcaaacaatttaatttatatattttaattgatgtcagttgacctttttctttcaacgtgggtttacttgtggttgcatcgtttcttgaatgtgacagaaaaggatcggtaaaccgttttaaaggacaaggacatatctcgtcaaaaagcttagagagtacctcacgatctctctcacttatactttccacattttgagagattcacattttcttagttatcctcgataacaacttactgcaatataggagaccaatcaaatcagcgcaaacaaaatagtataagattatgtttgtgtatgatttgtacaagacatcaagtaaacttatagattgtatagatcaagctgatgataatttttggcagatctgtgcctagggttacggatgccaaagacgatgtttttcaaaaaaaaaaatgaatcaaacataaatccaaaatttaacctacctaatattgataaataacaaatgtgtaattcaaaaaagttcacttgtgattatagattaaaaataataaaaaaaaatcaaaaaaaaaataactttaatcgtgaaatcgtcataaatatgatctttaaaaaaaaaagatgaatgagttaattatccttaaaaaattgatatcttagtctctaatttaaattcaacatattttttttttaaagccacttggctctattaaagtaaaagctctaagttttacatgagcttaatattactatacaaacaaaaattaaaaggttttaaatgttgagaatttttgagaaatgctttcttggtgtgtgttttttcttcaaaaatatttctttgagatgtgcattttcaaaataaccctttttagttaaatttgaaaaaaaatatataaagtctataaggtttttagaggtgaaatttggagctgtgcacttgaaacggtgcgtttacattaattggaaaaggaatcgcaccggtgatgcgataaccggacgttaccaatcgaatttccgataaaacagcaattttcgaaaccaaaccggttttgaacgagcaaaagcttgaaaacgccgcgttttaaacagtttctcgaagacgcattatcggttttattttaaccgaacaccaccactggttcactatcaaatactaattatgaagataccggtatctttggaacggtgtttttaaaatgttgttattaccggtgatgcgagaaccggacgttatcaaaaattccggtaaaacagcaatttcaaaaccggtttggttttgaacaagcaaaagctcgatgtccggaggaggaaagagaccgttgtagatctgtcttcttcatcgaag

SEQ ID NO: 1171 - DNA, 3000 bp, Unknown
  misc_feature (1)..( 3000): cDNA_ID_2131378_gDNA_ID_1620367_Annot_ID_154877 3000 nt of promoter + ATG
tgacacatcacgcgagtaccaacctcgagcggaagcacccccattcttctcttcttcgaagcatccgattctgaattcgtgagagcgagtatcgcaccagaagtatgattctgattcgcatctccgccgttggttgccggattattatggttcgacgccggtgtggcgattatcatcgccgtctctgtatccgcagacgatcccatttctttagtcgggtcggagattttttccgggtggattcttttctcatacggataaagaacatcatttggaaggagtgtggcccaataacaactttgaatgctcaattgggcctatctttataattggcctgtactatatgtctctcttaccgtcctttttttttgggtgcaaaaaatctcttaccgtcgttaatacacgttttataactgttggcttatgtttagttttataatcgccaggttacatttaaagaatgattagtaggagcaaacaatttataaaaactaaagagataatgagagataaataataagtgacagagtcagtattttgtcgtgaatgggaaacagccaaacaaggctttatgattcgtactaatcacaagattcacagatcaaaaaatcacaaagttccaagaagcaaagacgaaaaacacaactcatcatcgtgtccttgaagttatggtcatagattcgcacaccatgttcctctagattaaccaaaatgattttttatgaacaaaaaagattcacatggtcactttactgtatcttgtatgtgaaattttacatctcatttttcttaaagaatgttttacttttacatactatcaatttacttttatttttcggttatgaattgaagtggatgacttacttacttttgaaattcgaatgaagaaaaatagaattgattcctatttcagttgttcacatgtaaacacgttatatacttatatggcaacttgactaaagggaaaatttaaataaaatgatttaatttggtgacatatattcatctttctaatttttgtagctactacacaccgtgtatcctttttcataataatgatgtgaaattgtataattgtaagaaaaaatgagaaaagagtgacgaaatctttaaaacagacagaatttttttggttgagcaaacaaaacttagttatcaaattttggaaataacgtgttgaagtggctgattcttttacctacaatgattgattcatcgacaaatatcttgttcgtatatcatcaattctaaattcttcaaaaataaagtaaagatactcaaatgtaatgaaatgacgaagctggaaaaacgtattttaatttaattcattatttgaccaacaatttgcatcatgtgaatttaaatcttgataggtcaatattagtataaactaccacactacatgcgaaaatcattcctcatttagtgcaattacaaatgataaacggaaacgttatcatttgtatttattttgtaaaatatgtaattcaagaaactgctcagaatataaagacaagaatcctctttcttccatctctatctctccgtaaacagttgctcaaaaccttcttcctgaaatggcttcttctctcatcttcctcctcctcgttaccctaaccttttcagcatcaaccctaatctcagccaaatccaacacaacaacaataatcgaatcaacttgcaaaaccacaaactactacaaattctgcgtctcagctctcaaatccgacccaagaagtcccacagccgacacaaaaggtctcgcctccattatggtcggcgttggtatgacaaacgccacctccaccgcaaattacatcgctggaaacctatccgccaccgtaaaagacaccgttctcaaaaaggtcttacaagattgctccgagaagtatgctctcgccgctgattctctccggctgacgattcaagatcttgatgatgaagcttatgactatgcctccatgcatgtgttggcggcgcaggattatcctaatgtttgccggaatatttttaggcgggttaaagggttggcttatccggtggagattcgccggcgtgaagctagtctgagacgtatttgtggtgttgtctccgggattcttgatcgccttgttgaatgatttacatttgcattaactactttcgtaaaatctctatttaaattatcgtatttcatgaatttaatatgaccgttactttattactttcgtctttgctacaactttcaaattgccaagaagaacaatctttagagatcacctgaatatttggaatttaatatttctcaatcaattgactaatcataccaaaaattttaagtgacgaagatttgggggaaaaggcttcttaagaaatgggaagtactagagatatttgtatattcgttatatatctttaggtaactttttgctttatctgtatgcattatacgtgttatcgcttcagagatgttttacactttaaaaattgcgataaggttacaaaagtgtcatcttaaaagagaaaggtaacgtcgtctatatatttttttataacaattttaatgcagaatagttatcgacctcataaactagtactgcttttaagacgacgtcgactgctatgcgaatcaaaatcaaaagacgtatgactttttttaatatcattttaggtggaaacatttacataaattattgaaagtgaatgttcgtaggtcattgactagtctacagttttcgatatcagttcaaataatcgactcataattgaactaaaagcatcaaaataattaaaccatatacgaacactaataagaccggttttagaataaaccggactagtcggtggataaaatcgtcatttgacacggagactactatttcgcgcccaaatgatcccagaagacgcgcccagagtgacagtccttttagttattcttcttcccagtaatccacaaaccctagaaaattttctcaagaaaatccgaatcacgattctgggcattgtggaggattgacaaaa

SEQ ID NO: 1172 - DNA, 3000 bp, Unknown
  misc_feature (1)..( 3000): cDNA_ID_3060984_gDNA_ID_1620367_Annot_ID_154880 3000 nt of promoter + ATG
tatatcagattttatttttacgtttaaataagaatatatagtttttcaactttggagtgtgctgaaatattattctaattttgtagtagagttattttataatagcataaagagaagagaaaaaaaaagttattcgatttatgttaaaagaaaaagttttattcgatttagtcattaaaatagtatttaaagatatttaaacacaaaaattctcgtcaaaaaagtgaaatttgacgtcaccaaagtttgactctttttctctttcatcttttaaaccaaaccccacgcactaaaaccatagacaaactctctctcttctctctctctcccacacacacgcttttatttattttggagctaatcggaaaacaaaaaagcaacggccaaagcaatgaggaaagatgatctctgcatcactgttcctaccttcttccgatgtcctatatctctcgacgttatgaaatctccggtgagtctttgcaccggcgttacctacgatcgagctagtatccaacggtggcttgacggcgggaataacacttgtccggcgacgatgcagattcttcagaataaagatttcataccgaatcggactcttcaacgtcttatcgagatttggtctgattctgttcgtcgtcgaacttgtgttgaatcggcggaattagctgctccgacgagagacgagatcgccgatgcgatcgatagagtgaagatcgagaaagaagaaagagatgatcgcgaggttttgtcgaagattgttcgattcgggagagaatctgatgataacagaggatttctcgccggaaaagatgatttcgtgaaacttctcgtggatctgattaatcaggtggatttcgaaaccacctccgccgcgaaatctctggttgttcaagaagcggtgaagattctgagtacgattcgaagcaaagtctcagatcggagacggttttcgaatctgattttaaccaacggtcgagatcggttatcggtgatcgtctacttgtttaaaaccgggaatgtcgaattgaaaattgattgcgccggtttacttgagttcatcgccgtcgacgctgaatcaaagctgttaatcgccgagagagatggattaatcacggagctaatgaaatcgattagtaaagattctgatttaagtttaatcgaatcgagtttatcgtgcttgatcgcgattagctcaccgaaacgtgtgaaactcaatctcctccgagagaaactcatcggagatgttacgaaactgttatcagattcaacgtcgtcgttgagcgtttcggtgacggagaaatgcttgaagcttctggagattttagcatctacaaaggaagggagatcggaaatttgcggcggagatggcgagtgtttgaagacggtggttaagaagctgatgaaagtgtcaacggcggcgacggagcacgccgtgacggtgctgtggagtgtttcttatctattcaaagaagataaagctttggaagctgttacaagtgttaacggagttacgaaaattctgttactgttacagagcaattgctctcccgccgttagacgtatgttaacggatcttcttaaggtcttcaaggtgaattcaagatcttgcctttcggcttacgacaccaaaacgacacatatcatgccgttttaaatcaattcttttactacttactagggttcgtttttaggatttgtttcttgggaaagaggtaagaacaattgtaaaactaaaatgaaatttttgaatagtgaatataaactaaaaaagaagattcaattcattgctcattgaatgtgtagtctattattctcttattaatgtaaagtaaaatcaattaatgatgttcttgaatttccaatcatattgtttcgtatcattgatatgaaattgcttttttctaaatacgaattttgaatatattctgttggtaaacaggtccagaattgtcaaaaagatgaatacgtcatatagttccgatcgacccacaatttgtaacgatgttacatgtgatttttcaatatgtctttagaagattcgaatacatcatagacgacatagacataagcctatataagtcataatcatctttatcttttccctcatcttgtggtgttatttctgtgtcaaaagtccatataacatcttagcctctaataatcttctgttcgtgatcactccctaacagttaattaaaaactgttctagctacaatcactaactaaatttgaaccgatcagctaactcttgtcttcgaagaatatgtgtgtttgattatttattgtatgatactaattaatttaaaagtatataagaataaagtgtgggagggtcagaaaacccataatgagctggttccagatcatctttgttgaataaacaaaagaaactatatactgtagggaaccatttagaagctatattgctttttagatgattgactatatacatcgaactgaccttttgtgtttttggattctcaagtgttgctattatcttatatgattgttagaagatacatactaacacattagattattaaactctcaaacgagtccaactttgaggcctttgacaaagaatgcgaatgagaagagtcgacaaaccgcccacaaaatatgaaaattgggatctagtgttttatttttataacaatagtctttggttttggtcagctgaaaagttaggtatttcaattgttattttgattcttaagtataaagtacaaagactaaaaagtagccgatagaaacattatatgaaattatgaatcatcttaaatcctaaatttcattctaatattcaaaaacaatttttttctatgacacaaacggcttatttttttattgggctacaaatgacacaagcgctttcatttgattgggctaaaaacgaaaagatccggcccattgagctgggtttatcgttcacctttgtaagtttatttcttcttcatcttccgaatcgcattctccgatcgaatcgccgacggagaaatg

SEQ ID NO: 1173 - DNA, 3000 bp, Unknown
  misc_feature (1)..( 3000): cDNA_ID_2131382_gDNA_ID_1620367_Annot_ID_154878 3000 nt of promoter + ATG
ctgtggtgacgagtgttgttctatgattattttgcaggggaactacttgcctcgggagcagacggtatgcctcagaggcttagatgcaatgcaagtgtgttttgcatattttgaatgagtagtgaaaccaattgtgcagttttgtttttgttatgatgcaggaggtgagctttttatatggaagttgcatcctagtgaaaccaatcagtcctggaaagttcacaaatcattatcgtgagtcctttcatctaaataataagctacgctgactgggcttctaagagccacggttttttgtgtttgaatactgttgctctatcaagaagggagaatgataccttaggctaatttggtgaaatgagaatgaaagtttcaccaaaattgcaactgtgacccaatcgaatgtaggctaagagatatattttgacttttgtttgccctgctagatttcatcgaaaggatgtcctggatcttcagtggtctcctgatgatgcatatcttatttctggctcagtggacaactcttgcattatatgggacgttaacaaaggtgaaaaagtcaaagtgtagatagttttatttttttgttggctccagctttcctgcttctcacaattttgtatttgctaaaaggttctgtccatcagatactggatgcccattgtcattatgttcaaggtgttgcctgggatcccttagcaaagtatgtagcctctcttagttcagacagaacatgccgtatatatgccaataagcctcaaacaaagagtaaaggtgttgaaaaaatgaactatgtttgccagcatgttatcatgaaagcagatcagcaacggggtgatgaaactaaggttagagagaaaatagtttcttccagattcatcacggatacacagtattcctaatttcaaaatgacattttatgcagacaataaaaacccatctctttcatgatgagacattgccgtctttctttcgaagattgtcatggtcacctgatggatcttttttactcattccagcaggttactatcccttaaaaccattcttgtttttcagatagctgtgctagatcatccacattgtttactcgggcattattcatgtctctaacagtccctgttatcactgtgttgcatgtccaggttctttcaaggtttcacccacatccgaagctgtaaatgctacctatgtcttttctaggaaggacctttcaaggtaagataatcacctcaccatctcttgtttgaaagtcgtaaggctttgtggaacatattgtaatcatataagctcttctttaagctgagccaagtggccttaactggtcaagcttatgtatgagataattagaaatcagtacaaagtctcacactagctcaattcctttttccacaagcagacctgcactgcagcttcctggcgccagcaaaccggttgtagtggttcgtttttgccctgttgcatttaaactccgtggttcaagttctggtacatattatcttatctcacaccatttttttagtttcttttatgatagaaaagcaaggccttcatgacgttgatagttttcttaaatctgttacttttggtgatctcaaatggtgttttgaatcatgcagaagagggtttcttcaagcttccttaccgtcttgtctttgccattgcaactttaaactccgtgtacatatatgacacagagtgtgtcgctccaattgcagtcttagcaggtctccactatgctgcaataaccgatataacatggtgaaaagactatgcacattcttatagatcggaatggtttttctctaaattttcttagttttaattctaaccaatgatcttttggtttgttcaaaaggtcacctaatgcatcgtatctggcactgtcctcacaagatggctattgcacactagttgaatttgaagataaagaactaggagaagctgtctccatttcaggtttgctcttagtcctttcactcttgaaccttccagaacccgattgacccatcaatccaactacagttggaaagaaacctgttgatggtgaggagaaaaagcatgatttagagaaaggcgatgaactaatgacagaaacaacaccagacgagagcaagaaacaagctgaattagaacaaaacgaagagagcaaacagccattgccaagcaaaattaccacggatggtaaggaaaaagagcatattatgcagaaaaccgatgatgaagtaatgacagaaacaagacatgaggaagagaatcagccattacagagcaaagttaacacaccggtctcaaataaaccagcaaggaaacgcatcacacccatggctattgacccctgatgtcgtcattttccatcagtgttttttttttaactctgatacaaatagctttctcataggctacatttagacatcaaaatgaatcgtattgacggccatgttggaaatggacttgtttctttagtcatacgtctcgtctctaaaggcaatgtacatatagacacatgtatgaacgttcacatgagatggttttgcgtacattgtggatcattattgggctcgtattaatacataagttagttagcttggcatcaatgtctttaaggcccaaatttcatatatagctaaatgcaacaatgtcaagggatgttgtgttgatctttaacggcccgtttaattaattgtagaataacaataatagaccagtaaaagaaaacataattttaccctaaatttaattttctaaaccctttcttccataacagccgtaaaaaaggttaaaaaataaatcaaaaacccagaaaaaccaaactctctcatcgtctcaaatggctatggctctcaatctctgaatttgatcctctgtctctttctctcaatcagatttcaataattcttacaagttcaaattttcatttttcccagtttcaattaaatttgtataaacaattcccacctatacacacaaacatatacagaaaatatcttctctctccctcca

SEQ ID NO: 1174 - DNA, 3000 bp, Unknown
  misc_feature (1)..( 3000): cDNA_ID_2131367_gDNA_ID_1620367_Annot_ID_154874 3000 nt of promoter + ATG
attccaaaattacacaattagtgactatttgatcaaactcagatcctgaaaatggatacaaatcgattttgatttgagaattaaattaccttgatatcgtaatcggctccggcggtggcgagtaaaccggaaatcgggtgaaaatctacggttagcaccggcttcccatcgtgccaacttatctgtatcgtacctcccttcatttttgtcaatcctccacaatgcccagaatcgtgattcggattttcttgagaaaattttctagggtttgtggattactgggaagaagaataactaaaaggactgtcactctgggcgcgtcttctgggatcatttgggcgcgaaatagtagtctccgtgtcaaatgacgattttatccaccgactagtccggtttattctaaaaccggtcttattagtgttcgtatatggtttaattattttgatgcttttagttcaattatgagtcgattatttgaactgatatcgaaaactgtagactagtcaatgacctacgaacattcactttcaataatttatgtaaatgtttccacctaaaatgatattaaaaaaagtcatacgtcttttgattttgattcgcatagcagtcgacgtcgtcttaaaagcagtactagtttatgaggtcgataactattctgcattaaaattgttataaaaaaatatatagacgacgttacctttctcttttaagatgacacttttgtaaccttatcgcaatttttaaagtgtaaaacatctctgaagcgataacacgtataatgcatacagataaagcaaaaagttacctaaagatatataacgaatatacaaatatctctagtacttcccatttcttaagaagccttttcccccaaatcttcgtcacttaaaatttttggtatgattagtcaattgattgagaaatattaaattccaaatattcaggtgatctctaaagattgttcttcttggcaatttgaaagttgtagcaaagacgaaagtaataaagtaacggtcatattaaattcatgaaatacgataatttaaatagagattttacgaaagtagttaatgcaaatgtaaatcattcaacaaggcgatcaagaatcccggagacaacaccacaaatacgtctcagactagcttcacgccggcgaatctccaccggataagccaaccctttaacccgcctaaaaatattccggcaaacattaggataatcctgcgccgccaacacatgcatggaggcatagtcataagcttcatcatcaagatcttgaatcgtcagccggagagaatcagcggcgagagcatacttctcggagcaatcttgtaagacctttttgagaacggtgtcttttacggtggcggataggtttccagcgatgtaatttgcggtggaggtggcgtttgtcataccaacgccgaccataatggaggcgagaccttttgtgtcggctgtgggacttcttgggtcggatttgagagctgagacgcagaatttgtagtagtttgtggttttgcaagttgattcgattattgttgttgtgttggatttggctgagattagggttgatgctgaaaaggttagggtaacgaggaggaggaagatgagagaagaagccatttcaggaagaaggttttgagcaactgtttacggagagatagagatggaagaaagaggattcttgtctttatattctgagcagtttcttgaattacatattttacaaaataaatacaaatgataacgtttccgtttatcatttgtaattgcactaaatgaggaatgattttcgcatgtagtgtggtagtttatactaatattgacctatcaagatttaaattcacatgatgcaaattgttggtcaaataatgaattaaattaaaatacgtttttccagcttcgtcatttcattacatttgagtatctttactttatttttgaagaatttagaattgatgatatacgaacaagatatttgtcgatgaatcaatcattgtaggtaaaagaatcagccacttcaacacgttatttccaaaatttgataactaagttttgtttgctcaaccaaaaaaattctgtctgttttaaagatttcgtcactcttttctcattttttcttacaattatacaatttcacatcattattatgaaaaaggatacacggtgtgtagtagctacaaaaattagaaagatgaatatatgtcaccaaattaaatcattttatttaaattttccctttagtcaagttgccatataagtatataacgtgtttacatgtgaacaactgaaataggaatcaattctatttttcttcattcgaatttcaaaagtaagtaagtcatccacttcaattcataaccgaaaaataaaagtaaattgatagtatgtaaaagtaaaacattctttaagaaaaatgagatgtaaaatttcacatacaagatacagtaaagtgaccatgtgaatcttttttgttcataaaaaatcattttggttaatctagaggaacatggtgtgcgaatctatgaccataacttcaaggacacgatgatgagttgtgtttttcgtctttgcttcttggaactttgtgattttttgatctgtgaatcttgtgattagtacgaatcataaagccttgtttggctgtttcccattcacgacaaaatactgactctgtcacttattatttatctctcattatctctttagtttttataaattgtttgctcctactaatcattctttaaatgtaacctggcgattataaaactaaacataagccaacagttataaaacgtgtattaacgacggtaagagattttttgcacccaaaaaaaaaggacggtaagagagacatatagtacaggccaattataaagataggcccaattgagcattcaaagttgttattgggccacactccttccaaatgatgttctttatccgtatgagaaaagaatccacccggaaaaaatctccgacccgactaaagaaatg

SEQ ID NO: 1175 - DNA, 3000 bp, Unknown
  misc_feature (1)..( 3000): cDNA_ID_3060988_gDNA_ID_1620367_Annot_ID_154871 3000 nt of promoter + ATG
ctcattcatcttttttttttaaagatcatatttatgacgatttcacgattaaagttattttttttttgatttttttttattatttttaatctataatcacaagtgaacttttttgaattacacatttgttatttatcaatattaggtaggttaaattttggatttatgtttgattcatttttttttttgaaaaacatcgtctttggcatccgtaaccctaggcacagatctgccaaaaattatcatcagcttgatctatacaatctataagtttacttgatgtcttgtacaaatcatacacaaacataatcttatactattttgtttgcgctgatttgattggtctcctatattgcagtaagttgttatcgaggataactaagaaaatgtgaatctctcaaaatgtggaaagtataagtgagagagatcgtgaggtactctctaagctttttgacgagatatgtccttgtcctttaaaacggtttaccgatccttttctgtcacattcaagaaacgatgcaaccacaagtaaacccacgttgaaagaaaaaggtcaactgacatcaattaaaatatataaattaaattgtttgcaagctttcaagtcaattggctcatttggttgagatctctatgacttgacccacctagttcaagtttgaaccttcttttagatctctttttatgtttttagtattatttattccttggtcataacccataattcaattattttgattttttttttctttttcttcatgcgcatttattatgtttataaattaaccaaatatttttaatttaaatgatgataaaaatatcatttaaaaatctgtaattggaaattttgtttaaatgtgatatgttatataaaagactaagtatttagagaaatatacggttttatattacaatattttgaccccggtaagttccttatctttttttacgtctttggagatttacatatattaggaacaatatacgtagtatgattaagatttaagatggctaaatttatttggattagattctgttcatggatttgaaatttgtcttccctagacatcatactcggaatattaccgttttactaagatttgcagacatcaacaacccatttattgggccaagcccgtaggtttgtggcccacttgacaccgctaccgagaaacataaaaagaagaagattagcgccaaccttgttctctctttaatcttcagcaagcaagcatctagttttctcgaccgatccaaaacgatgcctaagttcagcggtaagatatatatgttttctctggaaattgtaatctccttgtccttgaaagcgttagatctgttgtgatgcagtttggaatttgatgtgatcgatctttcatagcaagttagtcgatctaatcagttttgtaatatggtaaaacctaggaggagggcatagtacagtcttcttttgggatgtcgaggattgcccggtccctgatggtctcactgctgaggctgtttggcggaacatgagaatggcccttgcgaataatggtgagtatcttggaaggtgcgaaatcaccggttttggtgattactctctggccacgaaacacgctggaatcgggatgatgtgctcccctttaggtcaattacacacactctctctatcttttacatatatatataggtatgtatcttgttgttgatcctgagttgataatatggtttcaggagacagacgtaccagacagagcaagattttagtggaatttctttgccgggcaatcagatcaccttcccaaacaaaatttgtgctgatcctgggagacatctcaggccactcggggataaagatgccagacttgagaagattattgtagactttctttgctgcgcaattggcaatcctgaaatagataacttgatgctcatcgtgggagacctctcgggtcacagtgagttcgaattggctgctcaccttatgagatgtctaaatttcactgttttcttagcacagcctcaaaacgcatcacaacagctacttaaagctgtacctacaaaatggctttggtcaagcttatcagctgcacggaacgctgagctagcgttgaatgctaagctgctgaacgggtcgagtttgaaatgattgtgttgctttttatgggtctccaacttctctgcgtgcaaagatccttgtagccttcttctactcggtctggctctgcctaagatcgcatttgactcttttattcaaaggtttctggttgtttttatgtcttttctatctggtatgcataataactcggatctttgagtattactttgcatctatctattttgctttccctgttttgtttaaaactcctaagtcgtaaccaatgctttcctcttaaccattaaccaatttgaaagtttagcaaaaaggtcataagtttttgattcttttggaatcatcctaattaatagagagaacatgttgtgaaactgatgcatgaccaagcaaaaaacaaaattaccgagacaaaaagtccccttttcttttgcttttaacacggaaccatccgattccacaaccaaagcatggaagaggttttgtcatatgatccatgttcaaccttatcgacgtcttttacaattgtgtacacatcatctatatcatacatacagagcaaatgtctcttagttgactagagaatgaaccagaatatataatgatacatattgaaagagtttcctttatggattgagaaagagcttcaccggttcggtatcttcataattagcacatttgaaagtcaaccggtgatgtccggttacaatagaaccggtaatctcttaaaacggcgcgtttgagaaactgttaaaaacgcaccgtttcgatcgtctttttcaatcttcgtgaagaacccaccagcttcaaatttcacctctagaaagtttgttgctatcgtttctctttgcacttagaaatcgaggggaaatttttcccagctctaatctaatgactgaacaatg

SEQ ID NO: 1176 - DNA, 3000 bp, Unknown
  misc_feature (1)..( 3000): cDNA_ID_3060992_gDNA_ID_1620367_Annot_ID_154869 3000 nt of promoter + ATG
atccaagatggggaagagggcaagagactccaggagaagatccattgctcgctagtaagtatgcttcagggtacgttaagggtcttcaagagactgacggtggcgattctaaccgtctcaaagtcgccgcctgctgcaaacactataccgcttacgatgtcgataattggaaaggcgtagaacgttacagtttcaacgccgtggtaaaaatctaaaagctaaaaagacattttccagtgttttaactgtttttgtcaattgtgtatgtgatgttgtggtttatttggttaatccggttcaatggtactaagttcgggttgggtacaacatttggttagaccaaatacatttttgagtgttttaagtaactttttttgtgcgtttgttttgatggagtaggtgactcaacaagatatggatgatacgtatcaaccaccgttcaagagttgtgtggttgatgggaatgtggcgagtgttatgtgttcttacaatcaagttaacggcaaaccgacatgcgctgatccagatctgctctctggtgttatccgcggtgaatggaaattaaatgggtaatgatctgatctgatccgatcagctaagtttaaatccttttcgtgtgttttggttttgattttggttctatttttataggtacattgtttcagattgtgattcagtagatgtcttgtataagaaccaacactatacaaagactccagctgaagctgcagccatatctatattggcaggtttggatttaaactgtggttcattcttgggtcaacatacagaggaagcagttaagtcgggtttggtaaacgaggcagctatcgataaagcgatttcgaacaactttttgacccttatgcgtttaggattctttgatggaaacccaaagaaccaaatctatggcgggttaggtcctaccgacgtttgcacgtctgcgaatcaagagctagcagcagatgcagcaagacaaggcattgttctactcaagaatactggatgcttaccgctttctcctaaatcgatcaaaacactagccgtgattggaccaaacgcgaatgtcaccaaaacaatgattggaaactacgaaggcacgccgtgtaaatacacaacaccactacaaggactagccgggacggtatctacaacatatctaccaggctgctccaatgtagcttgtgctgtagcggatgtagccggcgccacgaaactagcagccactgcagatgtgtctgtgcttgtgatcggtgccgatcaatcaatcgaggcagagagccgagacagagtcgacctgcatcttcctggacagcaacaagagctggtgatccaagtggctaaagcagcaaaaggaccggtcttgctcgtcattatgtccggtggaggtttcgatattacattcgctaagaatgacccaaagatcgccggaattttgtgggttggttatcccggagaagccggtggtatcgccattgctgatatcatctttggccgttataatccaagtaagagactctgtttcaaaccggtttttgtaattgcaaatttgaataaaccggttttggttatgtaggtgggaaattaccgatgacgtggtatccacagtcgtatgtagagaaagttccgatgacaataatgaacatgagacccgataaagcaagcgggtatccgggtcggacttaccgattctacaccggagaaacagtatacgcattcggagatggactcagctacaccaaattcagtcacactttagtcaaagctccaagtctcgtttctctcggtctcgaagagaatcacgtttgccgatcatcggaatgtcaatcgctagacgcgatcggaccgcactgcgaaaacgctgtctccggcggtggatcggcgtttgaagttcatatcaaggtacgaaacggaggagatagagaagggattcacacggtgtttctattcacgacgccgccggcgattcacggatcgccgaggaagcatttggtaggattcgagaagattcgattggggaagagggaagaagcggtggttaggtttaaggtagagatatgtaaagatctgagtgtggttgatgagattgggaagaggaagattggtttgggaaagcatcttcttcatgtcggagatttaaaacattccttaagcattagaatctgattctatatttttatttgaggaagaaaaaaagaatattaatatgcttaagcttttgcaagttggaaaagaaaagtaataaaaaaaagaaattgtgaatctctttaaaattatagcattagtagccgaaaatgtggggcatatataaacataattcgaatatctaaaatatatcatgtgtaattcatgtgtaacataaatctagctaatatcagttagagttagatttatgtttggtatttcaatttaagtaaatttagtctttttttttttaattagttgctcaaactaataattctgataacaagcagataaactcgtagtatatcccgatcaaaaataaattaatttttattttcttaatctaaactaaaccgggttttgtgtcgaatttaggtgattcgactcaaatatgaacaacatttaccagaaatcagggttattattaccggtttattgcggtttacattttaaatataaataagattcacctctaacagaatatatcacgttttcctttttttctgaaactgtaaaactctctcacaaagcaaaaaaaccaaacctaaacaaaaatctagaaagaaagatttccgaaaatctttttaatgaaaaaagagcagacaggacgagaattcgcttttctgaatcctttagagtattgttttctccgtcgaattcgcatgaacacttgagctcaacaaggtcagattctcttgttcgcttttttttttttgatgaagaattcgactgttgtgttgatgctggtgctctgaattttacagacggcgtggaagtggacggtgaggtagttttttttagtttttgaaagacatg

SEQ ID NO: 1177 - DNA, 3000 bp, Unknown
  misc_feature (1)..( 3000): cDNA_ID_3060996_gDNA_ID_1620367_Annot_ID_154863 3000 nt of promoter + ATG
cgataatgccccacatgatcaggtagttgcttctggaatgtatctgttctctcaatccatggctttagataaaggatggtaattaattgtctataggaaggaagctgattattcacattggcacttttgtttttgtttaacccagaaatcagcgtggcttgctgtattctacatgtgcattccgacaggctatgcttttggctacgtatatggtggagtggtgagttactttttgttattcgttttgtctatgtcatgagattctgattacatggttctgttttaccccacttccagtgacctcaattccctccttctgttttcttgtaggtggggagtgtccttccttggcgtgcagcattttggggagaagcaatacttatgcttccttttgctgttctaggttttgtcatcaaacccttgcatctgaaaggtgcgtgtctgaagttgcaaacacacacatcctatgttcctgatggagttcagctatttctaataaatcttgtatcttcaggttttgctccagatgatacaggaaagccccggacagataacttaaacgttttgccagttggttatgggttctcagctgttatgaaagatttgaaattgcttttggtagataaggtttatgttacaaacattcttggtaaccattttcccttgtcatgtattaaaaagcatctgtgttcttgtatgatttattgattacctgcaactgttttccttcttttctcagggtatattgcttacaactttgttttaggcgcctattcatattggggaccaaaggctggttataacatatacaagatggtaaaatattaccagagcgtttcgtttccatgtgtagaacagtagaagtatatctcttgatgcctttatcccattgcaggaaaacgctgatatgatatttggaggggtcacagttgtatgcggaattgttggcacattatcaggaggagtgattctagattacatggatgccacaatttcaaatgcttttaaggtaagatcatcaacttggaagacaaattatccgcacatggatggaaattttacattccaaacatatattcctaccacttatgatcttggaaaactagtacttgatcgcctctttctgtattttgcaggttctttcagtttcaacgtttataggagcaatattttgctttgctgctttctgtttcaagagcatgtatgcatttttagctctttttgctgttggtgaacttcttgtctttgccacacaggtaatctcgacttccaccattcatatacttcatgttttgcaaatccacctcttctgatttatttcatgatgtttagggtcctgtgaatttcatagttctccattgtgtcaaaccaagtctgagaccacttgcaatggcgatgtctactgtctctatccatatctttggagatgtaccttcctcaccactcgttggagttcttcaggtttggtttctcagctgtatccacaaaattcttgattcagagctctaatgtcttaatcaaattaagcttcagttaaacgcgattattcatctagattagtttgagccatcactgtatccaacttcagaatgttttctcatttactcacgcaggactacgtgaacaattggagagtgacttctcttgttcttacattcgttctctttccagctgctgcaatttggtccataggttaggcttttagccacaccgggatctcaaagttcaaatggttctttttttagtataatgtggtaatgatttgttgtgtttgtgactctacagggattttcctgaatagtgtggatcgatataacgaagattccgagcctgatgcagtaaccagagaatcaaccgctgcgcctcttctccaggaagcatgagacaaaaaaactcaaaaggtcactgtgagaattttatggtttattctcagttctttatctactttcttgtacaaatagaattgtggctgaaacataaacaaatgtcaaattaccttcatttgtatattcttgtttcactgtttgcaaaattatgaaaggaccatccctatttctctacagaaaaaataacttaatagtccattacgacatgaatctcggttctttgagatcataccgggaaatgtttttcaacatcatcattcacaagatagagcttaaggagcatccaaagaaatcgcaacaatcttccaatctagctctccttcatcaatcatagccaaaagcagctaaaggcttaacctttagaacgtcaccaatctcaacaacatcaactacaaataaaaaacacgaatccatattaagctacgctctgagaatgaaacccataaagaagccaaaatcattttacctacctggatcattatctccaaaagcaccatcaaccttagagtttgatcttcccatgtttgtggaaacaatccatagttccagcttatgttgtaactgtacatataaccaaaaaacaagaaaatattatagctactcaataacatgttatatttttgatgttacatgcaaaggtttcgtggtgtagttggttatcacgtcagtctaacacactgaaggtctccggttcgaacccgggcgaagccattgtcaatacttttattttaacgtaatttttacttagcttcacgacgtcgtttacataaaaccgttttcatgtgactcaacaccacgtcacacatcgtttattctcgcgccacatcagtctctacattcttattggctaatactctccacgtcatcatctcttcccgtgaaaacccgccatttaaaaagactccagaaccatccacaaccttcttattccgtcttaacaacaacaaaagaaaaaacactgatccaaatttgggtccttctaattttgcgcaatcaaataccttcaaagcctcaaatttcgttcgttctttgtgataattctctcgcagctttgcaatatataaatctcgagggtttactcttttaaggcctggttttttttggtcaatccaag

SEQ ID NO: 1178 - DNA, 3000 bp, Unknown
  misc_feature (1)..( 3000): cDNA_ID_2131337_gDNA_ID_1620367_Annot_ID_154867 3000 nt of promoter + ATG
gcttgacaatttcggcgatactgctcttagcttgaaatgtcttggaagcagtgcagggagattgattgggagctctcaccataaccataagctttgttctgatgtttctaattgtcctgatggtggttgccggttggttctcggtttgggtccaacaccgccttcgtattattacaatgtcagggtcaatgataataacaacaaaggctctgcttcttctgggagtgttcaggaactctcatcaggaggtaactcaatcctgcaacttggtcctcctgctgtgaccatggatactttcagcggacttgagggttctctgttgacatatgcggatactaatgtgtcccaagctgctgttgatgagggttctacctcagcaaggcgatcaggtggctatatgccatcgcttcttttcgctccaaggacggagaatgttagaaaaccttcaaggatgcaagagtgtagtactaattgtggaactgatgcttataattcacagctgagccatgagtcagagttctctgtaagcgctttctctgacaggtcggcctctgccacgtcttctcagcaaaggatgagcaacccgaagaagtgcaagtttatgggatgtgttaaaggagctagaggagcttcggggctctgcattggccatggaggtggccagagatgccaaaagctaggttgcaacaaaggtgctgagagcaaaactactttctgcaaagcccatggcggaggaaagagatgccaacacttgggatgcacaaagagtgctgaaggcaaaaccgatctctgcatatcacatggtggtggaagacggtgtggattccctgagggatgtgctaaggctgcacgtggcaaatctgggctctgcatcaagcacggtggtggtaaaaggtgtaggattgaaagctgtacacgaagtgctgagggacaagctggactctgtatttcccacggtggtggacggcgttgtcagtcttcaggctgtacaaaaggtgctcaaggaagtacaaactactgcaaagctcatggtggtgggaaacgctgcatatttgcgggatgtacaaaaggagcggaaggtagtactccgctttgtaaagcacatggtggaggaaaacgctgtatgtttgatggtggtggtatttgtcctaagagtgtgcatggtgggacgagtttctgtgtagctcacggtggtgggaagagatgtgttgtggccgggtgcactaagagcgctcgtgggaggactgattgttgcgtgaagcacggtggtgggaaacggtgtaagtctgatggttgtgagaagagtgcgcaaggtagcactgatttctgtaaggcacatggtggtgggaaacgttgctcatggggaggagactggaaatgcgagaaattcgctagaggaaagagcggtttatgcgctgcgcataacagtatgtcacaagataaagctggaagcaaggttggtttgattggaccgggacttttccgtggccttgtctctacttctttacaaaccacaacaactgcaactactactactactaccactgatcattctcaatctggagtcagtgcggtctctgattgcatggactccattgatcgcccgctgccaccgttgcatcatcaacccgagaaaagacagaagctgatgataccaatgcaggttcttgtgcctccatcaatgaaatccttaagcttctcaaacaccgagagacccgatatcgaaacaaacaacaatagtagtggcagcaatgggaggaacatatttgactttatgattcctgaggaaagagttcatggtggcgggcttatgtctctgcttaatggtaacatgaaacaaacactccgttgatggaatctgaaagcttcctctctatgtggtaacaacaaggctagagtctgtgtaaagcttcatgtaatatgtatagttttttggttttctttttgtttctctttcactcttgggtcctttgtacatttcatgggtctctgtttttgtatggtctctggtcttgacttgaccatctagtcgatggcttgaacccaagtctttgtttatttgatcattgttatgaatgttgcaatgtacaagtaaaatgtgttcttatgttttgtaccaaaaaaaaacagagcttactgggtcgaatcagcatttccggttaaataacttttggtttaattcgccttgaccggtttaatggaaggtcaaagaaacagcgtcaaagtcaacatacagaaacaaccaaaccaagtcatcaaatggataacggaatctttccgccgttatattttccgttagccctatatatacaccgaggcggttaacaaacatttcgtctctttgaaactaattttttccctcttctctctctctttggccgtggagatttttctgagcaagcttcgtgatgctatcgaaccagaggaagacgaattagcttctcgatcacgattcttttaggtatgtgattatgatttaagttccgatttcgagctttaggtttagctctatcgcgattgaatctgtgtttttttcccgttcccgattcctctacaaccctaggttttgatcggaaatttcggttcttcttcttcgttttctacttcaatcgttctcgcttttgatttcttcaagttctgatgatgattatcggtaaatttcaaccttggatctttggtagattttgctgttgtctcgtgaatattcatcgccagttttggcgggaaaatgtttctgcggtggtttgtttttgattgaatctgaaacttactattgtcttgtgctctcgattacattcttcagatcttatcggaaagctttagcggcagagagaaagagtgaataagtcgagacttctctggtgatttgttattttctttgtggtttttggtgattgcaaatcctctggtgatgttgattaaaaaaagtctcattttgaagtctggtgatacaaggatccacaaaggaatctcagattctcctactgtagcaatatgatg

SEQ ID NO: 1179 - DNA, 3 bp, Unknown
  misc_feature (1)..( 3): cDNA_ID_2131421_gDNA_ID_1620368_Annot_ID_154897 3000 nt of promoter + ATG
gat

SEQ ID NO: 1180 - DNA, 3000 bp, Unknown
  misc_feature (1)..( 3000): cDNA_ID_2131473_gDNA_ID_1620368_Annot_ID_154916 3000 nt of promoter + ATG
tggttatgaataaatctgaatcaatcggctctcttgatgaagttgcttcagaggcccttgcactaggttttggcgagcctatagctatttcagccgagactggacttggtatgaccacactttatgaagttctgcgccctctactagaggattacacggtcgaaatgttaaacggtaatatacccgtatcaagataatcatacctcccttaaatttcttcttcactgaacctcgcagtcttataatagatataggcagtcaagatgatgttctgaccgatgagaatctctctgatgaaatcgacgagtccaagttgccattgcagttagctatcgtaggtaagcctaatgttgggaagtcaaccttgctcaatgcattgttggaagaagagcgtgtattagtgggtccagaagctggcctcacaagagatgctgtgagagttcagtttgagtttcagggtaggaccgtttatctggtaagattagaattcttatttttcttatactctgactccaactattattctcttgatgttagacagagaagtggaaccagcgttcaatattattcactttgtttgatgtttataccggatatctgttaaggttgatactgctgggtggttggagagaacagagcgagacaaaggaccagcatctttgagtatcatgcaatcaagaaagagtcttatgcgggcacatgttatcgcgttagttctcgatgctgaagaggtttgtatacacacatactctcgtgattcatgttttttttttcctgcagaactgtgaaaacagaagaaagaaaatcaagagatgctcacgctatgttttgtatttgcaatatccagatcataaaagctaaatgtagtatgacacattcagaagtagttatcgctagacgtgctgtagaagaaggacgtggtctagtcgttatcgttaacaaaatggatcgtctaagaggtagagagaactctgagatgtacaagaagatcaaagaagctgttcccattgaaattcagacagttattcctcaggtaataataaaaattgcatcttttattaattctcatttcttcttttgccattcttcgtatttcccggtgatggaaacataatatttgcttgcagataactggaataccagttgtgtttatctctgcattagagggaagaggacgtatggaagtaatgaaagaagtcactgatacatacaagagatggtgttcaagactttccacaggccgcctcaatcgctggttgcgtaaggtttgtactttaaatgttacagactatagtatatacaacaaaacatatgacatcattatttgcttaatcgttttttgtgtgtgttggcgtaggttatgagccggcattcatggaaagacacggcttcacagccaaagatcaagttctttactcaagtgaaagctcgaccgccgacttttgtagcgtttgtgagcggtaaaacgcagttattggaaagcgacataaggtttctgactagatcattgaaggaagattttgatttaggcgggactcctattcgaatcatacagcgggttattcctcgtgcaccaccctccggtacaggtggtggtggaagcggaaacagctcgagtcgagtagtgcaaagaaccacctcagacaaacggactctctcggcctaagaacccattacaagtgaagaaattttccctacattaactagtttgtgtcccgttttgtatgatcatacttaaatacatctttttcacctatacacattcgaaaatctaaaatagttggatggagtttaaccttaaacttcattagtgtccattaggtacaattaatagcagtaatataaagaatctataatattgtatagtacacgaaaaatatgtcatcgtatgcaaaatatttggtcatagaaaaacaaaattttaactaagaaatatgtatatagattcactttttatcacgtagatcattgaaatagtcttcgtaagctttgataggaatacgagcatccatccacgaaatcttcaacatcttacgttgtgagtccaaactcatccacgagactagactcggtaaggttacaatggctccaatcatggctatgactttcgttgcgatatcgtaaaacaatgtccagttctcatctttgttatctttctcctggtcgttgctcatactgattacaaagatctaacttcttctgctctcctttttttttttttttggttgtgtatgtgttttgatttataatttcaaggttgctaatgtgacgcgacctttactattatttattgggatctctgaagacagtcccgaaaaggaaataatataatttgacaatatcaaaaaaggaaacatttaacaaagaatctttcattaattaatttcgagcaattgtgtcaacaataaaaattcataatcatcttctgacatgactttaatgtataggaagctcatgatggagaaagcaaaggcaattaattacactatcggacttgtccaagattgcttagcattttttttgcacagagcttgaagattgtttatctctatgacgttttgtttacttggttatgttttttattttcagtgcggtgacatcatcccttgttgttgggatcaaataattgaattgaggatgatgttctgttctttcttgtttttaaagtatggagaaagacacaagtttgaaatcaaggtcagctgatttctttgacgccaataattcattctgtattattttattggctttaaaccaatttgcatattagatttattaaaagattctgctagttgtctgcttaaaaagtctccatttatttaaaagttctaatcagttcttgtctggggctttggtcttccctttgatttcttggtaagagttccattcctgtggaatctgtaaacagaaatctctatgagctatcttttttttttccagattgttttcatcggtagatgctagactcaaaacaactgattctttgttgttgaaagaaga

SEQ ID NO: 1181 - DNA, 3000 bp, Unknown
  misc_feature (1)..( 3000): cDNA_ID_2131435_gDNA_ID_1620368_Annot_ID_154906 3000 nt of promoter + ATG
tccgaaattcttgaacttttctcgaagtaacctcaattgaaattgaaattgaatttggacagtacgagttaagggtttttcaagcaaagtaaatccaaatcgatttaagaaattgcagagatttggaggaaatgacaagagaattggatttggtgttttacggttgaaagagcaaacgagagtgtagtgtgaaaagcagtggtggtggacagtgacggaggagatggatatctcgtcgccggagtccccttttcgagaaattgtaatttaggattttttattggatttggatttttacgattctggaaaaaaaaattaaatcacaaaggcaactacaaaatcgtggctccgtaaatctgaattggtttagtgaaaatggatttgatttgtttggttatagaaaaccgacgatatgagggtgaacaagtaattttaattattcaaagtgcctaatgatttttaagtgcctaattacggataaactttcaaaaaagtgtctaatcacgtaatattctcttttttgtatgcattaaggaatttttatgatagttttggttaagactaataaagattaaaaagtaatgaataatgatgatagatgagaacaaatgaaatctctttgatttgtcatcgtttcaaataaataaaaataaaatgatcaatagttaacgtgatgtagatagaactgttagatagattcactcattgcccggatttgatcaccctataggtaaaatatttatcagctattaattcgaaagtgagcccattaattaatatgtatgcgatacgaacgttatttattaaacatgttgcaacttttacatagttacatatagacaaataacgcacggcatttcccttccttcgtattttgtcgaaaaacaaacacattatattaataaagatgaactcatggcttccttcctctgttgtgaaaaaatggataaaattatgcttctgtcgaagcaaaatgtttaacatgtgccctgttcagtgacctgaatccatcatctccggcgactttcatctttcccgcggcatcgtattgagctttacctccaaatccaacattgaagaaatttttaaataaaggagcttgagcatatagttcccttcgaattccttttcttccgtgagctttggcgtccaaagaagcatgaatagcaattttttcatcggcgaattcgcctgctggtacttggtaaaagagttctcttcggtgacctccaagataaccattaaagaagtcagaaaacttatcgataatggattcaaatccttttacgtcagcaccaacgtgagaatccgcgttgtatttagcttcagttagttctcttcggtgagttttacctcctagataaccaccaaacttcttgaaaaaacttttgaaagcatttcttactttctcacggttttctccaagtgctcttgcgtgaagacctattttcttcatcttcttattctcaagattgttaacaacattcatgaaagcattgatcgaattcttgaaacttatcatagcgtgattgagctttttcgcttcgtgagccgtgatctttgcatcagcctggtaatcatgtttggctgatatctttacaatagtttctttaattcggagaaacccttttgtcaaatcagcatagcttttctttagcttcaaagaagttttcttattgactttaccgccaacactagcttgcgcagcaagaattgccttgttcatcagggtgtatctggtcttggcaattcctaaaacatctacaatgggattctcaaacttgtagaggctctcgaggtatgtcacgtagcctttgcacattgtgaacattgccttgaactcaggggttttcggggcagaccgctcttttcggtttaggatctcagtgatttcggtaaaaggtaaggtctggagttcggatactgtttttggacatgctgattttctcggtgtcacgggaggagcgtgaccggaaacggaaaggaacactgagccgagggctaaaacaaaggctaatgagaacaacagagagatccttgccatggttgtattgcttatggcaaggcaaaaattgttaaaaaaacaatccctaaaagagaaaatacaatacgaaggaagtgcgttttgatttgagatctaggaaccctatatatactttgttcttttaactcttataagctaattataggacacataaatggttactataaaatgagaaaacagaaagaaaagacagagagagattcatggaactcggttacttttttttccttattaagaattttcttaaatgagaaaaaaaaacaaaatacgggatatcagtttcaaacaaacgtacgtttcctaggttaacaataatatttcgttacctagtttcttaacttttaagggtagacaccgagattggcttagtgtacatagtgtaaactggaattgtacgacaataatcgtgtagggcaaatgaattaaaaatcgtgtagtttaaatgaatgataacaacaaaacattcatttcgattttctcttcgctctcgagctcatcttcgtttctcttcgattgagcttccattcctttctgttcaatctctaattcttatcaaatatatatatgcacacactaattaagtaatatatatatatatatatatatatatatatatatatatatattacttctagattgtaatcataaatgcaacaattttctatagaccataatataagtatcaattttatactgtcacagtgaatgtatacacattgtagacctaagggcaacaattttcttttgcatttactccaaaagaatgtaaagaggagaaccactaggtcctttgctattctttttttttttttttaatctctatccaccagttttcctcttaaataaattctttgttttcatgattctaaagatagagtccttcatatttctatatatgagactttagagtcttcaaaagtaaaacaaaattgtcaatctatgtttctcatacaatg

SEQ ID NO: 1182 - DNA, 3000 bp, Unknown
  misc_feature (1)..( 3000): cDNA_ID_2131445_gDNA_ID_1620368_Annot_ID_154908 3000 nt of promoter + ATG
gaataagaagatgaagaaaataggtcttcacgcaagagcacttggagaaaaccgtgagaaagtaagaaatgctttcaaaagttttttcaagaagtttggtggttatctaggaggtaaaactcaccgaagagaactaactgaagctaaatacaacgcggattctcacgttggtgctgacgtaaaaggatttgaatccattatcgataagttttctgacttctttaatggttatcttggaggtcaccgaagagaactcttttaccaagtaccagcaggcgaattcgccgatgaaaaaattgctattcatgcttctttggacgccaaagctcacggaagaaaaggaattcgaagggaactatatgctcaagctcctttatttaaaaatttcttcaatgttggatttggaggtaaagctcaatacgatgccgcgggaaagatgaaagtcgccggagatgatggattcaggtcactgaacagggcacatgttaaacattttgcttcgacagaagcataattttatccattttttcacaacagaggaaggaagccatgagttcatctttattaatataatgtgtttgtttttcgacaaaatacgaaggaagggaaatgccgtgcgttatttgtctatatgtaactatgtaaaagttgcaacatgtttaataaataacgttcgtatcgcatacatattaattaatgggctcactttcgaattaatagctgataaatattttacctatagggtgatcaaatccgggcaatgagtgaatctatctaacagttctatctacatcacgttaactattgatcattttatttttatttatttgaaacgatgacaaatcaaagagatttcatttgttctcatctatcatcattattcattactttttaatctttattagtcttaaccaaaactatcataaaaattccttaatgcatacaaaaaagagaatattacgtgattagacacttttttgaaagtttatccgtaattaggcacttaaaaatcattaggcactttgaataattaaaattacttgttcaccctcatatcgtcggttttctataaccaaacaaatcaaatccattttcactaaaccaattcagatttacggagccacgattttgtagttgcctttgtgatttaatttttttttccagaatcgtaaaaatccaaatccaataaaaaatcctaaattacaatttctcgaaaaggggactccggcgacgagatatccatctcctccgtcactgtccaccaccactgcttttcacactacactctcgtttgctctttcaaccgtaaaacaccaaatccaattctcttgtcatttcctccaaatctctgcaatttcttaaatcgatttggatttactttgcttgaaaaacccttaactcgtactgtccaaattcaatttcaatttcaattgaggttacttcgagaaaagttcaagaatttcggaacaactaaggtaaagttttgtcatgttgacttcagagatcttgttcgtaattctgtgataatgtttgataacttctctgcccagtttgtttgaaattcagtacttgaggttctctattggacagaagatgaacatatggactacaacacttggacaatccgtaatggacaaccacacattttggttgcagcgtatgtgtcgttacaaaattgaaaatcaatgtccacgaccatacatgactgcacagcttggtgtttgataattcaaggaaaaagccacataaaggttctatttcttaatcttacattttggaagaaatcaaatcattgatttaagaaataatatgtaagcttggatgctagagctttaggtgatcctgtggccagattaggatattgatttaacttttcttactgctactcaacattgattgtctggtattaagttgtaaaagagtaatttgacttatccatttgtgttgatataattggttattataatgtgattagtcaatagaaaaccttagagtacataatatcaaacttttaactttgttaatttttttaggcgagtgggtgaatacatcagttagacttgcttttgcacatcatgtgatcatcgtttaattgttatatgatcggacggtcattatttctcattaacttctatttaaactgcaaatcttaccacgttcatttgatccgaattaacccattattctacacgtgtttggtacacacaattacaaaccaaaaccaatgaccggttattcttttttcgtgattcagtttatttggggtataatggtctattttcactccaaaaacaaagaaaaatatctcaaccttggaaaatacctgttttgtctaaactttttcccaaagtgccttattacggaacattccctacaaaaaaaccatcgtcatgtactggacaaaatattcttcaagtttgttttcatgttgtgttgggccgtttaattcgcatgtatcccatatcggaccttataaacttataagttataaacattaaaatataatccatttgtcaatccttttttccactttttttaattaagataaatcttaagtattaccaaatcattattaaatttttatatttattattctagctttaccatttacacatactttacccccattgtattttcattgccgaaatgtttcaaaaaaggatgatttaaggggcaataataatatttaaaaaaactgtgtttagtgatgaaacaaaacccgccgttggaaattaaaccagcccatagagagaaaaacctctcttaacgaagaaaaacaacaacatggcccctggtttctcttctctttcgaatctatcttcttcttttatccaatcctttcctatttttattctcaccttctcctcgtttttcccgaaactgttcttttgccctcttctctcaattttaatccaccaaacaaatcgaacagtgttcgataacttttagattgcaagtcctgtttttgatttggtcgggagaaagaaaactagggttttg

SEQ ID NO: 1183 - DNA, 3000 bp, Unknown
  misc_feature (1)..( 3000): cDNA_ID_2131469_gDNA_ID_1620368_Annot_ID_154915 3000 nt of promoter + ATG
aaacagagaagtatggatcagtcaaaacaagagacagagacacaaaagttgaaactttgattggcaaagtataaccatgacagagatgcaccaagtttagatatttttctcattacaaaacaccaaatctcatgttatatcagaactagattgatctgcacttatgtaccataaagctatccaatttcttctcacaacactccaatggaggaattttaggtaaaacaaaacagtaaactatagtctatggatcaatcagagacaaataaagtcagaaacttttgatagcattacaaaaaaaagatgaagactttatgacagagatacttacaggaagttcatcaacatctaatttgacgaaatcaacatcattgaacttatcagccatggcatgaatcgcaggctcaatcatcctacatggtccgcaccatgaggccgagaaatcaaccaccagctttattattcacagaaaccaaatcagttaaattccattgaaacacgaaatcgattgaatcgaatcgagagtctgagagacgttaccagtttgtttgattctttgatctcgttgaaatgaagttgccaccgagcggaagagctaaactttaggacgcgacttggctcagattcggtccctgcagctgttgcatcttctccacttccaaacacagttgataaagctcctcccattatcgtctctcgtctcgcttctctctctgattgcgtttaagaacgaccctgctttctttggtcaacgatcgtgtcgtttaatattcaaacatcgtgccgtttctaccactagagctggtcaactatgggcatgcccacctcatttagcccatttaaaatctaccccatttaaaattatttaattttaagatttataaaattgcccatttaaactcatatacccatttagatataaattaaaaaagcaatttaagtgactcggaacacaaaacaactactaaatcaagaatgtgtctaaccttttataaaacaaactaaaatcaacacttaccatcaaatttcaaattcttaccaatcgaaagacactaatatctataaatcaaactcaaacatgttcaagttttcaaacacaataagtttcttattcttcttagttccaaaacatgttgcttcttctacatttgtttcatggtgcacttgaattttctgatcttgaagattctgctcgggtactaattgcaatcatccttgcatattggttgcaaatcatcaatgtcttttagggtacctacaattcaaagtatgaattcgttttaaaacatgatcactgcaagaaacctcgttttaaaacataactacacaatatttttaccttcatattccgcaaatcctcgcaaccaattatgagtacaaagcagagtctgaaagttcttcggaagcaaccagttcatgtatggactcgagacccgtgctctgatgctaaaagcagactcaaatgctactgtcgtgataggaatgctaagtatgtcatgcaccatagatgctaagttaccaaatctgtgttggttttctttccaatagctcaaaacatccaaatttcgaaaagcctttctatgtaaccttggctcatccaaataaacatctaattgcgtcttcatgttgtccacatcactttctaagcttctttctagctcaaaaaggattacaatatcattttggctatgggtgcaatcttggatcctagatgaagttgcagattcttgaaaaaacttataagcttatgagtatgtggatctttctacttctaagtcgaaagctaaagaactcaaaaatgtattgaaagaactctacaaagattatgagaaaaggaagttggcaagtttatgtggagcttttgtcggctctctcaactatgattcgcttgtggagctttttttgactctctcaatattaatgtgaaaaataaagaaccggaccaaactgaaactgtataatcaaatcgaaccaaaccgaaatattaataccaaagatttggattgtagctctttcgattttagattttgttgtaagtatggtttttttaagagagaatgtaaaatttattcaatctttttaaaaatgcatcagtttacaaatgtatcaaactactgttttcattttagtgtcgcaaaaaattagtcgttaaagcatagtataacacataatgtgttattgcatttgaaaatttttatttgttggcaaaatgttcaccaagttgtattttgttgtggagcattcataagctttggaaaaaagtatgaaaaatttaggagataaacaattttgttaagaattaaaagataaatttgtacaaagatttcatttgatgaattacggatcaaattatttaggtttcagtttataggacctgaatcaaaaataattttaatttaagtaaaactaaattgagctgaaaaataatagagtttattaaaaatatatattttttagtttttttatctattatatcatcattagaaatatttgatctaatcctattatgaagtagtttacctacaataataatgtttaaaacgataaacaaaaaaaaaaaattgaacataactatcataaattgggttaattggtattgttccgtcagtcagcttaattagtattgctcagtcatattaaacgttacaaagtccggatcgaattctgaccgaattcaaacggtaaataaatcgaacttacttattacatggatttaaaagcaacccactataaagcccagtggggttttagaacccaaataggaaaacgacgtcatatcatatgtaaatctcacatcactcacgtcgacaaatcggcatgaccaaacaacggcagagttctctcgattctcatcaccggtgaaccaaaaggtttagggttttagcttcatccttctgcttcaaagcttcaatcttttctctcgattctcatttccaatttcataactgattcacaaatgcaaagcttcgtatacccataaagttgaatttgtcgtctgca

(The sequence listing continues in the following parts.)
